United States Patent Application Publication US 2009/0119022 A1 - sequence listing, part 5

SEQ ID NO: 4543 - DNA, 2828 bp, Emericella nidulans
atcgatggacccttgagcttttggcagcactgcagagtagtctcaagtcacactctgttgtaggatcagatatactcgcagtaagaatttgacccatcggtcatccttcagctctcgacttcctatttgctctcaaaataccttcagcgtttgccggcaacctcaccgacggtttcgggcacgtacctatcgccaccaggtggtttcctcttcttatcttcagctggccttcagacaaagggacagtaacggagagtaaataaggttgcatctggcacatcttggccctcgatctcgaatccacggaacctgttctcgttacctgaggttacgtgcagtgctaactgaccatggaccacccgcacccatccacgttctcactaggcctttcgcagatcctggtatgcctcgccctgctctacgcggcaatccatatcctcagcgtgtaccggcgcctctgccatatttccggcccgttctgggcacggatatccaacctcccgcgggtctggtgggtgaatacatcgcgtgcacacgaaatccaccagcaattgcatgagaagtacggcgatgtggtgcgctttggacccaatatggtctcgctgcgaaatccgacctggataccaactgtctacccgacccgcatgggtgtgaagaagagcgacttctaccgcactttggcaccctacacgcccagcggcgctctaccggccgtcttctcgagccgggacgaggaggtgcacaggggacttagggggcccattgcgtcgctgtattcgatgagcaaggtcttgccgttggaggtgtttgtcgaccggacgatcgatgtcctcgtgcggcagctcgacgggcggtttgccggggccggggagacgttcgatctcgcgtcctggctgcagttttttgcatttgatgttatgggcacgttgacgttctcgaagcggtatggctttctggagaagggaatggatgtccatggaatgttggatactatctggaggtttttgaagggagcggcgccggtaagctggatttattcctcctcgtttacgcgggcatgaactggaatgaatgagactgaccggatggtgctctacagtttacgcaaatcccctgggtcgatgagatctggaataagaatgtccttgccacgaagctgaaaggcgctactggggtctctatcctgggtattgttggcaaattcgtatcacaaagacaagaggagagcaaggctggtaagatcgacgggactgcagatagggatatgctttcgctattcatggagatccagaagaataaccagcttccgccgtggtatgttccctgtctcctccagaactcctacctaccctgacaaaatgtccaactgatgagaaacgcaccgcaggtacgtgacggcctggaccttttccaatattacagcaggctcagactcggctgctgtcgtgatgcgcaccgtcttttacaacctcctctcgcacccatcaaccctccagaagctccgctctgagctactctctgctggccccttgacgcagccctatccctcttggaaagacgtctgcaacttgccttatcttgacgcatgtatcctcgaggcactccgtttgcatccacccttctgtcttccctttgaacgcattgttccacagggtggaatggtgctgggcgatacgtacttccccgagggcacggtcgtgggcatgagtccgtgggtggtaaatcgacacaagcccacattcggagaggattccgatgtctggaatccggagaggtggatggtgagcaaggaactgaagagtaagagggaggcggcagttctgacggtaagtctttcgttcgcctgcttcacttccacaatcggcaatgagatgcaatttgaaatgctaattaagtgacttggcagtttggagctggtcgtcgcgtctgtctagggcggcacattgccatattggagttgaagaagattgttcctgcgctggtgttgcggtatgatgtaggtcgtccctgatatagatggcctactgggctagtggattttatagtgtcagctaatgccagcctcagtttgaactcattgatccagaaagattcacgaccgagaatttctggtttttcaggcagcggggcatggatgttcgggtgaagaagaggatgcaagcagaagccggtatatagaagctcggctggggacatctcctgggctaggttgatagtgtccttctgctagctggctcaagttggtctgagagcgcttcttagatatgcatcactcaaagctttttgatattttcactgcaaataaatctagttatgtttcgatctttgggactcatttggagtaaagcgactcaatgtggacaagggacaccgtaaacaagtatttgtaggcctgctgtactccggtctttgtaccaatgtccatatttttagagcccattaacagggtaatctgattgatatgcttacccgaagatttagagatttctgtatatactggggtaatgatgcctacttcttccattgcaggaatcagcatccactctcgagcataattaggaacagtagcaaacaagtagtcttggtcagggcctcctctggagctttctgtcttacaacttgtagttgtttgttggagggcaacgtggcttcagatgcggtgctacgaaagtcacagaaagctgaacacgctacagttcagtaagaaagcgacgacaagccagctcgtctataacattcagcgaggaggaacctgttggtctcagctcaaggattcacgcttggaaactacaactcgtctcgagagcaactgacctgttcgattggca

SEQ ID NO: 4544 - DNA, 2047 bp, Emericella nidulans
cataatcgccgcaattggtatttccagtccgacatacaaaagttataagtatcgagcggtggttatcccactgtatacgacatcgcaacactcatcgttagggtttcctgacatacttcgctcgctatttactactctaagtccattcgttcgagcacaatcgttacaatgacatatctatatctaactccaagtcgcgaaaatgtcagttcactccaggagagcgagcagcgctccgttgcacccactgagggcagctttttgattcccctcttcgctgatgagccgagattggtatgtccaacctcatggtgtatggatattgtaggctcacgagagaataaaggtgacctggtcttcgccccatgaccccgagaacccattgaactggagccatgggcggaaatggtcagccactctgctggtctcgtgcttcacctttatctcgcctgtatcgtcgacaatggtcgcaccggccctgcctgagatcgccgacgaattcaatatcagatccgatattgaacgttacctggtcatgtctattttcctgcttgcctatgcggtgggacccttcatccttgcaccgctgtcagagatgtatggaagggtcgtgatactgcagtcagccaatatggtttacttgatcttcaacacggtctgtggctttgccacatcacgcgagcagatgcttgcttttcggttcctgaacggtctcggtgggagcgcaccccaaacggtatgtatgtctgaagcccctgagcatcagggcagcgctgataataaggccagatcggtgtcggtgtattgagcgactgttggagtaagaacgagcgaggagcagccagccccgtgtacgccgtgatgccattcattggaccagccgtgggcccaatcggtaagagctcccctctttcccctgcctcttctatctgacatcggcctccaactgactgggcgatttttcagccggtggttacctgacgcaatacatgtcctggcggtggatcttctgggttgtctccatggccgacgcactggtccagatcctggccttcctcttcctccgcgaaacatacgcgcccaagatcctgatgacgaggaaaaagaggctggagcgtgaaaccgggaattcattgctgtatacagagtatgacgagccggatcgcacttttccccagctcctaaggaagaatctcatccggccattccgaatgctgttcactcagcccgccatccaggcaatcgcactttaccgagggtatcaatacgggctgatgtatctagtggtacgttccctgaggcaatgaaaacaaaggtatatcgctaactaattcagacttgcttctttcccaactgtctgggaggggaggtacgatcaagaaaaaggaatcgccagcttgaactacctctcccttggagtcgggttcgttcttggactgcagttctgcggccggctcattgactatgtaagctcaccctagaaatgcgcatccccttttcagcctccccgttactcagacactgatcgtcgcctgttctgcggcaggtttacgagcgtctctccaaatactacggcgataccgggcgtcccgagtaccgcgtacctttgatgatccctggaggtctgatagtcccaatcggcctcttcgtctacggttggacagcagagtacaaaacacactggatcgtccccaacattggggctgcattattcgcgattgggctcatcgtctgcttccagtgctgtcagacttatgtgatcgacgcctacactcggtacgcagcaagtgccacgggcgtcacggcgtttgttcggacgatggcgggcttcggcttccccctctttgcagatgggctgtaccgggcattaggactgggatggggcaatagcctcttgggttttgtgagcctgggcatgggcctcgtggctccagtgctactttggttctggggagagtggatgcgggccaagagcccctactgtgctggagacgagacgagtcggctctgaagctgaaacactcggacttatgacaagaggtggttg

SEQ ID NO: 4545 - DNA, 2423 bp, Emericella nidulans
cgtcgtctttgacatcaagcacagttctagctttttctcctagaccggacgacatgaaggcgacaaggtttctccagtcagtacctgccgcgatggacaaagagctctaagttatcgcgggagtcttttctgaccatttttccatatataccaaggatgacagtgtattccaggtatggtaagaaccatacctttcattacggagtgttacgaaggagtgcaccagcttgccagcaacaagccggtaatttaacaaccgaatcaatcaaaaagtcacaagcgggggcagtgtatcgactgaaggattctcgtcagcctaatgcctgccgaaagacggaacttatgcccgtactatatctggcagtgccgagctccttcgcttgcagagctgaagctagaccatgagggaagactccataggaggccgtacggacgctgtattccattggctaaattccagccaggtggtggacggctgtctggtataactactatcacctctcagttgagatccgaccctgagtcctaagcctaatatcaacagggttgataagctactatgagtttcctcgggcttctgctgtctgcagtttttcctgtggcaatttacggaatttttctagtcgtctatcgcctctactttcatcctctgcgtcgtttccccggccccaagctcgccgccgcgacattctggtatgaagtatactacgactggttcaagggcccctaccccggctctagctggaacttggaccgactgcataatcagtatggccccatcttgcgaaagacgcccgatgagctttccatccgcgaccccgactacgtagacgtgttcttcgccgggggccggcgcgaccgctatagccggcagggtaaggaggcacaaggctcagtgcagtcaaccctcctgggcagcgaccaccggagacggcggggcgcattaactgggttcttctcgaagcgctcgttggataccctcgagccgtttatcatggacaaggtggagcagctttcggctagcgtggaggagaatttcctgaagactggcaatatcctagaggccggggtagcttttggcgcgctcacactggataccatcacggactactgctttgatcagagcttcggctgcttgagcaaaccagatctggcacccgagtggcgcaggacgttctgggatatgctggaaagtatcccttttctgaagaactggaccttctttgcagagatgttcttctgggtgccacagtgggtggtgaaacatacaaatccggcgatggagcagtttttcatcatgcaagcggccatcagagcgaaggtcgcccgcgtcacaatggagtgggagcaggaccaggcgctccagttacagggtaaagatccctttatgaaggggaagaggaagaggacgatcttttacgatattctcaatagcgctgtgcttcttccggaagataaaacacccaagcgcatggcggaagaagcctttggtatggtggtggcaggaggctatacaaccggtaaagccatggcaaacttgatgtatcatctccacgccaatccgaagtggctagagagggttcgggaggagctggattcgctcatgccgtccccagaccagccggtcaagttatctgacctgcaagccctgccctatctgactgcctgtattaaagagaacctgcgcatcagcaacatcatcacagatagtatcatgctggtcgagccagtcgacactcttacctacaaagattgggtcatcccgccaaaaactcccatcggaatgaccttgtaccatatgcatatggacgagcagatctatccggagccaaaggcgttcaagccggagcgttggatcaagggtgcagaggcgaacgacgatctcgacaagtactttgcgcccttctcaaaggggactcgcggctgtttgggggttaagtatgtctcttccgctttcttttactcttttttcctagactgacctttttccagtctggcaaatgcgcagatgtatcttggcctaggcgtcattcttagacgcttcgatttccagctgttcgatgtggtgaaggagcgcgacgttgacacggttcgagactgcttcgtaggcctcgaaagtcctgagtcgaaaggagtccgattaagagtcatggataagcgtgaataggcctccgcaaatgctgtactatttcgttttattccatactattccttcgaagttgaagtaattcatttgttatagatgacaaaatgctatgctgcttgaagtatatcccaaaccttttcagcggccctcgctagactgtcgcagaacctcgttgtgtcccccgcaggcccgaggatggagtatttgacgctattcagaaaggcaaacgtcagtgtcttgcagcagaaataaacgtgaggaaactctactcaccttt

SEQ ID NO: 4546 - DNA, 2795 bp, Emericella nidulans
ctactgttatgagggatgaccttcccctcaatcttgatcagcgttgactggtcgatcaaggctttcgattggggatagatggcgtatgcacagtaggcatcggtgattgttgctataggcttgaccttcttcgtcttctttgtttcatagaatttgatgttccctattactagcctcggcgcacggtcataggcggattttttcttcatggtcttctttgccttctggagctgtttttcatctggcggagtgatcacaaaccagcaccgccgccagggggttccggctccaaacctcacacgagcccaatcttcatgtttaaaccggctccgctccaggatagttctgatgttattcaattctctgcctttcgcggcaataatggagccagtatacgcttcgtagaggcaggtatgttcgtacatagccaggcgaatcgctgccgcccaatgtatcaaagagtcatacgagtcaaaatggagcagataccgattttgaccggcggagcacacgctcaagacgttctgcagagactgtgggcctgcttggttttgtgtggggaggttttcaatctggaatgatcagtaacgaccgtcaatgacatcgatgaaaagactctcaactcaccgatctgatcgaagcatctgcaagattaacgaatgttgcggggacttccgctgcatcgcctgctgcgtccagcgcagcggcatcccaagggacaggactgtcccgacaagctgggcgtagcattccacccattgtcgatcagcgcagggccgaccatctagaaacatcagttagtctgagcccttgcatcctcaaaattggacatacaggtatccaaatcattcagctttaagaaatatccctcgtagtatagcttgtttgcatgactattcatatatgaaaaaatccgctgtagttcggcgggtgtatcttccgccagctgcatgaacgggggattgtgtgtaaagattgttgagcccggccgcgacatgcgccgttcgactttcgacgaggggccatcgtgcggagaaggcgtatccggcgaaggcgtctcgaaccgcgacggaggcgccgtcgttgctgaagccgatcgattgcctacatcggggcttgttttacgggacgatcctccaaacgaggacagaaatgatagcactaggaacgcaagggatgtcagcgaatggtcctccaaagtagggctaattgacccaatcacagcaaaacacaactagactcaccgcgagagcgacccatctttgcaacgatcgggtctcaacgacggcaagaagaccggcttctatgttcaagagatggaaaacgaacggacgaagaggagaaggcgggagaagaggggaacgtgttgtctccggctcctccgcacggagatagcgacagtgtcaagataagacccggcagcgttcagcttgcactgattattccatgaaggggcgcctgaaagaacgataacaggaaagcgaacggctgggaagaaaatgaagctagacgagcaccgaagatgaattgggtctcggttgatggcgcaagatcgaggactcgtcagcgcctgaccaagtcagtcggacgttagcacgatagcctaaatgcctgggaatctagcgaagagggttccgggcgggcagaagaaacagagggaaggaaaggacgagagcgagcggatggacggagagtcgtgtagtgacacaagacgcaagcaagagccaggaagaaagcacgaggtgagacctgagactttgtctgcaacggagttccggtggaggtcgagatgatgcgcgtgggtccgtcaccgtttgggcctccacagtttgcttaccttacagcttacactgcttccttatccagtatctatctaaaaaacagacacgaaagatggagatgaaatggatggtggacgagaaaaaagattgcctggacaggaaccgtgttgacagaggaatcagaaaaaaggtggcacatcgctggaaggctgcgtcatcccaccggtccaaccagacatcagatcgctgctaaccggtctaggtcgacggcttcagctccaacctaccttctccgtacaggtacaggcacgatttaaaggcttgctgcagctcccactgatcccagagaggccgtctgacagggttgctttttttttctttgtgaaccgagcttctgtggcttctgtgatagggcagatacccatgccttcagtacgacgcggcattgcagcgatcctgcattttagccttggccagacgtctttagaatctttcatactgattggaggaactgccaaagtgtgtgaatggttgccaagtccctgagtatcagtcgcctcgatcactatttggtcaaactacgaggacgtgctcgacagagtatagtacgaaaatgtacaaaaaaacggtctgtcccccgcgccaaatatagaaacacgggcctgcatgtcttggatttggcctgccctatctgaggctaccgagccaactacagcatcgatccaaccatcctctctccaggttccagttcttctgttccagttcttctgaactggacacgagaacacaaccgagacaatccaacaatgatggcttttgccaagctcgtctagaaaagccgggtggccgttgatttcgaccaagactccatgactagagcccgcggcaatccgagtggccaatcgccggactccatttttacattgatccgattattgtctctagagcgaatagttcgttttctggagtcgacggcctgagagttcaccctgaaccccttttaacagcgcttga

SEQ ID NO: 4547 - DNA, 2008 bp, Emericella nidulans
tcaccggtattggcatagttatattggatgacgtagtctgcataaaagttgttatgggagccactcagggcggaggatgccatctcaatgatttggtcaaagcctagtttaggcttgggtagaagtaagtctgagaggggggaatcgagaaaaaaccatcccacacctagagggccggcgatagaaataaaggagatgagaactttaaatgtcgtcatccgcccaagctggacacgaagcttagcgagtttgggcccttcgtgggcttggcgcaagatagtgatctgctgtactattcacctagtagcacgcaccgccactcccaccagatcaacgtctccgacactgcatgatctcaccggtcgaacctaggacaccatatctaccaaatggtacatgttcggtgagcgtcgtcttgatttgaactgtatgtctgcagttcgggctcatggttgatggccccatgatgagatggcaacagtgttcaacctgcagataggaaggtactgaaatccgtaacttgccacttaggaagctcctaaacaaagcaatctacataatttaatgattcccaaatatgatctactttgtacttcagagctctgaccacagcctcaaaacaccacgtattttactttctaggttttcatattgcattgcagcaaccacccatacaacaagttgggttccgtggcgcaattggttagcgcgtggtgctaataacgccaaggctgagggttcgatcccctccgggaccatactttttttgccttttgtattatctatattcataatacaaaggcagcgtcctctttactatgaagatcttaaataactcttctcctcagaaccactatgaaatggcccgtactatcagagtaaggagtgtttgcaatgcatatcaatagtcggaaataaatatagatagccaggagtgaactgccacaggatatcaacagtctatggagccaaaatatatatatcccaaccaacttcatgccttctgccttttaaactcagcctggaccttctcccatgacttccaggccctcctcgccgcagtatcaatcgcatacgcctcatctcgcatccgtcgatcgaagatttccatcgacacccatcccttaaaaccgctgtcaacaatccaggcccttacgacatccgttacaggcgtatagcctccgaactccctttccaacgggaaaggccgtgcatgcttcgaccatgtgaattccgccggctcgccctcaatataccaagggtgactcttcgagaaaggtggattgaaccgctctgcatcggacaattgcacgtagaagatcttgctgataggagcctgctctacgaagcgacgcagcgaggcagccaattcctcagcaccgtccggacaaacacctgtttccaagaacggattcgcccagaactttgtaatctcatggaatgtatccagacataatccgaaattgtccctgtccaccagctgcgtgagcctcagcgcgtcatcccatgtcgagtaccagacaccccatgacagcggctcataggcaatgctgacaacaggcgacgaggagctagctaggtccgcaagctgctgcatctccgagacaatcacagcttcgtcgccgatactgtcagcgtcatactgcgacgggatctggaggtacgatgcgccaagaacgcgggcaagatcaagccagtgcgcggcgacagcgaggcgctccttcagcggagtctttgcgccttcgaagttctctaacggggcgagcgaaatgagaaccacgcctagatcatcggctaactggcgaatttgcttcgcgccagtgagaatggggaggctgtgggctctactgtagccgttgagatcggcgtaaacgatttccaggccctgaaagccttgttgcgccgcggcggaattcttgtcgtctaatttgtgggcggggttctggcctaggcagggggtgctgattgcgatgttattagggaatgaggccatggctgcttgctctat

SEQ ID NO: 4548 - DNA, 1306 bp, Emericella nidulans
  unsure (1)..(1306): unsure at all n locations
ataagctatagtttactagatattttagctctagtaactacctttattattataataagtcccatagcaaagccagttttattaaaattatagatatctttattctagatctcttactaagctttaaccctctataacttagtaaactatttactaataactttaggatctttataaagagttctttagtaatttattttttaagtaaacctgcttttaatctctgggcagtacttagtaaactctataacctagttctttctaactagttaagaggaggtagaggaatcagcttctaggataatttatactatatcttatacttagaagtacctagggggtactctatatatatcaagtaatactatctatactactaatacctcttcctaatatagggatagcctatatctatagttgcagagttctgcttgagattaaagtctctttaactaattatataagatttagggaggtagattgtaaattaatacagcttgacaaggattaggaatttttttattttttaaattatttatcgcgcattggatcctgccctcttgctcaatcaattcttgttttgttttacatgcttttcatggcatggtggtcagttgaagttcatggtggctggcgcgttcagaatttttggaggtttacgaaccgaccgggaattatgttatatttctctatattagtaagttcctggaataggaatattactaattagatttatattcaaggtagttataataaaattatgtacagagtagttaaattctaatttaatataaaaaaaaaaataataattctaaaagatataagagctattaatatcaaggtatagattttttctagattgaaatagattaggaataataagactagtaagaataatttactaaatatttttaaaaaatattcaaatatgattagttctatcttagtcgaattaaaaatcataataattaatatatattatctacaggcacagnctttgataggactattctttagtaatattaatttagtactctaaagatattatatgctcagtatgctcagataatttgttagtatatataccaagtggtcttaataaagatatattctagcttaataaatctaaagataaaaatacttgatagcactttacaaatatatctagtgttcaactaagaagtaaaagtttggtctactatatatattctagtctaaaactttttgataatggttttagaactttaatatggatggcgatttaatgactctataaccgccacaaagatcttaaggaagaaaggtg

SEQ ID NO: 4549 - DNA, 7922 bp, Emericella nidulans
tatggggttctgcgcgtgtctttcccacgtgcgtcctgcatctcgggacagcgcgatactcagggtctcgcatccgttcgagtaaggaagggtatagtgaattggaaggctttttacagaagtgtagaagtaagtaagtgtgccgtcttgctggccctggaggttggtcgactggaagcatcctgtgaagatccctttgctgtcgtagggtgcagacggcgcaagacagggttctgggtcgatttcccatgagactagatcgcatgacgttgcgcgaccccagcagatgtcgccccattcgttatccttaggattccattggtacgcaaggtggtatcttcctgtgcagggatcgtagccagggccgcaggggtcgttgagccagttactgggtgcgaggagatggaacttaggcctccatcttgtgaatgccggcgcggtcggtttggatggtgtagacatggcaccgggcattttgagattgtagaaagatgctcagtgtcgatgtcgaaagaaatgtttgccaataaagaacatcgtcaccgatagccgatggcatgccggaggcgtcccgtaccggagaaattctggggaaaccagcctagcccgaggggcgggccgggacattgtcggagaaacctgtgccccttagggctcgtatcgactgattctgcggagaaaccgatccaactctctgacacttaccccggccgggccagccccggaagaaccaggaggactcaacccgccacccataaaaggaaggggattcgcaaaatgaatcagttcgctccagaatgaaatcgaagtgaaatctgagtgaattcgaagtgaaaatcgatttgctatcaggtcacaataatgtcttcgaccaccgagaaggacacggccgaaaagcctgctgagacctggcatgtggacgccgtccagccagtgactgagacggagacggaaaccaatgcctcgtctatctcagatgaagggcgcgtcaatgcgctcctgatcctcgcatgcatcgcgtttggatctgcctcgtttgtctttggattcgacgacaaggtcatttcgccattggcagccttgactgcatttgtaagaccgcctacaccagccctttctattgacgagcactcacaatcgcaggtgcaagacttccagggccccaatcccgttgacggcacgctggtcctgacggcacgcaatcagaacctggtcttctctgttcccctcgtcggctccatcgtcggtggcgtacagcgtctcctctgaacaacttccttggccgcaaatggccgcttatcggtgcatacgtcgtctccattggtggcgggttcctgcaactcttcgcgaagaacctcgctcagtttgttatcggccggttcctcaacgccattactatcggtgtcgccaatgcaaccgccccgttgtacctttccgaggttgtacccccatccatgcgcggccgcagcgtgacctcgatcaatattctctctctgctagctggcgtgatctcgacaatcatagtcaacgagaccaaagatctggacggacaccttcagtacatgatcccgcttgccatccaatgcgcgcttcccgtcgtgatcctcgtggcaaccgtcttcctccctgaaagcccgcagtggctcgtttccaaaggccgcatggaagaagcacaccgtaatctgcggaagctccgcggttccaaaatgtccgacgccaccgtcgctgaggaactccgcgtcatgcaactctgcgaggagaatgagcgcgccctctcagccaacgtccggttctgggagatctttaaccgcgagaacctccagcgtactctcaccgcagggtccttctactccttcaaccagatctccggtatcatcctctccaccacatacacgaccgtctttctcacccagctcggcgtcggcgacgcattcaccttcaccgtcattgcatcctgctgtacgcttgctgggacgctggccgcgccgctcgtcatcgaccgctttggtcgccgtccaacagcttttgtcggcatgtccgtcctccttctcatcgacatcacagctggcagcctcgcctttaacaccggctccgaatcctttgtgctaggaatcgccgcgcttggattcatattcaacttcttttggggtgccggcttctactcgctgtctgcgttgatgccgtctgagatcgcgacaccgaagctccgcaaccataccatggcgtatacaatcgcgtgcgcgcagaccacggcggtgatcacgacctttgctgtgccgcagttgacgtcggcggatgcggcggggctgggcgcgaaaacgtatctggtgtttgccggatgtatggcttttgtgctagtttttgtgtacttttttatgcctgagacgaagggccggacattcgcggaggtggatgagatgtatgacgctggaattccgatgtggaagtggcgcaattataagactgcgacggcggcgaggatcggtgggaaagagggtgcatgatagttgtagctatgttcagtagcatttcatcaattgtctacttcccatcctaacgctaaaagatgcgccttgtactgctctaagtaaggatggtttcctccacgcaaggtccgcaatagcttcagatagttgttggcgagtacttgtatagtgcctgcggggcttgtgactggattatgcgctgtcatgacagcactagttgcgatattataaagtttctcgatctgcaactgttatcagcactacacaggtagccaagaggggactcgggtaagttgctcacaattccaattccatgcgcctcgagcgcactgatcttcagcaaccggcacagtctcaatgccctctgcgcattctcaatggcatacccgaagcccagctgccgacagtctgggccaggatctagttgtaagagcccatgactgaaacatagattccataaccggtcctgcacccatttttgcgtgaccagaatatcggcgcattgcgtttcagacaaaaaatcgcgcagagctcttgactcaatgagctcccttgatccattctgtccactgctcgcactctcatccggctcctgatccgggtctgagaaatcaaaatggtcatggccatggccgcgatcattgtaccgagccacgtcgctcactgtggccaagttccggtatatactcatcgctctatcctcggtgaggatctggcacctcccgttgccggacgatgcattgcaccgtgcattccagcaaatgaggatatcttcgtcaatggcgtcgaatatctccatgagcagcgacagacccatcattgccgtagcgtctttttccgtgtgcacgattatccctgatacaacgcgctgagttgcattccggatctcgtcggccgcccggatgacatccgatgggcgtccagtaaaggttatcgggtgttgacgttgaagggcataggctctgtttagcgacgttaatagtatgatcgatatggtgaaaacaagcatgcgatatatacctttctgtcacagatagaactaaatatgtccgtagccactgccctttttcctctgctgagcaatccgcgtaagtggctggattattcaggcccagtgtcgaggctagatcgattgcctctcgcagccggagtcttgctgcattgtgctggttactcccgaaaaggtacccgaacaagaagaaactagttaaaacagcttctattgatgggtgctcgccaaaatcagaagatgtgcgcattcttgttgcttcgtggaccaggatctttgcctgatcagaccgtgatgaagaggtcggtcgttcactgatatctatcggttgtgtcaaggagaaggcacaaagagacagaatcatagcaccaaactgggggttgcggcgatgttcttgctgaatgatttgagtaaagagtaaggatcgatttagaactgggagagttggatggagacgatcgaagtaaacatctatccaaggaataaagctcgcttcgtggatatagggaggccagaactcgggtgtcatgccgagcgggttatcgcgctgcatgctagggtccatgtcgctggggagcaaaggagtttgattgctgacttcgaggctgatgttatcaatgatcactggcgggagcgtctccctgacaagaatattgcttctttggaagccgaacaaagggaaagtctgggagttgaagctgtctggcagccaatactccatctcaggcccgctccaggcggatcctggagtggtgtcactgcccaccgtgagactggcatatccatgcctggctggatcctcgctatgatctgcattgctcggcccagatggcatatgagacccttgagggacaacctctgaactgccgccaattgcttgcagagctcgcaactgctcctggtgttcccttatttgcttaactctgctacgtaacgtcagccgcatcctcaacgccgatcaatcacagtcttaccgagcaggaggacctctttttttctggggatcgagaaatgtacactcgaacccaagcgaaacacacagttcgcacggccgagacaggctgcactggacgcgatatttcagtaaccataggcgatcaatgtcgtgtagtacaactcacccttgttttgcgcagtctgcactggtcacatgctctcgtggcgcactttggacctgcttgggagccgccactgcgagattgacgagacgagggaagcatttagaatgagtaacaagaagctagatccctgcaatcccaagatctatgcctctttttagatcataggtaccgcaagatgctgagccttgaaggggaagtctggggtcgtaccggcgcaatcgcttggcgttcggaactggggaaaaatagacggagtaccgtaccgtaccaaccaggtgcctgcccacctgactttaaaagatgacctgggattatacaactctgaattattacagctggatacgacgtcaacctcgcaacacaatgtcaattgagtaatatagtaatatacaaacagggaggtatgtatcaggccaaggtaatgccatgcgccctttccataatggcgcatatagccacaaacctctaattcttattgagttttggatagtctgccattcgaagggataacaagaatgccttttaaaatgaaaggaaatcgactttattgcccgattttaccgttgtaaatggggttaggtcatagtagacatgtgtactcaaaataacgcttaaattctaacacaaaacccccgatggtgtagttggttcatcacgtctgactgtaatggaatacattaaatcagaaggtcaccggctcgactccggttcgggggagaagtgttgtctttttcgattttttttgcgcaaggggggaatactttttccagggccgatcacgctatgtgggtgagtggactctggggcttgtcagccgctagcggccgttaaggtgagaacggacagaacggtgtcggagtagccgttcttgaagggaggtgctaattttgatttccttagcgatgggttaagcttagagacagtattcttatgttcgcttaattatttactggctgctagccagttttccagacggcgccccaaaacctctaaacaaaccccctacactgtccctcttccctggcgcggccggcggcggcaaaagatcagacaaccttactcacataagtattctcatttgccgttctccgctccgtagtttgacgaaaagaatgctaaaagatgatggggggaaaaaaatcccattcccccgaaccggagtcgagccggtgaccttctgatttaatgtattccattacagtcagacgtgatgaaccaactacaccatcgggggtttgtgaatgacgtcacctaaattgcttacatataatacctataagcttacatttgatgcttctcagcattgctatcttccccttgtttacatcgggtttctagtcatgtccaatatcctccgtcgctaagcatactgcctcgaaattataataagctatatcaaacaaataatgttggatatttgtcggcatcggtacctttctgtcaattcatcactgtaggctagtcttccggctgggctactgtaacaagctgcagcccaagccctctatttatgtcttccatttgcacgcagtaaggacagaatgcaacagcagctcgagcaattgggtgaacatagatgtaagaaaattctcgccatcggagaatgcagctcctgaaactggaactcagtgcgtattagatgtgccgctgctctatagagatcccgttaccgtccctctccctctttcctctttctcctccatttctcctttacttcctcttcctcctctccatatgcaaaagcggccacgcttggtgcctctggaaacttgcctccagacgtgaatatcctcattgactgccaacactaatgaactatttgacgaggtatgtacctggcacccatcagtcgcgttcattgcttcttcaacatatgccaaaccgacccatcacagcaaggtgtaacttcttgagctgacgaatgattggccagtcgatgatatcatgcgaaacggatagtcttcacttctcccaataattcgatgcttcaaacgccaccaaaaatattgtcagggtgtgcgacgaggctgtgtctaagatgtttccccaatacgagagctcggatggcctaggctcaggaaactgaagactttaagtcaaatatacagaccaaagccccagcaacactcttgtctgcctacctaggacctggagatatgttgtatccggattttaaatggtgcagcggcttcgctggaaacggtccaactggcgccctagaaatgggctggataattatcactgaacaagtccatttgaaggccgcatggctgcaataaaaggaattctgccaaaataagtctaggaccgatcatcccaacccatattgttccaacgcattgcgacatttcagttcccatgaggaaactatgagcaaagacagcgaggcaaatctctctgggagccatcagggatataaaggccctatatggccccgcaggatccgaatactgagagtatatcaggcttgcgagcaacaatcatcacagccatgcatggtatatacacctcatggaagagagctgctgtatgcttgatagcatgctatatcttaaagtccagtactatgtatactaaggccggcgagagggaggaaacgtggcttaaccctggaagttacatgattcgtcacgtctacccctctagagtctctgctcgacaagatgtcatcacagacattggctcgatacttcaaccacggccggttccatcaactccccgacaaccaccaaacagggtctgacgtgtcagacgagcaaatacaatggtccgattttacttgcaaaaactatcttcaaggctcaagaactggggaaggagttgaacgcgtgttcgtctcggtgaatacgaagacatcagaaagatgcacggccgggaagcttacatgacatggccttccacggaaaattgtgggaacaaggattgacaggcattagaagcaatgctatatttgattatatagtgttggtacatagacatatcatttacccaacgggacaaaccctgttggcggcccatagtagtccttcaattcctcctcgtcctcgtcatcctctgtgattttaactgtactttcagcctctgagtcttcaccaaaattcctcccccttaacggcttactacgcccaactgaccctgggacaggcgtgccgccctttttgccatggtccacttccaactcatggtcctcaattggctgctcgcgcggtagtcggtaaacaaggaaccctcgggggctctctcggcgcggtccatgacctcattcatatacttgcgtacttcctcctgtgtttcacaacccgcgcc

SEQ ID NO: 4550 - DNA, 4416 bp, Emericella nidulans
tctcggtggtctcggttccggctttgcgaacaaccccgaggagttgaagaacttggcctcacgttccttgactctctccccccagattttggttgagaagtctcttcgtggctggaaggaggtcgagtacgaagtcgtccgtgatgcttccaacaactgcattactgtctgtaacatggagaacttcgatcccctgggaatccacactggtgacagtatcgtcgttgcgccgagtcagactctgtccgatgaggagtaccatatgctccgtaccgccgccatcaaaattgtccgccatcttggtgttgttggtgaatgtaacgtccagtacgctctgcaacctgatggactcgactaccgtgtcattgaagtcaacgctcgtctttcccgctcctcggctcttgcctccaaggccaccggttaccctcttgcctataccgctgcgaagatcggtctgggacacactttgcctgagctccccaacgctgttaccaagaccacaaccgcaaacttcgagcccagcttggactacatcgttaccaagattcctcgttgggacctgagcaagttccagcacgttaaccgtgatattggcagtgctatgaagtccgttggtgaggtcatggctatcggccgtaccttcgaggaatcgttccagaaggctatccgccaggtcgatcctcgcttcgttggattccagggtgacaagttcgagaacctggatgaggtcttgaagaaccctaccgaccgccgctggttggctgtcggccaggctatgcttcacgaaaactactctgtggacaaggttcacgagctgaccaagatcgataagtggttcttgtacaagctccagaacatcgttgacaaccacaacgaactcaaggaaattggcagcctcttcggtgtcaacaaggagctgatgctgaagtccaagaagcttggtttctctgacaagcagattgctcagctcgttggtgcgtctgaagatgatgtccgtgcccgcaggaaggggtttggcatcagaccttgggtgaagaagattgatacactggctgctgagttccctgctgacaccaattatctctacaccacgtacaacgctacttcccacgatgttacctttgatgaccatggaaccatcattcttggaagcggcgtgtaccgtattggttgctctgtcgaatttgactggtgtgccgtcaacgccactctttctctcaggaacatgggcaagaagactgttatgattaattacaaccctgaaacctactccaccgacttcgacactgctgacaagctgtactttgaagaactcagctacgagcgtgtcatggatatctatgagctcgagagcgccagcggggtggttgtctccgtcggtggccagcttcctcagaacatcgccctccggctacaggaaaccggcggtgccaatgtcctcggtactaaccccaaggacattgacaacgctgaggatcgccacaagttctctcagatcctggacagcattggtgttgatcagcctgcttggaaggagctcacctctgttgctgaggctgagcgcttcgctgaggctgttggctaccctgtgttggttcgtcccagttacgtcctctccggtgctgccatgagtgttatccacagccaggatgagctgaaggagaagctcctgaacgccagtgccgtttctcccgatcaccctgttgttatcaccaagttcattgaaggtgcccaggaaattgatgttgatgccgttgcctccaatggaaagcttcttctgcacgccatcagtgaacacgttgagccagccggtgtccattctggtgacgccacccttgtccttccccccgcttccctggagaagcccgtgatgagccgtgttaaggaaatcgctgagaaggttgccaaagcatggaacatcacggtcccttcaacatgcagatcatcaaggccgaccaggagggtgccgagccccagctcaaggtcattgagtgcaacctccgtgcttctcgctctttccccttcgtcagcaaggttcttggaaccaacttcattgacgtcgctaccaaggcccttgttggccgtgatgtccctgagcctgtcgaccttatggaagtcaagcgtgactaccttgccactaaggttcctcaattctcttggacccgtctcgctggtgctgatcctttcctcggcgtcgagatggccagtactggagaaatcgcttgctttggtaaggacgttgttgaggcctactgggcttccctgcagtccaccatgaacttccgcgtgcctgagcctggtgagggtatcctgctgggcggtgatatcaccaaccctgctctggcccagattgttgacctcctccaccctctgggcttcaaattcttcgctgccagtcctgaagttaaggctcacatcgagtctgcaaccaaggagcacacccctgtccaggtgatcgagtttcccaagaaggacaagcgtgcccttcgtgaggtcttccagaagtacgacatccggggctgcttcaaccttgccaagactcgcggcaagacccttctcgacgaggactatgttatgcgccgaaacgcagtcgactttggtgtccctctcttcatggaaaccaaggtaaggcaccacacttcaggtaaatgagatcttgagctaatcaacttcactagactgcccaactattcgctcaagccatgaaccagaagctccctcgtcctgagggcattccctccgaagtccggacctggtccaacttcgttggcggcaagcttctgtaaacgcaaaagattaaaagtttctggatacgataacctcttggtgttatactgtgttcattttttttccagacacgaacgccgtgccggtcggcgtagcagatggaacaccacctcttgatagaccatttctcccgtagccttgctaattggctacctgtttcttctcctacagaacgaaggacccgcgctgcggtgtgacgactcgctatcgctctcgcggtctttgatatcttattaggttgtttatactctgctggtttctacaggcaggttgtgcgtgagcgagaaaagattttgaactggatattacgactgatttgaattgtttgcagcattggttgattttgttttaattgtagtatagtggttatatcctatctcgtctttcagtatgaatctaggtggagctgacatcagattcgtcctctggtgaaagtgaagtaatgtctttgcgtagtgtagcagagaattttccgagcagtggacggccgaaccgcacacatctcttaactcctctccataacttttcgtcgtagccaccacccaccattgcctttcgccagtcaaacgaaaacgatttgaaggtatctgtgacagagtctaataagtcgttccctccttagatcatcagctggttagtcatccacgaattttaagagcagaggctaacatcccgaggcagaaagaccaacttgcggctaaaccagctcttcattctatttcaaaaggaactataagaggttgtttatcttggataagtattccgatacctttcgaaatctaccggaattatagctcttcggacgaggatgctctaggatcctctactattccgtctcggtcaagccacaacaccgatgtccaactcaacccctttgccatcagttaaaacgaaggcaacccctgggccggcttcaaatggcttagggagagggctctttgcgtacacagacattcgcacatgcgatgatatcttgcacatccaggatccgttcgtcgcggtcttgaaaactgagcgactccaagatacctgctctggatgttttggtaagagacattttgacagttacagcgggcaggaggtctctttgaaagcctgcacaggatgccatgttgtgaagtactgtgacaaggtgagaaccgtgccgtggtagaggggagggaaagactcgctccgacgcaatgcttacagtgatatagtcttgtcaatcaaaggattggaaactgacccattctcgcgaatgcgttattttcagaaacctgaagccaaaggttttgccagttaatgcgagagcgcttttgcgtatggtgctgcgcactgaggcgaggaagaacgcgtacacagaggaggaactagtgctgtttcaaactcttgaaactcacattgacgacatactcaatagaaacgcgccgcaggcggaacgcattgctctcacttcgagggctgtaaaggagtattcgaaggcggatatggaggaagagaagatagttgcttatcacgcaagggtgagttcagtttatcttcccacgactagggtactccttatgccattgaatggctctgatggttgtctcagcttgatttgaattcctttaacctgaccaatgacgatgacattggtatatacct

SEQ ID NO: 4551 - DNA, 1673 bp, Emericella nidulans
gtatttgccaataatacagataataagtgtgttaatagagacctccataatatctgttgagccagttagttctccgtatcaccctcaaaccagtaccgaggctcctactggtaatgcagttaacagcataaattggaagcatcatatcaatgagctctaagtcttgaccaaacctatttagccaggcgttagtaagtgcaaagacgaaatgatgatcgacgggcgcatgtacctgttggttattgaccctgtatcaacgctctggaagaagctaatcggcgctctacactgcgttaacgcaatcatatgataggaaggatgccggcttactcaagcgctgtcttaaggaggtcggaatgaagcttcagggaaatgttattgaggcctcgaacaaagagtaacctagggtaatgtatcagcgcgtactaataacactgtctccagaaccgaccagcaaccagataccagagttaacaatgtcaacccgatcatatgccgtaaacaccaagatacatttcgagttgtttgttggggtactcttcattggcctttacccaccactgaagccacagtgctaaagaaattagctttgtatcggtaaaatataccgctaagccaaaaaggcgtcatgacttccaaattagtcttagacagtcatattttctactcgacactttggaacccgagagttggcacgacttaccctggaagctgttgcagaaagcctcgataagagtgaaggctaaaaatgaaactacaaggctagatcccgcgctccgaatataatatctgtaaacagaccccggcccaggtccttgctgcttgatgccggtggtactatcattgtccgcaaattgagcttcaatcttggactcttgctttatctcgacaggctcagagcaacattttgatacctcgatgattggtctaatggggaatttcctctatacattttggaccttcacggcaatcatacatcttctctatggaattacacaaggcccgcgtcatgggagggcccagaacccacccaggggatgtcttatccttcaagtcgatgacctcttaaaaccaacggattttctgcagatgtgacaggatctgcgctccccgcaaaatatgatctcggggcgccgtgacctttgccgtcgctgctgaagagcatcccggctctgcagtagcgactgtagcttcatactcgctgaatataccttgaggcgagaccaatccaagaggaccggactgcagagttcgtttctccttttcagtctggtcacataagatcttctcctcagtaggcgtactgaatattctcggatccagacgaaagaccaattggttgtctggacgccgctgccgtcggggtctccgcgatgtgtccgtaagccgggaggattgcgcacggggctgcgttagtggagcaggatgatagaagcaatgtccggagtggccgttacttggacaccgtccgcagacaggactttggtggtcgcatcgtaacttagcctggcgacacggctcgcaggacgaaagccgcccattgcggcggagagtggtccttgaaatagagcaagatgatttccccacacaaagaataaaggaagtttggagggttaaaaagggattggatccccggatcctaagcttgggtctccctatagtagtgtatatcg

SEQ ID NO: 4552 - DNA, 7599 bp, Emericella nidulans
ttgctgggcgtcaagggtcaatcggagggatgctttgctctggagcagcaattgagggagtgtatggacacacatgtgcgtatcttttctctcctccacaagtcatttcacttcaatgagctggcgtattcgaggctcttagctcctgtttcgccagatggactccagactatatgctaatactccacttttatccagaaaactacgggcacgaagaggaacgccatcaactatcacctcatgcgaatgtatcctaaggttgtgggtccgaagaagaagaagacgtaaagtgctcgatggggagatatacatcgtttgctggacagtcctgggtcaatgtctctatctagagaatgtgatacattctcgagtgcgtgcgatatgcgctacacaacggtgatcggtggctgtactattgcgtcctgctagagtgggatttgacagggatgatactttatggagtttttatggtttgcatgggcgaattttctttgacattgccttctgtatacatactgtttgtatattatttcattttcaaggcaaagatttactctctaggttgctccaactgggtatatgtagtttgattttggctgcagaccgagttctagaatcgtttgaactgagtgcgtcctaagtgcaacggtagtgaagctggctagaaccgggcatatggacacctaagttgatctatatatactcaaacctgagaatcaatttttctcccttcggtttgaccgtgtaagcatcaattgcttctataccgtcatcgttgacgatagtggttcggaagtttgtatagatggcggcgatgaccaacttcatctctgttgggtggttaaagcgctttctttgctcattaagaactctaacctaccttgtaaagccagattacttcccacacacatccgtccaccgctcccgaacgcccaaaaccatcgctttctttcctccagttcggaaggtttattgcagtctttgagccatcgcttcggctcccatgtctcagggtctggaaatacctccggatttcgatgaagagaataggcctgtgcgtttactctggtattcgggggtatattgtcatacccaacaagcgtgcatgtcggcgtcggtgtaactcgaggttgtatgcctggaattgaagcgtggagtcgtaaagtttctgtgagtattgcctctagaaaaggtagcgagtcaatggatttcggcgacggcaactcggcatgaccagacagacaacgaggagctatccttggttgtagtgtaagaagctccttgtgaaggtctttctgtacttctatatgttgggagagttcccacataaggtatgtcagaacgacagcgctggtctcgtggcctgctgtgaggtgatcatacatctcacatgcgatgtcgagcctctgttgctcaagataatctgcgtataatttttgatcgtctatcttgagcggggcttgttttgaaatggcttgtttgaggtgcttgtatacaaccggctcgacactaaggtctgatgaagcaacagatgcttctgctttatcacagagctccaggccccaggaatcgagaatccgattcgcatcatcgcaccatttgggaattaagcgaataccgatttttttcagtagagctaaaatatttgggacttcttgatgatagaattcatacggctttctgcattgataaaggcgcaacatctcgcgcctgtactccgcgttctgaaggaagttagtaccattagccagcccaaatagataggccgagacaaagtccatggtcagtccttggttgaggtcatggacatcggtatccgtcttagacgaggctgctgcttgaagaatcggcagaagccggtcaaaaatgatggttttggatataagctgcaggtggcgagacgattgcaagtaggatttactgtagatattggacagcatccttttccgggtcgaatgagctttgctaccggtcatggtgaacatactgacggtcctgtaaacttgcaatgcggacttagtcccaccatggtttatgacgtttctttcatccagtatcgcttacccaaaagagccaaagacccgcgggtaccattcatgtttgtcgaagccgcctgtatataccgactttatacctccatcgacacaattgatggaaatctccgagggcgccagtctgacgattgaccctagccgttcatgggcagcgtggatggtgcggttattctggccgcgaaaccgcttccagagaatccaggctggcgatattggagccgtccaatgcgcatttggaagtttagacaatggcgacagaaaagcaggatagatcacaaactcgtagaggagagttaggcccaacataatgggaactatccaggcgaacactggcacctccatagtgcagaagctgacagttcgattcaggaccagagttcttcttgagcagaccccctccgcctccctccctggcgcaaatggatcttgctcgtcctcgtttctgcatacagttgcacctccgtcgtgctctgctccggcatgggcccaatcttctctgtcatccaggcgcagtaccctggggaggaagaccgcgcaaatgacctgctcacatacccgacactgttcatgggaattgggaacttgatcagcatgccgtttgctctcagtgtcgggcgtcgacctgtgttcctggcgtccatggtcctgcttgtcgctacgggtgtatggtgtgcgtgctcgcagagtcttgggagccatattgccggccgtaacatcatgtctttggctgcaggtcagagcgaggccttatcgccggcgatcgtccaggagatccatttcttacacgagcgtggccggaagctcgcgtggtttatctttatccagaatgtcgtggccggggtgttcttcgttgtttcgacgtacatggtttcggcgtggggatggcgctggtggtatggctttttcactatcatgaacgccgctgtcttcgctttatcggtgatcttcgtgtctgagtcgcgctttgcacggtcccctgaggacatgaagggagaacctgcagccaccccgagctcagatagcgagacagagcaatatactccccggacatggcggcatgacctgtccctctgcgtagtcaaaccgcgctggagcatcatccccaccttctacaagcacgtcctgcagggtctttgcatccctatcaccctctggttgctgctcctcaatggcgccttcttgggcgtctacgtcttccagtcagccaccttctccacgatactcctcgccccgccatacagcttcgcattcacctcgctgggctccgttcaggcaggccagattgtcagctgcatcatctttctcccgctcctcggctacggcagtgacatgaccatccgcgcattcacgaaacgtaaccgaggcctctacaggcctgagttccgcttgccggtgattggcattccggctacagtcggtgtgatctgcggcatcatctacggacaggcagggtcgttccccgagagatggaacgcgagtgccatcgtggttggatataatgcgagtttcttcgcctttctcggcgcaaatatcgtgggtattacctatgcggtcgatagcttcccattacgcgccgagcccttcctcgttgttatctgtgccgggcgtggacttatctcgtttggcttgagttatgcgactttgcggccgtgaggagcatagggtatgacatgacaatggtcgtagagatggtgatctgtgctgcactggctttgggagctatccccatgttcttttttgggccgaggattcgagagttggccaagggatgggtgggttaatgaacgtgatataatcagtgatagaagtaaactgtatatacacagagtatactgtttttacagctgctcatctggcaagaatggattttatgtacatcaaacagtctgatgctcgctcttgggaactctccaacccttttccagtcccaacagctttccggttacgatgcccttgatagtgaagaggttcattacagcccacaagatgaccagcatcagcaacaatgccgtcgaccacacatcgaacgcaggtgagttcatcaacttgcccagctgcactgccccgttggtatatacaccctgtgcgagtatgttagagttaccagatccagagggggaaaaagaacctcccgactcacccatggaaaaataagtgaccacgcactcagcgaaaacgccgcatttctcaacccccctgactgcacatttagcgtatacacaatgctcagtatagccaaaatccaccagaacgtgccaaatccccacgccatcaacccggcaaactggctgaccgcggcaatcggcgctgccgatgtttctgtcagtaaagagcccctgttgtacgcgccgaagctgtgctggacggcagtgcctagtatctgcagcgcaaagctcgcctgtccaaagggcccgcacaggaccatgtcctggtacgcctcgccgtaccgcgggtacttccggtcgaagtggtggtagacaatgcaggcgtcgatgcaggtggccagcccaaggcctgccccgagctccatgtaggagacgatgatggcggggacgcgaagtcgtgcgctcaggctgctgctctcacagatgacgccgccgccagccgcagatgtgaggattgatatcacgggcaggaggaaagtggggggcatatgttctatcccggacggctgcatcttcagctgagagtagggcacgccaatgaccgagcataaagacagaaatgtcgagatccaccagagcacataagcggccatctcggcgccgccattatactgcagcgagatcatctggatgatggaagtgaaggcgatggggacgctcgccaggcacgaggcctcgacgacgttgtggcgaatctcacggacgacatgttgggggtgaagaataatccgagcaacgtagataccgaggaagagcccaagtaagacgatcgcatagatccagacgattttggcaaggatggggagggcaccgaactggtagtgcagctggtgcaggatgacggcgagaatgcttgtgccctgggggatcagaaaccacgaggaggtgaaattgtacacagccagagagagtggacgggacggggcttggtcattcattttgattttgtcttattccatcttagaaacaggtgcagtggaatagtaagtatataaggactgacgatcgagtgatgtcatctatcgcgggctccacagggcttggcaggcacaagcactaggaacaaatcaagcaagagtatactccttcatctcttctggaacgcccatctcctgtggtgcatggtctccgatcgtatgccagctgggcttgcttctcacaaaaatatggccctccacttctggtaccgcgtcctggtcctggaccgtcactgcaaccaggccaacttcatctggtttgccatcgtacaccattgagaccggggaatggcacgagccacagactgtccgtgtcgcaaaggtcgacaggcgcagctcaataaggtcgtcagctcgagtccattggaaatgctcacgcttgacgttagtgaacggggcaaagggggcgccgtggacgagctgacaggtacggcagtagcagtacgacaacccgtagagagggccggtggtccggtaacgagtcttaccgcagaaacagttgccagtgacggtcgacatgatggtgaatcgtggatgagtaagatagatgtagtagttttgtgacgaaagagggattagggttccctaatattcacaacactattcgtgacatcatacgtcccttctaagcaaggccattctacatgttgcttcggtcattggtcatatcagaagcaaaccactagtatacagccttaaggtgtcaggatgcaggccaccgcggcgcattgagtatcaaacccatcagcattcccgccaacaacgccgtcaccggcactgtgatgatccaaccaaagtagatccacactactagacgcatgttgatgcagcgccagtcgccgttggccaggccgactccgattgatgcgcccgcaatgcattgtgtctatacttgttagtcttttctttctctttctcttctaatccactcagaaagcgagagagcagacataccgtcgacaccggcagccggagtcttgtcgccatcaggatcgtcatggcgctgctgagctccatgcagaacccgcgcgagggcgacatgagggtgagccgattgcccaggttacgcatgagatggtacccataggtcagcaggcccaggacgatggcaccgccgccaaaagccctactgcccattagcactgcataccaccgttcctagacggcgcacttacaatacccaggtcggcaccggcacctcgtccgcgatgttcccgttctgccacaccaggtaggtggtcgcgaacggggcaatggcgttggcaacgtcgttggccccgtggacgaatgaggccgtggctgccgtcagaatctgcagggaactgtacatatattctgccctattgtcgtatctggctgcgcgggcgtgcatatcttggatgtcccaggtgagcacggtctgccgcttttgcgcctggattacgtcctgctctagaccacgatacaaaacgcgctggacataccaccaaatctccggccagttggtcctcggtccagccggccgcggtgggaccccttcgacgcgtgacgttgttgtcccctccagccgctcagggtcgttgtagccgtcggccgactgaatcgactggaggagcgactctgaggcgcgaagacacttgagctcctcctgcgtcaggtggccgcggtagtagtccttaatatttagactgcttcgaccgggcggtggagggctggggagtggccgcgagagcaggaacggaccgcgccatgcatcgtgccatttcagctgccagtcttcaatcatgacacggcgccagaggtacggaagcaggaagaggatttcgaggagggtgcagccagtcgcaacagtgacgacggcgaccgagacctgcatcgcgctcagctcgacgtccagctggatccccttccagacgacgagcatggtcagacccgcgatggtgacgaacgtgtagattgggatcgataatagggctcgatgcacagcgtacttgctcgaaagcacgaggtgcctggtgataaggaacatgattgcccccagagcacctgcaatgcccggcgcaaccccccatgcggcaaagacctgcgcgaccccgttccagccccagtggatgttcttgatccccaccgacgcggtccctgccccaacaaggcccccgatgatggaatgcgtcgtgctcacagggagtccggctcgtgtggcgacggtcaggaagagcgaggacccgataatggcacacatcatggcgagcatcagcaccgccggttcggcgtcgtacaagtgcggatcgatgatcctctctcggacagtctcagccacacgagagccgacgctgatcgatccggcgagctccatgcaagcggcgatcagcatcgcctgcttgagtgtcagagaccgggtggagaccgaggaggcaaacgagt

SEQ ID NO: 4553 - DNA, 1192 bp, Emericella nidulans
ctgatatccggatagcaagtagatagttccttctgttcacgagacgctcaattagcttctccgatgtcaggcgcatatactggtcatatgaaacagcgagtcctatttggaagtctctcacggcctgcagaacccgtaatttctcggtcatctcgacaaattcgtcgctgttgtacaagtcaagaactgattttccaaaggacgctgctttcagcagtcgcttctgccagtaagcgtcgaattctaagccagatgccttaacacacatatcaacagcttctggtaggctcggtttgatccgttggatattatcatctgctttgggagacttcttctccaggaggtcgatagagtctaacaggactgacgccggcgatgttgacccaagacgaaaaatagtctcagtaacatcttctccaggttagcggcaatcgacaaaaacccgaacagggtacttacctgatactttgtgcaaaaactcgtatgtatcgttagtgagtaggccaacgccgtcaaattccggcaacacgtgaacagtcccgcgtaccatacctgtccagattagaaagcctttcacctaagtaatggtgtgcttaccgtgcagctgcaccattaggccctataaggtgaacctcatcttcccaagcaataacaacggcatcgttgccacaccattccacagctcggggagtgacccgcgagtccgggtcgtactcactgtacttgctttggaagtcgctgctcaccacccagaccttcccttcagctgtcaaaagagcaacaaattggcccgtgggcgacacgctcgcatgcttaaaaggtccattttggagcactttatcctcagcctccgtaggatcgacgaggtagatcgtcttatcaacagcaagaagaacctcaacagagcgggataacgtataagctggtggaatgagagaccacgaagcaacctctccttccggacattgtgctaggagccttggtcgtggctcgttatagctggaaacagcaatcagctggttattagccagcaaggcaacaaagccggagttccagaatcggcacgccctaactccatattcctctgctccctgtgaatgttagatagtccgccacattgagtcaacgtgagcgcttacgttcccgagagaaaacgaggtgaagtcaccgtacaaaccaaagtagcgccgaa

SEQ ID NO: 4554 - DNA, 2940 bp, Emericella nidulans
gccggtttcgctagaagcgttagcattttcttttctttttcttaatcttatgctatttttctttcatttcatttctttttttttttttttcttttccaacaaatggacacgggtagcgcaactcacgtccggatatgctgcaccaagtcacccggtttctcgaggactcgcagaaggaaccggcgggcttcgacgtcttgcagctcattgaattgtgcgatcacgttcttcgtgccgaggactctgtgcatggctttgcggtacgcgcgaaacatgtcagagtatggttgcattgcgaggatgtgctcccatccgaccctatgccatttagcttattgttctcaggttagacaaggtacagagtaatacatttctcctgcgaagaccatccttggccgggaagagtagatgttcgaccgcttctcgagcaggtcgaatgcgacgcgcgcatcgttgagaatgacgattgtctgtccaaagacagtcaaagaactgatcgggcctgtatatccatgaacaagagtatttctctatgcaagatcccgagggtcatccttaccatagagatccctgtgctgcagaaagtgcacccagtttttctggtctggagacggcagatcacgcagattcccaatgagtggcttcggtggcgggcctggcgggagtggtgccttttgcttttttgcgatagacggcctgatgaaaaggagataaagcaagaggcccagaggcacagtgatcaagatcgcagtcggcgccatggcgctgtttgtctctgcatccgaaaaaaaggcttgaaaactacaagtgtcagcctcggtgaagcagggaggcaagccaggactttctgcatgccttaaatatgcatcaaaatgcaggtctagtggtgtgcactggacgccgggtcgagataacggtcaagccaaggaatcacctctgcttgatctgaactttaggcgcgctgtgttcgatgcagaggttgcattgatcaacaaatcacaccccaaacaggcgacgaccttaaagcccgaccattcagaaacaagcaatgctgctagcctccgaatccgtgacgcccagaatcggtgggcaaacaatatccgcctttcagatccatcaatttcccccatccgagctagcttggcgacctggggtcttaccgtcgacgatatcaaggtcgtatccatgcacggaacgtcgaccaaagccaacgaagtcaatgaaggaaatgtcatcaacacgcagatgagacatcttggccgccaaatgggaaacccgctactggctgtctgccaaaaatcattgacaggacatccaaaagccggtgctggtgcctggcaacttaatgggtgcctccagatgatgcaagaaaatatcgtccctgggaatcgaaacgcagataacattgacaagcagctacgagagttcgagcacatagtctaccccatggaatcattaagagtgcccgaaatcaaagccaccctactcacatcgttcgggttcggccagaagggcgccatcaatatcatggtctcgccgcgctatctgtttgcctcgctctccaattctgattatgaagactaccgttcccgtaccacgaaacgacaacgctcagcaactcccacattcgtctccaggattatgaagaataatctagtgcaggtgaaaacccggccgccatggaatgaccctgaagcgatgcagaactttttccttgatcccaacagtcgtgtcgttgacggccaaataacgcgtgcacctaggacggcttacaaacaccaagatatctctgtcccacaatctgcagcagtatcggtgaatgaagcgcttcatgccatgctggcaacaactgaccattcgtcaccagcagcctcagcctcagttggcgtggacgtggaagaaatctccagtatcaacgtcgacaatcccatattcatcagccgcaacttcactctgctagagcgtgactactgtctcagcgcaccggatccccgcgcctcttttgctgggcgctgggttgccaaagaggcagcgttcaagagcctgcaaacgacctccactggagcggggactgcgatggaccagattgagattctcgaagtgggtggcatacctaaagttgttgtacgtaccttagtccctccttctcccatgctacggttataagaggctgacgagtcagctccatggtcatgcccacgaagttgccttcgcgcagggaatcactaacattcaaatcacgattagccactgtaacaacacggcgattgcggtggccctggcgctcaggaagaatgattgattaactgaactgcacactgccttgactaattgatcaataaaagccactttcgcaaccttctagcatattaataccttgtttaaccaggaacatcccaacctgccaccaaaaaccggactagaaacccttcaccataccatacaagaacctttatcccatgcctatcccatgcccccgatagtacccatcatcgaacatagactgtcaaatcaccgaaatattcatttgagtctcgcagcggcatgctcgtataactctgtaccatattcctcacccgctgtgagtccgggtctgtggtgaaaggcctgtctcagtaaacatattagcccacaaccacattcaacgcgcttctagaaagtatgcacaaaatgagagaagggaaaaggaaaagcgtgacatacactacccaaaactcctccccgtctctcatcttcttttcccacctcgcctccctctcctcttcggccaccgtattccagatcattgcaccaggccattgcacatcggcgacaatttgcttcactgggacgttgggactcacactaaagaccagcgtttcttcgtcaaacactaaaaatcccttcggatcatcgagaggttggattccgatgctacgcagcaaagaacagtcagcttga

SEQ ID NO: 4555 - DNA, 1345 bp, Emericella nidulans
ctaggctcgatctaagaacagccacctctggttccggatctgtgctacttgatcagcttcagcatccccttggtctctttctgaaggatgagtcccgcaagcttactgtcgagagtggcgctgacagccggattctgactgctgtaagtgcaccaaaaatattctagattggttacctactaactttgagaagtgccacgcgctagcatcaactgtgctgaatatcttacaaatcttgcctcgctatgcttccacttctcacaaattcgagcagattatttgctcgggcttggggtcctcgcatatatcgacagctaaccgattctgggaattttggaagtcttcctttggctcccagcagccttcaatgcacccaggtagtatatcccaagcggtgcgaaacctggaagcccgtgccagcagcgagacacaggagtccaacgtagataccgcccaattgttacaaagcatgaaagaggtcgacggtccgggcgatgttaaaactgataatattccgacagaacgctctattactgcatcagaagatgcgtcggtaaagtctcgcattgcatttatcttggatgcaccgtccgagtcgccgggctttgctcgctttgaacctcctgtgatgggctccgacctgggagccccagcgttgcaacagacggcagggtggggcctccaacaggaggctcatgttcagaaagcttgcagcgatcctcctttcgaggactcggctgggactgccaaagaagacacctcccatcataaggagatgttctccatgatcgacaaccttcgttcatcgtctcctccttttaccactccgaaggaacttgggttcatgacaccaccgcatatacgtaacctcagaaaccgagaatccggatctgaaacaccgcggacgcctacaataccagccgtctctgcggataacgaagacggattccttggttcgtctccgacacctgctatccgcggccgaacatcgtcggttgcctccgcaatccctccatcgtttccttccggcgactccatggacattgatcccccttcctcaccacccgagcttcattcgcagagcgttgattcacggcaaacatctccttccaagttaaccaaagacagaaatgccaaaaacaaaaagaaaaataggcccaggcgattaaggacaccaagcaagaaaaattcgtattctgttcctttggaaaccgagcaagctgaacaaaatgagggcgctctagggcaaagtatgaaaagtcgtctccgttcggcgacagaaaaaccctcagcaaagaatgaaggcgaaattgctcaacaagcgcaggaattgcaagaagcagca

SEQ ID NO: 4556 - DNA, 3602 bp, Emericella nidulans
tgtctacgattactgccctagggacagagacaggccttcctttctcaatagagaaaacagagatacaacacttctctagaaagcagcagcagcatctccccacagtcactctacctggtataggggggattacaccatccctatatacacgttggttaggagttcttctggatacaaagcttacttttaaagcccacattaatttggtctttagccacgggaaacgactcgcccagcacctaaagagacttagcaatacccagcgcggctgcccagtggccttcatgcgggcagcagttatacagtatgttcttccaacagctctgtacggggcagaagtcttctatacaggcaaacaacaaaaaggggtagttaactccctgctttctctcttccgcacagcagccctggctattatcccagcctacaagaccacccctactgcagcactcctccgcgaagcagacctaccagacccagaagctctactcaacagcatcctccggagggcagcagtgagatacatgagccttgatactaaacacccaattgcccaaatagccgcagagactaccgcgggcaggcccaaaaccaggcttaaaaggatcctacagctcctcctcagccccctgccagagcgcgctataatagagctgcctctccctccattatgcatgctcccaacagacaacaaaggctacagccctgcccctttacagatttcagtgtactcagatggctcacggaccagccagggggcagggtatggctatgcaatctactttggccctatcctcgtgtccaagggacatggtcccgcgggccccaggacagaagtctatgatgcagaaatcatgggtgctgtggaaggcctacgcgcagccctgggacaaccatgcgttggctactccacccagctagttatcctcctagataacctagctgcagcctccctgctagcaagctataggccaacccctcacagacatggtctgtcagagacctttagccaactagccgcccagtggatggaaagcccttcaatcctaaccatgcaacggaagccccttcaggtccgctggattccaggccactctggaattgctgggaatgagctggcagacaagctcgctaagctagggtcttctatatacagccccgacatccccccctccccagcatacctacgacgggaggcaaaacagtggctccgtacagagacatatacagcatatgctaataaggcgcctgaaacctacaaagccctgaatatcagaccccatacaaaagaaagccgctcccgcgagcacaagctgccccggtgggtacttggccgactcgtcgccgctcgtacaggccacggagactttacggcataccaccagcattttgaccacacagactacctggagagctgcacctgcggcaaggcaaagaccccagtacacttcttcttttgcccatataccagaaaacgctggaaagatagatggagatgtataagggatggcccgtcaaaaacaatagattggctcttaagtacagctgccggggctgaagaattcagccgcatcgtgcaagaatcatcctttttcaaggatatatgcccgaactgggcccgccggagcgcttgaaaatgcgacagtccacacatctacctggaaaaagggtacggcccctcccccccaatctataggtagtcaaaacgggcatctgccctcgaagacctggccagggtagcgccggatgcttcttccgctcatttccaacatatattgtccatagttgctgcttcaaacctgtatctagctggttcctaggcagttctgtttaggtagcacgtccagatgccccctgggaggccgcagatcacgtgggccacgtgatccgccgagtgacgttaaataataaaacgaaacgaaacgaaaaccaaaccaaaccaaaccctccaccttctccgactccgccggattccgctttactccaccgcgacaaaaaaaaaatttgggtattctgaggagaggggggaaaaagtgagtagaaaaaagacatgaccgacgcagggctcgaacctgcaatctcctgattcgtagtcagacgccttgccaattgggccagccggcctgtaaatgaatataccttcttagcctctggttctataacggaagccgaatgcagagtagaataggtcaattgaggtatattcatggatgtcaacggagactctgctcaactagtcggttcatgatcgcgtcggtcaaatgcacagtaaattatgcgtcgtttaatttgtaaacacaagacaacatccaaggaaatatgctcatcggggaaaaattggcaataatcagacagttccagataaggttttttagccttcaaatctggcttccaatcctagctaagtattcaaataaccagccctagatccatctataatacaggagaacaaaaatatcatacatcatgaggcataacttacgatcaacccacgcttcaatcctgcaaggctcacatctgcatcccgtccatgccaagggcttgtccattcgtctgttcctgcgaccgtaaccgttgcgcctgctctataatcattctcttctcttccggactgacatataaactcaacgtatactctcgtccctcaatcaaatccgattcggcttgcccatccccaggggcaagcactaatctgccgaccccgcaaaaccgggtcccataccacattccatttccccatctatcacacccctcccagtactctgcatggcaactcatgctacttccgattaataatgggttgaagccattacacagcgcctcgggtatatgcaggacattctcaagaaccagagtatggacattggggtcgttgatcccccgagggactgtgagatggacatctcctatacccgcgacgagcatctcgtcgtgggggctgaagatgttggattttaacattgctgagatcggcgtgtaggatgagggaacgaaagaggccttgtcgcgtgcgtagtgcacgttcccggaaacgatcatccaatcacggcaaatttgtgtagagggatgaacgatgcgggtttttttgcgacgcgtatcttcttcggctgtgtcgttatggagcgggttggccgttgtgtcgacatcgcgcatgaagtcgtcgtgggtgcgcattgtgagaggattggctgtcgcggcgcgcagctgaggttttgatctgttgagtggcttttgtctgacgctgaaacaaagtgaacggggtcaattgatggaatacttgtcgggacaggtcctgcgaccgtttctgagttggtttgagcgtggataaattgcaattgaagcagaattgaacgaggatggttctgtgtctcaccttgggtcagtgacaccgcatgcccgaggcggcagaatacgggcggtgttcgctttagtgcgtctcaccgccccgaggctcggcagcgcgagagcaagcacgtgacatagccaggcggcaaggcatgccattcacaaggagttaaggttatagcccagcctttccctgcagtgagcgcatgtttagtgcttagaggcattcaagcgtacgcgatagcattttaagtact

SEQ ID NO: 4557 - DNA, 957 bp, Emericella nidulans
ggaggaataccaaactcttggcgcccgactaggccgatcggtgccctatcagcacatccggtccgagcatgagatcatggcaggacagcctgctcgatagacatccaggcccagctgctgaaatcatcatatcgacagaccaggagaagctggtcatttttctttctcacaatgctgtcttaaaggcttcagtctaccatcaactatcaaggattcttcattgtgagatttcaatcgtcacatctctttgagctcaccctattgccgccttcgtaggttcccacttgcccccagtctcctaactttatcacagacagttcctgggttttcaaccacattcccatcacttgcgtccatcaccactacttatcttcatttgtagctgatgcctagatctgtctagggacaagctagcacctctctatccgccgtcgatggcctttttttcatcacctcgatcttttcagaatgcccagtcgttgacttctcgccagtttgtggcgcaaactcagatgggcgtcaaccctggcatactgcaggacatctccagcccgcattcgaaccatcctccatttttgcacttagtgctcctcgtcttcgaagctgttctggaagttgtctgcgtcagccttccgggttatattgctgctagggtgggcatgtttgatgcggacgcccaaaaatttgttgccaatctcaatgtcgctctgtttactccatgtttgagtaagtgccgtacccattgcacatacggaaaataatctaactttgtacattctgaacagtctttacgaagctcggttcccagctgacggcggagaaactcactgacctggcgatcatccctctcattttattgtacaaaccgccgtatcctactcctgcgcggtcgtggtttcacgatgcttttggtttgagaaacgacccgcaaacctttgggcggctatgggaggaagt

SEQ ID NO: 4558 - DNA, 1383 bp, Emericella nidulans
aatgttatctcttctgctcgttgaaccaaggataaagatactgactccatcccacctagtgcgagaaatcgctcagaataggacaaacacgtatatctaggtattaacacttcttatactttttccactccggttcattgtttgcaggcacctacagtatgaaagtcagctccaacagacgcaacaagtagatgagacggagcatagtataccgactgagcccgcctctttctagtattgcagtgtttcatgttcacattcgcctttgattcgcgaacactcgtagttggaaccgtcagagccccgaagcagaccacgttttgcaacccctgaactttaattccagcgttgatgtttacctgcacagttgtgggtgcaaaattggaaccagaatcaggccttaaggctaagattcctgattgttggagagcggcgatgatggaggctgtggtgttggcgactttcgatttggggtttgatgcctcttgctgtgtctgtgtctggacttgagcctgattttgcccttgccccgaagcaattgcgacggtattcccgtctccactaatattgatagacgagtcaagtcttatcactacagccctcgtggtgggagctgtgcttgtaactggaaatgaaggggttgtgggtgtggtcttataatgctcggtcgtgttgccgtgactatggtgatcatcgccgtcgtacttgtcatcatcatcatcatcatcatcatcatcatcattcggttttatatcttgcgcgacggctgtggccgtataacttggtggtgcacgggatttcttaatggccatgaccgttggaaagctgcgctggggatagactggcgcatgctgttggcgttgtatgagggggagtgtattgtatataagcgtggattagggctaactcgggcggcctaaacgatactgagaacgtcaaggtgcaaacggagaaagacgtcggatctgacgttctgagatatcaagaaaagaaaaaatagagatatgatagaaactaaattgctgaatatatagagctcgacacatgtatgatcttcgtgcatattgcttaaccatagacaaccaagatcgataaaacacaatcgcaacgtaaaagaaagaaataagttgtagctggctcagttcaattgacgggagacaggctcaatagacgggtagctgcaacaacaatcagatcaagggtaggtatcgcttattgagaggcttctgattgttctccatgcatcaataggaatttctttttcaacggaatcacgtgcactgccagctatcaataacatgcccccccatttgagattaatttacaatgactaatgtaaatatgccatccatcctagggaactcgagaatgagatgcgcaagg

SEQ ID NO: 4559 - DNA, 3355 bp, Emericella nidulans
cgtcctcttcgatcaggagtcgaaggcttctagccttactggtgaatgctcggcttttgatgcagacattgaccaatgggctgagtatgttactgagtacttctagcctaattatcatgtggttaggcttgctgtatgatggctagggaacttggtggtgttgttgatgctacgctaagttgtataggacgaagggactgcatgttattgatgggtctatcccgcctacccaggtttcttctcatgttatgactgtattttatggaatgtccttggaaattgctgatgttatcctggttgaccatgcgaaggcttagggtgacctttgaccaaacttctgctgctcgcggcgctccgcaacctggcgacctatttcatgttctcttccttccaacttcatattatatactttgcaaatcaagtgcactgatattgcttccataatcgatgaccgctgttgaacaaaaggttcggggagatagccaattaggactaatgacagcatcttcactgtaccttccaatattcgagagatcgtcatgagccgtttggggctcgacaaagaacagcaataacagtactcacgtgcaagttattgccgcaacaagattatagttaagctatagcaatcagcattcagtacgctactgcacactcaaatcaagtgtcttcttagactagctttgttaccattcttcaataccgtaccatgttggcctagagttgaatgaatgtgcagccccggaccggcctcgttcccagaactacctcgccctcgaacctaacttcaacatgaactaaagtgatcgaggataaagggataattgtggtcaaaaaacagagatagatccaccgctggaaataagatccatcagctctttgccagctcggaaatttcggcttgagttcaggagacgcagtaaccattcctccaaattcttttcaaagcaatcaataataggtacttatttgatgagcccgtgaatgggacaatgtaatctggtatgttagctggtgcagtagagtatatggcaatttcatgccttgcttctgccccaagttgagaacataggcgtctcgcgaagtttcaaagagagtgaatctctccgaaaatgcggcctatcaaaaagtaagtctggaagtggatctgttacggcaggcgtaggacaagtcgcttcctgttgtacatctatggtgtacggttggcatagccgggtaatggtaaggcttgctcagtttcaaattgtacttactacgtagtcaactgttatcccaatagtcttctctatctgctttagttgttgaaactgcagactctaggtgctgttaatatcatcgtaatgcagggtcggcatttttcacctgcccttacacattgcgccatcgcccaactccctgcttgccgaggcagtgacaacagctagccaccacagatgctcggaagcgagcaggaagccccattacaactttctccacagtttgttcggtacgcctagtccgcccggaagagactggcgagtcaaaatactgcaactagcgccatcgccgaagtgcacacagatatggctgcgtctagagtgttttattataccacctccatttactgggcggcaagaatgcgagcatcacatcgaacaacataaatttaagcgcccagggctgatatcacttagtcgcccatgtaccatgccgggatggcagcgagctgctgagaccaggctagtgaacaaagactccccgctcaagtgagccatgcgcaggtatttgcgcagggtgagggtgtgatctactaattgcacgacaaggtaggcatcaggactaggaatcgagcgaaagagactggcgcgaggaaatggccagatcatgtgggttcccttttcctcagtttgtcctcctctcgctatcataaagtaatcttagttgaaagaactcattggctaattctcgctactgtaacctgcaccggcccagtgctagtattatcacggctgcaccaaagattcctaagaagtccctgccagcaagctagcttatcgatggaccagcaccacccatagcgatagaacgtcgtcaattaatctagtcgaactctgcatctagtcaagggcgaaatacagggcggacgcaaagctgatttctcttacaagtcttgctttatatccggtatggagcctcgcttagaacctcaaaccacgctaaatccgttgatggggctgagtggaggccgtaaaaagtctggtccctgtattgtacagatgacgaccaataacaactgtgtcttagctctcagaaatgttcgaaatccaacatctgtcaggccatcttgttagccattccctagttcatcatatttagcaagcttgccgctggcgttaggttagtctgcatttctagactattgtaagcagctcgcttagccccaattctagcaaaggagctttatatcattcgttgttaggctctttatccgcggctggtacaatctcgtctttgtataccctggatttccgcgacagtattaacccatacaaagggcatgctcgcttaaaatcggcagcttcatagcattcgaggatccaatttacatgcctatatatatttcatggtttcccttatgcaaggatttctcttcgacaagcaaaggctgagcctcttcgtttagtacattcatttcacacttttattaacctgccgaattcattgactgaatacattacttgtatcacactgcctgctgaacaacgaaccttcactcagaaatgtcgctctttaaatttgccgcttttgtcctgggaacagctggatctgttgccggtcatggctatgtcaccaagatcgacgttgatggcaccacctacggtggctacctcgtcgatacctattcctacgagcccgaccctccgaagctaatcgcatggtcgaccaccgccactgacaccggctacgtgtctccatcagcttatggtacttctgacattgtatgccatcgtggcgctgagcccggtgcgctctctgctgagactttgcccgggggctcagtcaccctttactggaacacctggccaaccgaccatcacgggccagtgatcacatatctcgccaattgcaatggcgactgtgcttccgttgacaagtcaacccttaaattcttcaagatcgatgctggcggcctggttgataatagcgccgttccgggcacttgggcgactgatgagctgattgcggcggacttcaatcaacaggtactattcccgtccgattattgcaagtggcaactacgtgctgcgtcatgagatccatgggctgcacagaacggggaataaagatggggcgccgaactatcccagtggattac

SEQ ID NO: 4560 - DNA, 6986 bp, Emericella nidulans
cagagtccgctatagccctattccgcgaaatcgacttctgtctccctcaggtccttatgatcggtgatgcccgtacattaggtcaactcgctgcagttattcaggaaaccatgcaggaggaccgaatcgatgcagccgccgatttttttgccctggccgtcttctgtgccatccgtcgcctctcgttcaacgagatctacctcgaagttttggacaggaatccccttcccaacggtcaccccgtgcaagcggccgtctttgcggaattgtatgctctcggtgcccgatgcgatctgttcttagacatgacgcccaacctgcttgggaaaatcatctcggcaaaataccgtgattactataacaggcaccagcccacccgccacgaagaaaattttacggagcttccaacagcctacgcatccatggatatcgacctggatccaaatggcgaacagcacgacgtgcccttctactaccgcatcacattcctcggaatctttgccctcccggcgctgatcgatatcatgatgctcaccactgtcggtcggggcctgtatcttaccaccttcatgagcagcacggaaaaaacgctggctacgacggcgctcatggttgccctgctcgtctgcggtggctttgggtcctggatctcgtcaggagggagttactacctctacgccatgggcttccccgcattgagcatgttcgtcatgactaggtttatcgcaggcctggctgtcacccttgtcggaggtctcattgcatttatctgcatctgctgcatcaagagcttcgcggcaggtattgtgttctttttgtactttttcttcctgagcacgtacctcatgttgttgagtgtgctggctatctatcagttgccggggtttcagttccagtcggtaggctaccctttttttttttttttttggttactctggttggaattggctgctaatccgatacagggccgaacagtcatcatgagttgtgtcccgatcctcttcattgggccaatcgtgacgctctgggtcggacatgacactgtcatctatctctgtctactcggagtattcgtggcctcgttacttctgggagctcgacgcatcatcgccagatggaacacctggtatctgaatattccgcgcgtgacggacggtgatgttgtgaattggtacatcagctctcgccccaacatcaacgtcgaagaggtgtctacgtcctcaaccccccgcaaggccctcttcgaagcagtgcaaaaagaacgaagacgtagattctggagcaagcgtacaacagatgagttcgtgcgcaggatggcagacggatacgatgctactatatttcttttggtctggtactgccggtactcacgcacaaaaatgcccctgccatactctcccacctggaacctgcaacttaaggccgctgttgataccctaggcgacatgcaaaagggcctgaggatgcattcggcattcctgcactggagacacacgggtgcggacgtctggtgcggcatcctgtactttgtcattgcattgatagataaatgaactgccttgttcactggcgaatcacttgtcggtctatccacagccagctcctcagagtatcgtttatctgttggctttggcctggcctactaccttgctggcgcagtgatcctcgatgcagtctctcagcccctttggacagccgtaacgcagcgcactcccgtccccgtgaagaacctatctacactccgtgaagtactcagcacaaactctggagatcgaaaaagattgtactggagcaatctagcaaagttcttcttcctgcatatctgggggacagcggtcaccttggcgttgatgtgggcgtttgaagcctcgcaaaacgccacaatcatgttcctggcgtatattggctcgtatagcgggttgctgttctatcagtataatcgaattttcacaggccctgaagcagcgaggtgtctcgcggctggatcagttgttggattcgtgattgggatgactatgcacaccgtcattgcaagctttacgtggagtagtgtcatttgcttaggcagcgggacatggacggctgcgatctactcgctctggctgagtgatattggaatgccgacgttcagacccaagaatctctctgtcttggagagtaacagtcagaaggaattagccacctacacgagcagcagcctggagccgtacctggatctctccccgacgacagtggccgaaacgtttgacaatatcaatgcccttcctgatgacctgcggcataagctcgacccggagacacatcctgggatcgaagtgaaggagatcatcctctcgaactcggggtacaggacctctgctcttgtgcaagctgcttttcccgacgcggcgcagtttctcagagagatcgcccgactctgggtatctggtcagacagtcattgagtttgtctcagctgagcatcttttacagaccgagcagcgcgtccgccgcataagtcgactgaccggcgacagtctgcatatctttatcgtcatcggccccggcctcgtcggtcaagactggacaacgaatatcaggcggaactgtcgtgctattgcggaggcggttgtccaggccacagccgaagcgagactcggcttgacgcatgatgagtccatgatgacggagttgcttattgggactcatcaggataattatgacctctccttacccgagggtgtcaaataccagcttgaacgatctcctgcggagtgtgcccgtgttgcgaagcacggccagcgtacatttcttcgacatcttctcctcggtatcgactgcgatttggagtgggatgaactgccgaaatcagcacggtctttcctccttcgtcgtgttgctggcaaacccggccgactctcatcagaggaactctcatggttgcaaagccgggtgggctcagaagatatccagaacctcgctgcgcacgtcgcacgctataaccttggcgtcgccatgtcccttggtgtatggcattacgcccagcgttggatggagcacgatgcatacccttcctatcctgtctttccggacacgacatacgaaaagcctatacagacactcctccctccgcccattggcttgcacattcgcttcacagacgcgctaaaactctcctttttgcaggtcagtcactcagtgagaacatgcctcaagttctcgatcatcgctctggttgcagacccgcagtaccagcgcgagttggaatatatgctccgcgggcagccacaggtcttcgccgtaccgatgacgctccttttgaacagcgtgtaggagtttcgccaagttactacaaagaattctgatcccgctagtcctcttttacgggcgtaaaagcatcagtgacgtttacaagagcagtcgtggctggaagacggtgcttcataaaaacagagtagcaatcgaaagtctcgagggcccaacgacttgttttgcaaaatcccaaggagagggtactacgcttctctatcaatactcaggcagccatatgcacgagccggaggataacaaggctcttaaggcaatcaatacatacactgaccggctcgtccttttgaagcgcgaggagtatagagccggccagctaatcaatgccttctcatacgagtacgcacaggacacccctaaaggccgacgaacacggccgctgccaatccagcgattgtgtaccgccggggagctggaggggcaagttgtcatctacgacgagagcggctacatctcctcaggctccttcatgcaaggcatgaacccagtgaatttcaagtatgcctttcgaaagaacgctaagttcgacgatgagctgctccgcgccgagtacgtattcccgcatatcactattagggtttcctggtgcatgccgccatctcgtcatccagagaaggaggacaaatggatcccttacccaagagtcagccaggcggcctttatcgagccaggtaatgtctaccaatcaaaatggacttacgaccacaagttccaccctgtcattaccactacactcaacggggaaaatgtcgagacgcccgcgatgatttcagaggactggttccgtgttcttgacaagcctcagaggagcagctttttgcatgacaacccgttattcttctttaggagcgtccggacgaacatagtgagccgcttgttagggctaaatgtcaagacgaggccaattcccaccagtcgagcacgaacgcatctgtggaaggcgtggaaggggagcaaaacctttgatgccgtgaccaccacctggcttgatgagatactgctgcgttcggacagcatcctccgtccatactggcgaaaccgcgactttggccatcttgatgcggccggagagtatctggacgcacaagtggacacgatccttgcccgcgtcgacatcgaccctgacattagcagctggacgcagatggcgttcaagattagcgatctgtatagctttggcatcggcggagatgcacgcattaacacgcggactctctcgacccagctccaagataccagcacgcaactgcatgttctggccatggacacggccacctggcccaacgagcccgggggcgtctcggcgtgccgacgggacatggtcaacgacctcagggggataagatggcacatcatctccgagaatgcaaatgactacggcgtccccaagttccagatagagcggaatgtgcaatctcttacagtgctgccacaatgggggctcgacttcctgaaccccacgcacggggtattccaaaatacgcttgacagtgctgtagttgagcgcagtcaggatacaaggaaagacgatataaaaagacactttgtcccaatcctgtccaggttggtgcgctgtgcgcggacagcgaacctgaagagacatcatattgaggaggcgactaacgcgctggtcgatctcaatacgtactttgagtctggacggtcctggaatgatgtttggatgagcaagacggtgaagactgcgtggcgcgaactttggctctctgacgatgtggatgacgccctgcctgtggaaaaatggtgggatgctgagcacccttctctccagcagcttgatactgcgctggatatgtggcatcgatgtaagccttctcctacacatggcgttgtgtctttgagtggtatactgaccaatttgatagatttatttattttctccatcccagtccctgagcgcatccccgacgtatttcaggtatctcaccatttcacgggagcaacctacggggtgctctgcaaagcaaagcgcaagtgtgccctccacgtctgggaccattgcatcagcttcagggagatgaccaccttcctctcggccgctgtctcctttgacagctcgttcgtgaacacaacactcatgtcgctcggtcatctggcatgtgtactgatcgagcaccacgctgacgttatcttaccgtgcgctgagtacttcaaccccggctgggagattgaactgggcaccgcagagggggcgctgcagcatcggaaggcatttgcccggaagatcgacccggttgtcaatgggattacgaacatggagaggtataagcctattgagaagatccgcaccgagacgccgacagttgtgatgttgtcgcatatccggtacgtatctcctttttccctctctttcacccttactaccggttggatgcagctaacgacaggaacaggtatgtgaaggacatcaaaacagccatcatggccaccgatcttatcgtcaataaatggggtttcagagactaccgtctacacatctacggcgatatggagcgcgccccagcctacgcctccgagtgccaggaaataattgcgtcaaaaggcctccgcgagcacgtcgtgctcaagggtctgggcaacccctccgttgtgctgcaggacgcctggctatttatgaactcttctatctccgaagggctccctcttgccatgggcgaagcagcccttaccggggtgccagtagtgtgtaccgacgtcggggcctccttctgcgtagttacggaccgcaatacaggtaaacggttcagcgaggtcgttgcacccaatgacagcgattctctagcgcgcgcccagcttcgcgtcttagcgctgctcgataagtgggcgccctttgcggaagatgagccgggcacaatcgtccctaccctagacttccatccaacacctgagcaaatcaaggctgtatcggaaagaatgtacgccaaaatcgagcaacgacgaaaatttgggatgcttggtcgtgcgaacgtgctcaactcgttctcgtctgatcgatatctccgcgaacacgagcagttgctctggataggcaagtggcagagtcgaagttttgtgacgcgaactgcgttgtctagcgcagcaaacttgagtaccagcgcttttttccagatgggaaaggagaaagagaaggtgaacaacagtgcagtccgtctgtatatagggaatgtccccagtaccccggactcgatctaccagcccgttccggtgagtccctggcgtgcgtggagagattcgaggcatgccagttcgagcggcacgaggacgcccgtttagatgtggaagtctcgctctgaatgggtcgatgtaaagctattgtatatgccatgttatgagagtatagatgtagagtaatgtttataaatatgttaatggatatgaatatattttggtttgtcttcagtgccttctcggctgtcttgttgacgcctcatattcatacccttcttttttccccgttctccgagaattcataaccaagaagccacagtgcattgttttaagggtagatagaattccgggtttggaaagtctattcgtgaaccagagcgtcaggtgatctttaactacctttggagaccgtagctcgcacttatcataggtttcagctaacactgaaggattaattttgtgttcaacatagaccacgcttcgtagaacatttga

SEQ ID NO: 4561 - DNA, 3950 bp, Emericella nidulans
tttggaaacgaccaacagttgaagggtgcctttatggactctggggtctacatacacggcaaccacgaacatacgcctcattgttcctcaggcggcgcttgctgcatgggttgctatctggaagtggatttcaaaccacgtccagaactacttccaccctactttgcgtcattggcaagctgcttcgagccgtttgcataccggggggcaacggcgtggccttcttactctcgacacatagcttgacactctggattctggcgactggttcaacctctagagttccagttgctaaactcgcagtatacctccaatccggtctgcatgtttgagtctactttgtgacatgccgaaagatcctccacatcttgaataatatatcacaacgatccgaaagcgagatgttctcgcagcagcagactgcctgcgatcactggctcacttcacctcaacaccttcctatcatcgtcggactcgtcttgaagttgaggctgcttctactccgccctcatgccaggtggtttctatggcattacgcactatgtaatctacgcagtccctgcataaatcaacagcagcgcacgaaagtacggcacggaagttactcctaccgaccccaacgactattgctagagtttagtttgcgaataggaggaaaaaaaaaaaccttgaggctgacccgattcgaacggataaccttgtgatctggagtcacacgcgctaccgttgcgccacagccccaattagtgacataatctgtactaaataaaaactattaggcttaggtttccctggctatcttgacaaatcttcatgtcttacgcagacgcatgctggcttgtggcttgacgagatcattggagagctggaacccagtgaatgattcgtgctaatttgcaactttttctcccaaggtgcttggttagaaaaccacccgctgttgtctcgcttgctgtacacagtccgtggccaggatttatatattgatctggcttgatagtatgagtagagcaatgagtctaacaccacccaatccatggcacacttggaagacaaacattgaccacattttcttttcagtaatgatctaaccatagcccgtaccgcggtgctgatctcgggaatataccaagccaaagcttacgacagggtcactgatcagatgggaagatgcgtttgacgactacatataaggatactgccagggcaaaacgcgacaataccatgtgggagagaaggtctatatagttatgcgttatgcgactggcatataaccataagtttaggctcctctcggtcaaagcgtgtttcctaagcctcttcacccattaccatgtctccgtacctctttctaaccctgtccaaactgatcagagtatcccaacttatcgcaagagcttttgcgtattattttgaagcgctggtacccagaattagtcacgcggtactaagtgctttgcttcaagtctagagtggatgacaaccctccggcttgagattttgaacacataaccgcgttgccccaaacaagagcatataatggtaactgaatgtaactaaacagacattcgtaccagaagggaaaagaatgccggtagacataaaaaagaaaaaattgaggctgacccgattcgaacggataaccttgtgatctggagtcacacgcgctaccgttgcgccacagccccaaaggatgataaaactttactcttacgcatatagaagccaacgagtcatatttatactttcgagaggcaaattgtctacatgaggcagataatcgcgcacttattcattctccgaaggaaggctgaggcgggagacagattcgcctgcttctccagaagcaattgcgacggcctggagagtctatcgtccgcgctggtccgattgctttcctctgcagtctatacttaaagtggtacggtcctgattaagggcaagtacaggccctctatcaaggatgcctcttgcatgctatcctcaatgcttctaacacaatatcttagctatcatcagaagccaaataagacaggctggcatgactcttggacttgtgtcagcacaaggacttagtccggacatgtcggtcctgtcacaccctttgaggattatgccgaacgcttagtttaaaaatgcgatccatgtttccggggagtgtacggggtatatccagagtatcctaacggataaattttgggcagcctagatgcccggacacgtgtagactcatgaattgcggagttactcagacctgggagagagcacggacactcaatgacaccggagtattgtttctggaaggactccttttacggtggtatgcagaatatataccctccttacgatgaagcatttctcccgggtcatatacatcgtcaaccaactgatattcatcaacgactttcagcgccgacgaacattgacctcgatagcgactggcttatgcaacagtacgagggtgtcggcatctcctccctagtcgcaagttcgaaggagaactccatcatgagctgcggaatagctttgtagatctcgcacatggagatctaccccgtcagtcagcactgacttgacagccgcaacaaaaaaaagcaacgaaaaagaaacgaaaaagcaacgaaactgaacacgcaacacaatatggagaaagagagcaaaagaatcaatacagccaaactgcactcacattcttccccaggcaaaccctcgctcccatgccaaactgcattatatgacaatccatattagccacgttcgcgccggcctctatccacctttccggccggaatatacccgcgtcctccccaaagacggacttgtcgaaatgaatgactgctgggttcacacctacgcgtgtattcccggggatccagtacccgccaacctcgcatccgcaagatggggcgtggcgggggaatgagaccccggtgatcgggtgcattcggatcccctccttaatgcaggcccccagataggggagcctagtagcctcggtgtatgtgatgtgcggccggctcagctggtggctcgtaatcgcagcgtcgatctcagaagtgagtttttcgtagacggctcgattgcggaagatgttgtagaggatgccggacagagtcagggctgtcgtctcgcttccggcgaagctgtcgccgtatcttagtatcataatccatagcccatagtcttaaatccctagtatagaccaaaacctaagttaccaaaaggatgaaagtgaaacatacaacccactgaaagattccatcttgatatcggccagctcaaagttgagcgccttgccgttcttgtgcgaaatgtcaagcagcttcccaaggatatctgcccgctgcggcttggtgttggagtccaactcgctcagcgcgaagagccgtctcttgatcgtggcgttggtcgcctccgtcaggctcgccagcgccgtcagcgcacctcgcaccttagggaggaggaaccccgtcagcaagaataggggccgcacgtaggtgggcatgatgcccgccaggaactgcacggggatcagatcgtctgtggcggcgatgtagccgagatggtcgccgcctgcttctaggaagccgaacatcttgctgaagaagagctcgccgatcacgtcgtacgcgtacctggaccgggtgcagtgttagcaagacgatcgctgtcgctctcataccatactaggatagggccggttagggcacgggtgctaggattggagtacattcttgtccagagccacaagtcaaatgactctttgcggtctgccatctcgccgagcttttcctcccagaggtcgatgcaggcgtcgacgtactgttccgactggaggatgctggacatcgagtagacggcgctgacgatgcgccggcgatccgcgtgctgtttcccgccgatggcagagaaatggtctgggaaccgggctggacgtagcgagattccta

SEQ ID NO: 4562 - DNA, 1145 bp, Emericella nidulans
gcaggtcggcagggtggatgatagcaacgctagaagtacggggaagatcgttgagcaactccttcatttccttgatcttcagacgagtaccatgacgcacccaccactgtgtcatgaggtggtcgtactcctcatcaaggttgatgctcgagattttctcgccagtgtcaccgttgaacagacctcccttctcagcgagatagacgatcttcaggggctgaagcgcgcgcgccagctctccagctgcgacatcggcattgacgttgagcacttggccatcgggggtttcggccatggaagtcagaatgggaaggcagccagcctcaattgcagactcaatcggcttcttgttgacaccgttgatcttgccgaccaggttgtacttctccttgtcaaggtagtcggcctggaagacaccagcggtgagagggcgagcccgcacacccatgcgctccagctcctcgaccagcttcaggttctcctccaagaagagcttgcgggccaaagccagtgtcttgccatctgtgacgcggatcccatcctcaaactggggctcgacaccagcagcctcgagcatgcggttcagctgagggccggcgccgtgcacgacgatcgggtacagaccgacatggttcaggaaggcgagcgcagaggagagggtttcgaggtgctcagtgataatagcaccaccaaccttgataacggcaaactgctgggacgagaccgaagtaaagtgcgaaaggtattgctggacctcacgcttcgagccgatgttgctcaacagctgaacgacggtggaccgggtagaagagagttgggtgtcggaggcgcgagagtagtgacggctttgcagcagcggcactgcagacgccctcaacgaggcacgggctgtgggcgagcagagtctggcaaacgcgacggtgtgcggtgcggagagcgctcggaaggacttggtggtggaagctctccgcacagcggtgcgaagggagaacatcctgccaaccagcatgcggcacgttcttcaggctagttggacagaaggtctaaagagcggaagagaaaaatgttagagaagaagcagatcgagaataagtatcaaaaagggctgacggaggagtcacaagtccatgaggcaaaaaaggttg

SEQ ID NO: 4563 - DNA, 3804 bp, Emericella nidulans
gctctcagatggtgagtatgacaggcgcagcggaactaaggataacaacttcatatccggaaatacccatgtgctagagcgggaagtaccagacaagtacgggaagaccagtccagttagtccagtagacaaactgcgggctgtcagtaaatggcgattgaacaggtaggaagactagtatataccccgttgtacacatctgcagcagcatcgaagacttcactccagaagaaaccctgaccaaaagtatttccgacaggctttcccttcctgtctacgagttaatctcatgaaagacattgcctagggtggagttgtacacactctttttcgagaacggagtctgcagtgtttttcaactgcctgagataaattcatcttagatcatgtctctcaagtaccaacgaccaaatttggaactgtacattctctggctgtgcattacttcggaagccatggtacataccttggctgattccttaacatccttcacgacaattcgaacgcctcgaagtcgagcgcggtaacggcgtcaaatccgacatcaaacaaaatgagagaccactcaaaaaaagcgtatctcgtgtaagctagtaggtaacagtattagcgtatgttgcgcaagatccacaagggctcctcacctccagggactttgtgcactttatgctggatgaagtaataaatcaagggaacaagcgtgccgaaaaacagactggcaaggatcttccggtacttgacagcgcgacggttgttcgggctcaacgccaagcaaccaattgtccacggcaaagtcgcaaccaagtacgaaatcatgaaaatgtcgtgccagtcgtggtcatctgtcgacgtcacatatgtccagccgccgcaggtaaacgttcggaatattccaacaccggcaacaaacttgggaagagtcgagttcgggcgggcagtcacaaggtaccaaaggaaaacgagggcaaaacgagggccggacgtgatggcgataaagacttggaaaaacgaacgctcggggtaccgatcaccgatggttgctgaaacagaagggaaccattcatcgggatagccgtagtgttcgttctgcacgatcttattgaaatgcaaactcattccgacaaagagggcgctcaaaaaggcagtgtacgcgacggcggtatgagcccaagagacccattttccattaagctagcagatacttagttccgagattcatgcactgagatcgaaggtgcacctaccgtcgcgacggcgtccccgtctttaaacttcggcgccattgtcgcgcagagaagagactctagtctctagggcccagtgaaagtctcaaaagctattagagagagacaagaaaataaagtaaaagaaaagaaaaagaaacgaaagaagagtatctggaaagggaagacgagaaggcaagtaaagagaacccctgaggccagcgaggcatcagaattgaaggggccgcggctttgtatgggatgatcgagattcggcaacgaacggacgccacgagtggccgccttgaggcgctaatgcgtatccggtaagcggccactgcttgtagccttggttctaaggcattaaaatagtttaagtgcgggatagcgacttttttctgttcggccgtctgttgctcttgcatttttatctaccaccaaagaaatcctttattcagtcatgtctgccaccgctgacaaggcgcgattctacttggaacaatccgttccagagctcagagagtacgagaggaaaaagatctttagcaaggtaactccgcaaggtcttgtttctgggagggctaggcttacatgatttccgcacaggatgaaatcacatcaatcatcaagaaacgatccgatttcgagcacaaaatcaatgcgcgcgggccttcacccgccttttctttaaagtatttttacgatcgcaaagaagtagaaaccgtacgcgcccgtcacagcagacgttactacttccgccgagctcctcgatcttgctgaccgtacatcctgcaccaatgcccctccaggatgacaaatagctgatgcgtagtgagtacaggcctaggcccctatatcgcagttctgaaaacccacatcgacatcctcaccgatctcaccccgtcgaccctttcctcgctccaatccctcgcgacaaagcacaacttcctcatctttgaggaccgcaagttcatcgacatcggcaacaccgtgcaaaagcagtaccacggtggcgctctccgcatctccgaatgggcacacatcatcaactgcgccatcctgccgggcgaagggatcgtcgaggccctcgcacagacaaccaagtctcctgactttaaagacgcgaatcaacgaggtctcctgattcttgccgagatgacgagtaagggatctcttgcgacaggggagtacacggcacgctcggttgagtacgcgcggaagtataaggggtttgtgatgggattcgtgagtacaagggcgttgagtgaggtgctgcccgaacagaaagaggagagcgaggattttgtcgtctttacgactggggtgaatctgtcggataagggggataagctggggcagcagtatcagacacctgggtcggcggttgggcgaggtgcggactttatcattgcgggtaggggcatctataaggcggacgatccagtcgaggcggttcagaggtaccgggaggaaggctggaaagcttacgagaaaagagttggactttgagtgtgagtggaaatgtgtaacggtattgactaaaagggatccatatgtttattgcagccagcatagtattaccagaaagagcctcactgacggctctagtagtattcgaacagatattattgtgaccagctctgaacgatatgctccctaatctggtagacaagcactgatctaccccttggaacgcagcatctaggctctggctgtgctctaaccctaactagacgattgatcgcagaccatccaatactgaaaagtctctatcagaggaaatccccaacattgtagtagtcaggttcctttgtggctgggagagaattggttcgctccactgattccagttgagaaagtgggctagaaaaaagtcttgaagattggagttgggctgtggttaagccggcttttattgaccttatcatttagcaaaatatgggcagttgctatcaggaccacatactctacccgaagcttaaaggcaaaaagaaattctgtatgtcctgcgaatcaacattcctcgtgttatatgagcccaaggcgctgaaccaggaatattagctacgcttgtggctcgcgaagcaatgatactcccttctgaagtgtgtattgagctagttacattagtggcacatcttaacaccagcacattggcatatttaggatactattgataatggaattcaactatcttgctttatagccgactacagcttcggaacgcaatccttctttacgtaaatgtgaaaatgctcttagacagcttgaaaggccaaaaaatctcccagaaaaaaaaaagagaattagagaaaatccagtgggtatatagctatggatgccctcaattatcctgtatcttcagatgttccacgagatccacttagaacataaggcaattcctatcctcaccatctcatctgttttgcttctctttaggaaacacatgtttctactgacctcgcccctttccttgatcatttccactgtccagtgattgtctctagaattagagctctgcgcataattataatttgcctctagtggtcactctccattgtctttaagcaactcacttgac

SEQ ID NO: 4564 - DNA, 1142 bp, Emericella nidulans
cccccctcccgctccaccaacgagcctctatcacgtctatccatggatctagttccagcagggtgtttccttcgtcttctgatggctgagcgctcgagtctggtccatagagagcccaaaatgaaagccacctgtcggccaaaaccgcaggaagccgcgcgtgagtgacccgggaactccgccgctatgcaccggcgtatcgtgcgaccgaataggccgacggaagaactgatttctgccttgaatctaggagaagttggtagaagtagacgctaacggggtccggcatgcttttcataccccagacgaaaaacatgggcttttgatatctccacccctccctcagctcatcctcatccttcgagtccctccatctatctacatgctcttatcctcgttcttctggccgtcttcgccatctactcagcatattgtcttgcaggtcaagttcacgccagtcattgcggctctcgtggtagatacgaagttcggcttcatcccgcgaagtcctagaaaatggagttcttcgactttaatgaggctgcttccggctcccacgtgccggacgacgatgtcgcctctgatcacattgagatggacgagaacgatgtcgtggaaacatatcagtctcttttgcaagatcggtcggagattcccgacttcctacctggccaaagcgcttctgaggaagtcatgtctgagactcccgatccggaaggcatctaccccatgggccgtgccaaagaaccttgcgacttctgcaggaacatggggctggactgctttatcgccaaacgaggcgtgatgcagaaaagtggctgcacttgctgtatttcgctgtatcgcgaatgcagtttcacccaaacaatgcctcagggcagattcgccggcgtggacacattgcatcctatctccgagaacatttatatccccacaggagggctgaccggcaagaaggcgcttaagtctttctctggcattgcagaggatgttgacgctcgtgcaaggaaaagcagctctcgtctcttacgagaggctgggaccggatcctttaggggtggcttaaatgacccataggggaccattcccttatcccgaacccgaaaaggagaaaagagggaatttgaaacctaccccccagg

SEQ ID NO: 4565 - DNA, 2018 bp, Emericella nidulans
ttaacgcatgataccaaattaatgtctattggctcgattagataaattgcctataaggaccagtgttgataccggcattcaagtccaataagcgaaatgaagctcagcgcgctttgcgcatgtccatacattcagactagagaagtagatcatgcaaacaaactgcatccatgggagaaggtaagcaggcatacaataagtgagcgttgctgcaatatgtggcgtagtgcttgtgcttgatgtactactacgcctaatagtataccagtcacagagcactaagtagtaatccgccagcgcagtatagacgtggtgccctacaaccgccaccacttccagggcatctgcaagctcacatccattttggagagatggaaaaccccttcgtatcatatgagtgagccagatatgacaagtactgtcctgctctgtactccggtactttatccccccatccattattggtctcagacaggccatggtcccccttgatgcagaccccttgaaaacccagacatccccacaattaaccaaaacatgcacgattagatgaccgttattatggttttgcggagcactcatcttgatcaatagagatattatcgtcgtatcgtggggtgcctcgatcagaagcaccccattcgacccttgagggtttggtaatatatgcagggcaaagagcaggatcaaaaattctgttcaacagcagtatcctttccgcaatctatagctattcttagagacagcatttgaataccgtctggatggaccggcggacaattgaacttccccgtatgctgtgcgagcttatgcagtgcatgctacctatctcatgctctaggtggtcagcagtcacagatgttttccttttccttcgttcaaagccctgcaaatgcagtcttgcgctgctcaatcaactcaagaatcctacaaggtcttgttctataacctgctttgacacctatcgcgaggataaagaagggctaggcgtgactatatgtgaccatgtgataccagtgcagggacatacataattccgaagggttgtcgaatgagcgaactcagtgcggtgaccccagcagtcaaactgcggacaataaggcttgcctctgtgaatagtaattacagtcgatgcgatgctagcgcagacgtgacctggtggtatctctcctttaaggcttttttggccaattttttctttttgggtatagatgggcatttcttaagtgctttctaagaatggagcagacaaggtggagtacccccggcagaattatccatacaagtggactgcccctaaagcaggtacagaagaacggtttcaattgggccgcgattctccatcgagcccgccgtgaagaaattgcaagatcgacaaggtcatccagactttcgaaaagacgagattcgactgatcgttcggtacttcagatctggtgccttgctggctctctggttcagaggatctgtagactactgttttatagagtattgtagagtctgagacatgctggggcaaccttgacctagtaagacaacgcgcgagacggcgagggggatttaagacatcgggtggatgcaggtctcttgagcattctggccagaccagtaattaaaccctctccgcccggcccgctgtcaacggtgtaactcgtcccagagactactgagagaccgagagaccgctcttcgactcctcttggccgctgtaagttaggctaataacaaataatacgcccaaataatcagaaattccctcccgcatccctcgtacatcgtcactggatctcctttgggctcctttccttttcgtttacttactcccttctttttctccctattctcgttccctcttttgtccccttcaaagctttatcgtttacttgctacactgtttgtttggttgtgctgtagtcgcgggaacctcaccttgaccagtcgccactctctgccactgacgtacgagtcatgcatcgatcgaccgtttggctttgtacgacgaccagctgccattaact

SEQ ID NO: 4566 - DNA, 5408 bp, Emericella nidulans
ccgatgtatttctctgcgttggggacaaacttgttcacgaagacgttgtaatatatcgtgtagccgatactgccacccacgacgcggatggagagcgttagggctgagatggtggcgatcaggtcctgagcaatgggaaatttatcagattaagcaatgaataagggggtagagatgagtgaagcgtacatctgggcagattatggtggtgattatggatgctggaacgactatcccgccaatacctaggcctgcgacgataagaatgccccagagttgatgcatgttgtcgacgtccgctacggccatagcgccgcatcctggttagagtcagattattgaatgtccatcaacttgcttgtttgtcgagtgtacgaacctgccgtcatcaaaacactgctagcaattaggagttccttgttgtggccacgaaggacgctaaggagccacaaaacaatacaggcgccacccatgatcccaaagccgatgggaaggctgcggataccgatatcgactgggtcatggccgtaaacgttgaatgcctgtgtaggccaaaacatgagcaccgagaagaaattggcaccagagataaatgtaatgacgagagttagaattagtgtacggggctcctgcttcaggcggcttgggaagatgggaaactttgcgccgtaaatttcccagatggcgaaggcgattagtaggactaccccgaggataagaggggcgagaacgtgtgcagaatcccagtcatactatagtagtcagttagtcaacatggatagacagttacacagagcgagaaaatgtacttggtaaccgccccattgcattccagccatgaaaagaatcaaacccacgatgctcagagagccgccgacgaaatcaatcctgccgatgatttctgctcgagtaaggccttccgaattaactcgaggcggagggaaatagaagattgctgtaatgatcaaaccaagcccactccacgcggcgcagaaagctccgacgtgacgccaactgcctgcatctgctatcagctgggcccagagcactgatggcgcgaatggggcaatggtaaagatcaagacagcgacatatttgcctcgttggcgagtaggtgccatttcggctgtggcagccagtgccgtgagctcgttgactccagcacctgcgccggcgatggccattccggctgcttatattagattcaatctgaccggacgagaaatgagcaatggcattgattcgtaccaataaaggtattcattgcgtgtgccgttgagcaaataatcattccgacagtgaccagcgaagccccaataagagcaacataacggcgcccgatgagatcagagagggaaccaacgaaaggacaaacaccggctagagccaggagattccctagaacctattaagtatataggttaacttcttcagtcctcaaactgacccgaaataagggaaagtacatacaaaccagacccatctgtccactccgccgatatcaccatagataatgggagggataccaccgaaaaggtagacggggatctgactaccagtccagagaaaggccatggctgtgaagcccatgaatcggcggaatgtcatcttcaatatgaatcaataactgaattaataactgcattcttgaggagcctgatccagcacgagtgcttcataccttggtagattcctgttcatcttgagatagcccagtctcgtcagcatacgtctcggcatgctcctgatggctggtatttggctttatgttgtcgcaagtctggcttgatgacttttcctctacctggaattgaccggaatcggtaggactcgcagccatctcgacggttatcaatcaagtagaaaaggtgaacggattaaggtcaatgtaataaaatatgtggagactggtgcagtaggtaagaaatacccaagcttcgaataagcatgggcatcttaacattgcgggtcttgcaagactttataaagcacaaaccagccatctagcccctctcttaccccggattctgacacttgtatactggacccagaaggtggggataacacctagaagcaagcgttgagtgacaacaacgaacgagcagtaccgacaaacctcagatctcgaatggttcctcgaacctgggccgcggcaaattatcactgaggggttgaggcattgccgacagaagaacaggtatggctactgctaaagaagagcacaacagacaatgcgggggttccgagaatcctgcatggaaaacgtggaccgtgtccaataacagtaacactggccgaatctagatagtggctagtcgaagtcaaacggcctgtcatggagagctggcaaatgaacgcgcttcccatgcgacgctttacggagatgaccgtttcaggactgcgcgcgatgatcgggggatattaaacgacgcaatcaaggaccaggaaggaccagggtctggctacaggtcatacaagttcggcactttgcacctaggagtcgcagataatctagcgggatgtaaagcatgcaaacactgtctgctgaaagagaggaatgtctggggctcttccaatcgcctgttttgcgtcgacctctttcatatctgaccatgatgcactggcatacagagtatggaacgagcgcctactgcatgatgtcatccaaatagtatgatggaatgaacctcttccattgagctcatgtaggtgccaaccgaaccagtcagcgaggatcaaaaggcgccttccaatttccgcagcttatatcctcgagggactacaaagagccccttggctacggtgcacacgttgccgtccttatcacgtaccgatcctatcacgtaagccttgcgatctgtactccgttcctcatctagcttcgcgctgaagacgtaaatcccgttcgacgtggccgcgcgtagatagttgatatctagattcgccgtaaccgcagtgcgctcagggaagtgttggatagccactcgagctagatgttcgtccagtacggtggctagtgcgccgccatggacaacaaacggccatccctccataccatgtccgatgtatacgaaattgtaagccgtcttatctttgtgattccagaacactcgctgtgcgacccaatcagttagcaaagagtggccagtctaccagcataagctcgccgcatttgctcaactatcctttcatttgcaatgccagcaaggcctccggcgccaacgtctcagtgaagatgcagcgcatcgctgaatgggaatattgcaaaacggtaatcacacacctggaaggccaacctcgaggctccgctcagcggcccagacgtgagcctttgtgctttatcctcctttgaaaagttaccgtagactttggtctcgacataatccggattctcccgcaattccttcatgagggggagcttgtcgaccgcgtcattataccagtttgtcagggattcatccatgggcgatcccggcgtaagcggcgggtctaggtattggcataagtggtgcccatatccgagaccgattccgccaaagataccggcgtatacgaaccgtcgcaaccacggacgccgcttaggagcaggttgataaccgactgagctaacatttctcgagagataaggtagtaatctgggaaccggacggcgttgagctgcggcatgacggagccgggcatgtacaacttgacgggctccgaacatggttgtcggttgtcacattgcaagctgaagggccgagttgtgcacacggaagactcgaggcaaacagtgccccggactgcgaataaccagccgaggcccagttcacgtgacattgttggctgccgggggtatagtatacctacgaaactaagtgggacaggtgaattcagccgcatcgtgcaagaatcatccttcttcaaggatatatgccgaactgggcccgccggagcgcttgatagtgcgacagtccacacatctacctggataaagggtccggcccctccccccaatctataggtagtcgaaacgggcatctgccctcgaagacctggccagggcagcgccgggtgcttcttccgctcatttccaacatatattgtccatagttgctgcttcaaacctgtatctagctagttcctaggcagttctgtttaggtagcacgtccagatgccccctgggaggccgcagatcacgtgggccccgtgatccgccgagtgacgttaaataataaaaccaaaccaaaccaaaccataagtgggacaggtgaccaaggcttgtttattatatttcatgatcgggtgactctacgaagaatatctaatccgtacgcatcgagagttatccagaatccgcttctattgatgtatggatgaagggaaaaccatgaacggttccaccatgataaaagctaagaaccgactgtttcacaacgtgccatcaaaccatgcgtagtatgtcattgataagaattagccgtcgtatgaagcgagtctattcagcggttggcagatcaacggcacggtaaagaagaataagagccgagtgcgattcacctgagatattgcgttagcaacagttcgtctccattaatgttgtttggcaaagggaggaaatgtaggtaaagaagaactcaccacctccagccagagtctcaattttcgagccatctacctcggtcaccttgtcgtcgttgaaccaccaccacttgtcgtcacgctcctccttactattgctgccttgtttcttgacgtacgaagtatagtggccgctgtcggcacttgcaccttggtgtgtgattacgcctctcagctcatagaggccagtcttgtttgttccgctgtctgcgcccagcttcgggtcaataagctgggccagctccttcttggctgcggtgatagacgcctgcttttctgcctgatactcagcatcggtcttgaagacgtcagtcattgcagcatcctcatcctttcctgaatttgttccctcttccttgcgctcttcagtagccttcttcttctgcataggctccaagcttgaagcgttgtcagttttcgcatcctcctctcgttgacgggcaatcttctggcgcttccgcgcacgctcaatgtcaagctcctcctttcgaatgtctcgtactttgtctcggacagggatgagctgtttcttgagctcgtcagtgcagaagtcgagcacgtcaagctccgcagggaatgtcactttgcgcataatcttagctttcttctgcgcatcgcgtttccagaagaatcgaacaaaatgcacagtgagatatttcggcagccgcgcgattcgggagcgctttgtgtagacggcatcacgattgagggtaggagaatgtttttcaatcttttcttcgagccctgatagtataccatcgtgcaaatggtttgtttccttgtcgat

SEQ ID NO: 4567 - DNA, 1811 bp, Emericella nidulans
  unsure (1)..(1811): unsure at all n locations
ttgtctacttatcgacgtgctcggactgtagttgtccactgccaaaatgaccactctccactccttctaccccctgggcgtcgaaatcccccattacattgccaatgaactcagtactcctactctgctcgccatatttggaacggcctgtacaatagtgttctctgtgactacctctctcgccaaaaaagccaactcgcagatctcaaattctgagctctacaagactctctggtttgccctgtgtaggttcctcacagctaagcagaagcgcaaccctaatagagaaaaaaacaggcggctctattcatcttgtcctagaaggctactacgccctcaacttcctcactctcgcctcgtccagccacccgctcgctcagctctggaaggaatacgccctgtcggactctcgctatctcaccccgaactctntcgtgatgtgcatggaagtccatcaccgcattgttctggggccctctttctttcctcctagctggatttatagcgaccaaccatccgtantggcatccgctgcagattatcatctcgttaggccagctctacggcgacgtgctatactacgggacttgtgcgtttgagttcctagtcaacggattggagttttcccgaccggagaggtactacttctggggatatttcatgcttctaaatatgttttggattgatatcccgcttggtgagttgctggctccgctcttttggtgagacaaatcctgatgctggatagttctcattgtggacagtgtaaaggcgtgtaagaatgcttttgccgagatcaaaaggatcaagacaggaggaataaatgggcgcctgaaaaagacatcctagctggattctgtgatacagtagatccgttcgagaagcgaagatcagcctaaagcgaaacatagtagcataaagcgctttacatagaagtcttttattttaaagtacgtagagtgtcactccagctacgtaattaatgagaatccggtccttatttacattccttcaagctcgcagtgctcgctcagttggatggcaagccggagcctccgctcgctgggcatggcattgccagggagtctgttttgtctacgcttttgaccccagcttatatgtcagtttggtatacggcgctcagggacgttgctgtttgctttgaatccgcgccgcctatctgaatctgcctgaagctttgaccctaaccgtggccggatttgacgcatcgttccctagcgtattcgggagtagatatgtcgaccaacggctctatttaataaagcattgcttagtgtggccaagcgcctgaatccacttgacttgaaacgccagacacgcggttgtacaacgtctctggcgcaacacagccactcaggcgcctgcctgtatgcgagggccgtttatgaggtctgcacacccgcagctgatctgtcttactcattcaaaactctactgtctcatcttcattcaccctagggtactcataggaccgcttgaaaatgatcgaagaaacaaagctgcctattccccctccccgcgtctacccagcaccgcctccggcctataacgctcattatgcctacgagtcccagcagctgccgccgcagagagcaaagatacaaacgtggagcgatccgaagcgggaatggagatacgggtctagtattacctcggatatgccttggccggttttattatcggggcgattattgggataattattgccgttattcgtcggcttacttgaatggttatggccttcccgaatacgtcgtctttcgagtatacctgttgtcagttcaagtttc

SEQ ID NO: 4568 - DNA, 877 bp, Emericella nidulans
tcgaggccccaatcaaccctcactaaagggatcccagttcttgagcgagtagccgggggggatctttgcgcgtatggcatcctcttcggtggcctttggcgggggcttagatgcagtcgcaggcttcggctgggcacgttccggctggccgcggactggcgacgagcgcgcgatcgtttggcggcatcagcctcatcaaaaacaggaacctggaaagatgagaagaaaggatcagtggctggctttggcttccgttgggacgctgacgggcgccgacgggacttgttcggttcctcgcgcgaggcgtatctgggcatatcatcgtatccatcatcgaccacatccacaaagatagatcgcttccgggatgactgcgatcgagcagcaccgtagtcgtagtagatgcccgcgggggcaccaccagacatggttttgcgacgagaggacggaatgccaccaaagaaggcacttacattttccgggtgtttggacgggatgccatattcgggcacagggccgtagaaaccgtggccgtatccagagtgccatgctccggcgtccttgctgggaggcgccgcgtagctcgctttgcggccgtggcgcttcgtggggccgcggggggagccaaaggggttggtgaactgcgtcgcatagtaggcgtagtgaggagacgtcgggggtgagttcatgtagtcgaacgaggaccacccggtgggtggcggagagtagtggtacattatcgcaagagcatgaatatcgatcgcgatgaagatgcaagagcaacagcaagaaccggcaacttttgaaaaaacaaaattgccgattaaaaactagcaaaccaaaccaaaagcacaacccagtatatgaacaggatatg

SEQ ID NO: 4569 - DNA, 1740 bp, Emericella nidulans
cccttttcaacaccttaaccaccaaggccaagcaatcgtggagaaagataccatgattatgcctttcaactccctaaccggatacttacaccttgtccgccacctctctcctgatacagtctatgtgcaagagtcactgtcaggtcaagacggtagcgcggtgaatcacatcgccggctgggttaggcaggtcgttgttgtggttggcgatgaaggtggccgaggcggcctcatcgatagcgacgatgaatcagtgctggcgaacaaggaagagaaatggtggcgcaaagagggtgttactggcattggtaaacgcatcgacgtggtcgatgtgcttcgtgttggggatgattggcgacgcaggatcagtggcaatgactagggcatgatggtttgatatacccgcagctagtatgccgcaaaatgctttgatacggtggttttatgcgtgttcattttgtgttgttgcttttctactgtacttggatgaccgtgatgttattccctaacttttatgatttgtttgatctcaagatcgtacttctacatatatttattgtataaattcaaagaatacgatttacatggcagtggtgatgcgcgactgttggcaatgatgtagaagcatcgtccgccagtgcagacacaaggctgtataattattgcgctgacttgatatgaataaagggcatatacatacgtgcacatgttcagctcacagcggacatacctgaccagctctcttacgacgtctagcttggataccaaactcttcagtgacgaccaccatactgtcccaacctgcttgtaactagactgcggggacaattttcgatgggactatgaactgactctttagcgaccttgggatccgtgctacccaccgcgttgaatcccgcgctgcttgtcgctctccgcgtccgctccccacatgtctcgtcccccggttatatcatcgacgaacgattttcggagcacgacttccgtctgctatccccgggtatacgttccgagaggtcgcatttaggaactgtcgctcggaattgcgctccggtgttggttccctcaagatggcgaccgcgatatccaaaaccacctcgcatccccctaagatgaagcggccgcccccgccttttgttcaaaccggggtcaacggtgtcaggccgcaaccaccgtcttcctctcctcccactacatccaagcgtcttcccggaactgggcaggctgcggcggcaagctctacgagccacccggccgtgaacggcgtcaatggtaccgggaattcgagtaacggtcccatcaagggacccataagccggcccaggaaagacgcgcaaaagccaggcgaacagagtataaaggcgcaaaaacaaacgccaaagacgccgtctctggagagtgatcgccggttagggaaaacattccctgagccgtatggttagtgttaccatgagtttgttgcaatgaaagttagctttactaattatgatattcggctgtagtcaaaacgacagcctacatcctcaagaagtttgccaaatgccctccgtcgttgattcttcaccttcatcctacacatttccgctttgagcagcaggatggaagcttcccgtataattcggaaatgaaggtcataattgaacatattcgcgcgggtaccgtcccccatgatatgatggagaagcttctaaagcgccaaatgttcggttctaataaggtagcataaggctttcgctgtat

SEQ ID NO: 4570 - DNA, 2411 bp, Emericella nidulans
gcggtgatggggttttcgcagggcgcagcgcttgcgtactcactgcttgatcatcatgttcacacgaaaggtccggacgcgccgccactgtttaaggccgcagtgtttatatgtgcggggataccgtatgagttggatgggaaggggcctgttagcctaccagagggtgagtatagggttaggattccgacggcgcattttgtgggcaggcaagatccgttatatgagcaggggttgaaactgttcgggctttgcgagccggggaaggcggaagtttatgatcatggagggaagcacatgattccatttgatgcggggaataatgataggatggtggagatcataaagagggctatagagagggccgggaaggaataattatgatccacatgtttgtgaaatatttatggcctaatcaaattcgtgcttagacagagctctatctcgtctgtagatcagaaccactataaatagaagtattgcgcccagagtggcgctgtgggagagcggcttccagcgtccagagggaggatcaagtcataagctacccccgttctcggccggaatcactctgtcaaggaacttctccaagtcctcaatctccaccgggtcggcggagtgtgagagatacctttcatcgttagcatcaaagtatatacccaggggaccgggactcacttgtatgagttaaaggtgacatcttccagtcccaattccttagccatctcggccgagcgcttgccaaactcatgcggcacaatatcatcttctgtgccgtgcgcaaggaagaatggcgtcttcttgttcgggaagttttccgggatatagttcttgatacggtcactgaggagcatgtagcatgaaaggccaaagacaccaccaagcttctcctgtccagttatacctgagaacagggacatggcgcctccctgcgagaaccctccgaggacgattcgtgacggcttgatgccttggtccatttgctctttaatcagggagttgaagtaatcgcgagacttaaggatgccggcttcatcttggttcttgacggcttcttggaaatcgagctgtattgctattctatcagctgctgtttgccatagaggggaatgagaagggaaggactcacatcacgaccgagtttggtgatgtcgtaccaaccaggcattgacattccgaagttctatccgaaaaatttcaggtcagcagcgtctcaacctcaagcctaggtctttgagccgtgaaaaaagcttgcgtcaaacgtaccactgtaatcggaatcatgggcgcatttgggaagatgaaggtcacttcttcaaacaagcctcgtcggcgccagttgtgggcgagagagaccctgttcgaccgtctcattagaactcgattcatgatttcaagcgccattcgtgaaggctctggcataccatcctgcaccgctattaaaaacaatcaatcagccactcgtttaccattttgggacggaaccaacctgtcgcccaagccatgggccattatcaccgtggcggtgtgtttttttagcgcggggacaatgaaaggcgcacgggacattttggcacgattgttttaattctaggtattctaaagggagaatgaggtggatgaagggctgaaagttggttagaacaggtgaacaccccatattctgccgtcggccgaggctcggatcactcaccgcctacataatttgtttactctgggaaggggtaacacactcaatcaccccgaaagatggtgtagttccttctcgagcgtatcaagcacaacctgcactgtatcttcctccaccacgccgggttgccacgagattcctagcgccaaacatccatctgcaccagtgacaagggagaactccatagcagcaccaatgacacttgcgctctgtgtgaagatgaccccacccatctgcgggatagaagtatcctcacaatcctccgtctttataacaccaagacttgacaactcaaacgtcaccggtcttggtttgccaatctttgattcgcacagatccttgcggtagtctttgacatatttgaagagcccaacagtcgtatttttgctctccaaagcaagttcttttgtgattgttcgccgcgcccgctgtgcttcgtcccatggaaaggtatcttgggttactgtctcgcgcgcgaatgtttcaggcatttcctgcacgtagacgcccattgattcatctgtgattgtgtccggaagccacgggcgctgggtgatcggtatgctacccacgacacgtgtgtactttccaggtatatgaggaaatatcgagcgcgcgattgctgtctcgacggtgcaggtgactgtcgtgctgtgctcgcggcaaactttaacaagtgccagggtctgagcggctgataggacaagaaatcgtacttgag

SEQ ID NO: 4571 - DNA, 1251 bp, Emericella nidulans
tcaaatgatccaagccgggtcaagaacgtggccatagataaggctgtgctggggcgatagtcgcagattttctccctaggcggtctgcggaggaagtttcagcgtcattgtcatccagttcccttgagcctcaattcgcttccctcgactcacgttctacttttatctctcttaggctctgttgctctattcttttttccctcccccatttcgttttgcttttaaggtataccctgacatatacgttttctggtccatttgtaataaaagacgcggtcgtccaactattatcccaacctcaccttccacacacgaagacaccacaatggatattgatatggatttggacctcggtcctctacctgaacccgagccaatcgagatggtaagctacagagaaagatgacaaaccattgagagctcaaactaatgttttgcgtataggagcaaacacttcaagcaaccacagccgttccagtagacggagcaatcatcgaccctcaaacagccgaggcacaatctgaaaaggtgcacatacgtggtgttgacgaattaacgacagacgatatcaaacaattcgcgtcgacacatttcccgctagaacaaccagcgcgtattgagtggattgacgatacctccgcaaacatagcctattcgacgcccgagattggattacaagctctgtctgctttaacacatgacggcgaactggaaggtggcatttctggggatgggacagccccaaccgcgccaggagagattcccgcactccggctgcggtcggcgaaggtgctggcctcgcatccagactctgttctacaggtgcgctcggcggtgaagacagataagaagaagcctcgcgcgcacgaggcgagtcggttctacatgatgcatccggaacatgacccgcgggagcgcttgcgacgtgaattggcttctgatcggcgtcgcggcgggggaggggacagtgatggggactatcggaggaggcgttttgacggacgagaactgcgtcgccgtcgggagcgcgataatgaggacggcattacggcgaacatgtacgatgacagtggtgcaggtgatgcagaccgatcggatggcgatcgagactgggatcgtgggaggcggaggagtgaacgtcgcgatcgcgagatggaattgttccctgatgagggcgcaaattcgggccggctgcgcaatcgcagtgcatctcctgggcgagatactctaagcaggagggcggatatgtgc

SEQ ID NO: 4572 - DNA, 2882 bp, Emericella nidulans
ctgcgaccagagattcgataatcggctcgacggaacacagagtcgcggctgcgttacagctgggtgcaattgggtcggtctgcgttgaatcaatagaacgagatgaaccgacgcaagtaaatatactccgcaggtccgtacacaaatatataaaggggctcaaggatgaaatcacgccttggtctgttggacggatcctcgtgaaaaagaagaatgtaggagtacaatccaccatgaaaaccatcccggcgtaacgcagcaaaagagccaagtctaagcagagccaggcgtccagcttacaggcaattataattggagtagaggcgcgcgataatcatcagttggctgagccatctctgaccatctcttcattggtgctgatcgctgcgtgtggtggctgggccagcctcgagccgcggactcagacgaggctgcactgacagaattagtgggagtgaggccgactgggagaatgtatgcagtacaggtgagacttttgccagacagggccaaagagattcggaggacctctatcttgtgcgaagacgccaggcattattgcttccccggattcttgaatccagaaggtctattgcatgatttgcatcagtgtacattttattacataatcttttctatccaggccgcattaggaaggattagcggcgcttagggaatatagggctgagcatggagtgtacagtccatactatagtactatcgattgaaccattatcggttcatgctcacacactcggggttcgccgtagggctgcatcataaacagcacgctcatgctgatgatactttgctgatccttagaactatatctaacgcgtgtcgggatgactacattgggttagcatggggacataacgtttataaaagccttctatatcatcagagtaccatcagggctcaaaataaatatgctgctgcagggtcgcgattaggtcgttgaggaaagggattgctcagagtcgattctgggtgatatgctcgaaagccatggtgctattctagatagagcaatcaattgcaacttctggcccgattaccgcataaaaccgacacagtaacttatcaaggactatatttagctctcagctgcgacaccggctatcagaggtaagcttagtgttaagcaactgccgcaacctcgtggcgccaaaatccaacgtggggttccaataaagatagtggcgaaaggcaattatcagcgccgaaccgcattaaccttccaacgagcactcactgtgctggtaaaccacgcgaacagccaacgatcccagctagactatgtgactactcataaactaaataaaagcagacgtcttttcaagcatgtcgtttctgccgttttcgacccgctattgctcagcgttctactggcttctgcaaccaaacagcatcgcaccagggcgggaggcagttaatccagatatggtgagttctaccaataatgagaatgaccggaagctggtctctactgaatgtcgatgagcttctacttgaagcattagctgtcatctgctctttcgatcttagcaacccattagaattgggttcatttggcccggcttcgtgtatactcattattccctgggaagagagtgctggcttagacttatttgcactcattccttttcagctagccgacatgtacgacttactcagacttacttagtactaggttttggaactatctgcgggagaatatcgctccctcattgaagggccggttttcatggttaccctatgtcaacatagaccacagaatccgcagatgatgcaggatttgccgttcatgtcactttcttctttgacaatgatcaactcttgtctatttatcaatgctcccgcttcgagtctcatagagcgggaaaccatgagatcagagctaggcacttgcaaaacctctctcacacatctttgatcccgtagataacctatatctagggataccctacaggtttccatagttggttgctccaagtttggcacggtaagcatacttgatatgccgtctaggttcacctccaaaacctctaatcgaaaatgcaccatccgctagacaccctagtcaatatagccgccagcagcgatggaagataatacaattttcacaacttttgcgctataccgagtaaaccgttcaggacaggacctgttcgcggttcaagaccttgcaaagcctggggatatgcaaatattacgtggcagaacagaacggttctggcagatataagtagctataaaactgggaaaatgacaagctacccagcctcaagtcgccggcctcggtttgatatcaagggctcatagctctcgctccataaatcgaaccgtcatccgcagctttttctggcgtctttgcagtccaggaccgccgagaagtttgcccggcacgaacactcctcgagtctcgatggaataattgttccaaatacatccttcgagcgaaaaggcacccagccagcatacctacgaaccgtaaaatgacagaagggtgcttttcagcgcaggagcctctcaatatgagtatatttcgtgatcatgttaaccaatgacccgcctcgtctgagcaatagactgacccggctatttgcagactccaacgcatcgcagatcatctcatatctctggctcgcactcacggtgaccacgcggtcattgcccagcctgtgcgtcaaacgcatacttcacacagccaattgactcttcgcatacatgaccaacgcgcccgtattcaggatgactgccttgagaatggctaggcagaaccctgactcagtgcccacccatctgcacggctagagtgtcaaagagagtctcgccacagcgagctctcaagccgaatgccgtccgcggctacgatagag

SEQ ID NO: 4573 - DNA, 4459 bp, Emericella nidulans
cagggtgcgaccttgccgagcgcgacaagcagccgaacctgcgccagttcatcgacctggaagcgctctttatggcctccaagggcgacgccagcacctcgacgggccattcgcccgttgtgatccggtattactcccccggctttccttgaccggaatcgaattcgcggctaaccgttgttaccaggcccgggttctatgcagagaatctgctgatctactccaaacaggcccaggaacagggcaagcttcctcttccggtcggcaagaacaacaagttcgccccgatcgctttaggtgtaaggttgagccgaatgcagtcgggacctgagctgacaggaccaaggacgtttcgcaagttgtcgcccatgtcttgaccggggaagggaagcacggattcagcgaccagcacagaggccaattgatggtcttgacgggtcccatgctcaccaccggcgatgagctggccaccgcggccagtaatgctctcggacaggagctgaagtttgaggatatttcggagtgcgttcgccttttgtgattttactctcccagacaaatttcgctaacacccgtacaggaaagaagcgctgaaagtcctccaggcgcagtccgacagtgacgagtcggagctccagtatctcttggaatattattccctcgtgcgagagggaaagaccaattacatctgtacgactgcgttccacgacgtgactggaggacacccacaagaaccagtcgactttttcaaggtttacgcggaatcgctacagccaaagcacaagagcaagcggcgcaagttgagcacgggcaagaaatagactgagatgtacaatcgaacataattctctacttcagataatatgaaatgtcatctataccgttgagaatcatagttgagcctctgccagcgattcggccgttatcagtcaacacgtttcctacgtacggagtatttcggttttcgatgccatttcccgggcagctacagctctgaaggctctggagcatctcttgtcctcttgatcagatccagggatcaccttgaagcatgtccagggtatatgggaggctagggtgatggcttattctttctatccatcgtgaaaatacagatatagaccccagccacgccaggttgtcgtaccaggttgatttagtctcaatctgtccagaaccagcaatgaaaaataataataaaaaagaataataatgctcaatgcgcattgaggaccctgtgctcccccgagagtatacccactggacttttacactcttggatagctttcgacatcaggagagtcttgacattagttaacttcaaaggcggccccttctctatggctgtacctgttttcccctcttttttttttttttttatttttttttaaaatttttcttctgtgtcccgggcccctgacgcgcaagtcatgctgttctaggaagctggatgcgagtttgatcaagacaagcatattggccctcgcatttgcacaccaaacattagacttgttaaaccacgggttggggcgggttttcaggcctagctgatccgcccacgcgggttttggggtgggttaccttcacagtaaaccgcccatgggtttagcaaataattctaacccaacctaaataacccaaaataacccagttatgcatatcattactctaatagacaatgatctacatagttaataaaatactgtatttaaatactgtattataactatctaagtaagaaaatataatctaaatacagtaatatacctattcagatatcttggcaacccagcgggttgctccgccgggctttggggcagccaaaaatatccaaaacccaatagataattagaaggtctaacccaacccatttcttggcgggtcggggcgggttggggcgggtttcgtgggttgggtttaacaagtctaccaaacatagacaaattagtcagcattgtagagtttctacgggaccacggtgcccaggttacagtgaactagctgtgtgctaacaatagttctacaagagattttctctttttctgagaaggcgttcgcgagatctagctttagtcgccacaagaaagagatagacgtaacctatttccacagtgaggggtggagaaaatgtcagcttggagaccttggatgcgaaagacactgcttgaactaaatcttgacagcacgagcgaaataggccaaggatcgccgaaccaaggtcacagtgcgccatggcagtcttgccaaacaactgcattttcacggatcgaggtggcattacggaaaacatgcactatatccacgctgctgtcgtcgatgccagcgggactctgctctactttgttggtaatccctcacgggttacactagcaagatctactgcaaaaccggcacaagcgctggccattctggaaacgggcgcgctagaccagtatggccttgacgatggcgacgttgccccgatgtgtgcctctcacagcagcgagcatgtacatgtcgcgcgggcgacagacatgctgcgcaaaatcgatgcccgcgagcaagacctgcaatgcgggggccacgcatctctctcggaaacggtcaatgcgggctggatcaaagccagcctggtaccctccgctatacacagcaactgctctggcaagcacgccggaatgatcggtggcgctaaggccctgaccacgcggagcgacgggtaccatctccccggacatccgatgcaggtcagggttcagcaggtcttctccgagctctcaggcctagacgcgcaagatatcgaatggggcattgacgggtgcaatttgcctgctccggcgctcccgctaatgaatcttgcgcgcgtctactgcggtctcgcagcgtccgctgagaaggccgccgtgtccagcgcggctccagcaccaaggagccaacacttgtcccgcatcttcggcgcaatggctcagaacccgcggctggttgccggtcaaggccggttctgcacagttcttatggaggcatacaagggcgttctcgtcggtaagctcggagcagatgggtgctacggcgtttctgtgcgggtgtcagaccaaacaattgcgcttggagcggagggcgcgattggcatcgcagtgaaggtggaggacggtaatattgggatactatattcggcggtggtggagatattgcagcagcttggtattgggacgacggcaacctgggaggttctggaagggtttcatcgcccaaggctcatcaacacagccggtatggtgaccgggtcgcttcatttttcattcagggtgcagagagcgtcttgagagggttgacgggacaatgcgctgggtgtatctctctgcagtatcttcatgagtcgaaaagttgttaataccatcatgaagatagaagtgactagtgtcgcgatgccgaaacccaaagcgaagcctggaagtagcaagctgagccgccaggcttactggcgattgtcgcaaccgttcaatgagatacctgtccgggttcattcttctgcggcatataaacggaaagaaatggcctctcaactttgggtagaggtgaaatattaacttgacgcacttccccggattgatagtcagtaatttggcgtcataaagtcgggaaagaagtcatggttctgtcagtcaggggagaagagactgaggttctagccaataaatctatattaacgcctcgctcaacccacaatacctcgctggatgaaggcgacttgtaggtaagcttaatatggtcacaattgaccttacctacacttattgaagaaagctacaggcgtccggaccattttccgtcatcttcagcgggtgagcagtgccactttgacgccgcgcgactaggtattcgagttgttcagtcaatgcactgttcatccgcgcataactagagttcagaacaaatgtagtgcttgatcggttggcaaagaatgacttgtaattcgtcataatgctgagctcattctcgcggggatgttctaagagatttaaccaaagccgccatttgcggcgcagctatacttatcctgtggttccaagtgtcgttcttttccgtatacaggatattatggtctcgcaatcctgtacggagtagtttataatattctttcgatgagtcccagttcgacgttattcccatctctgcttagtagctcatatgccgaccaagtcgaggccagccaccgagttgccatgcgactgtattcccccagccaactctctcggataaatctgcaccacttgcaaccctggttgtccatgcagccaatgcaatagcaaactgatcacatggcaccatctgttggcgagaatacatgggttagattcagcctgccgcattgtgagctgcgaaaactgaggcaaccaagctcacggtagaattagttagcagagccatagccctcgtctctgatcccaggctcgatatattttctctgacatttggctcc

SEQ ID NO: 4574 - DNA, 1490 bp, Emericella nidulans
gataacgcaaccccacatatacatccatggatataacagggaacatgataccgaaacgccatggacgacccgatacatacgaaccagaaagcaccaatcgtgcatcgagcataagatctggattaaagtgtgaccgaatatacacgtgaatcaagacaaaacatttcgactaaatcccaacagagagaagaacatcgaatgataacacggggtctattgagaccactccggcatgatcttcaaaacatatgtcttgactaggccagcacaataagaaacaggtagaggcatctctagtcatcgtatgacaagatcctgcttaatgttctgggcccgtatgttgagctggccatctagtaggcaggtaaccggtagatcaatctaggtaatgcgagttcagaagctacttcaaggctcccccttctgacctagcgtcccgatggtattctgaattgattaggtgtacctccaagattgacacacgtactaatttgcagatgtcgaaaagctggtcaatttagccttagctaaggacaagataccgcattgtaaacatagatatatatttggatacatgctatgccgaacaccctgttgaagtatacccaaaaaatacttacgttctgagctcgtctccggagagtcagaggtccgaacgcaaggcaacaagtctgagaccaaccgcgtggtgcggagcgcgtcaaattctggtgaatgaggttcatacacatcggtgaggaatatcctcagtgattctgacgaaggataatctgatcagagtatttcaataagctcgattctgccttttttttattttcgtaccccgccgcgctttatgggcttcatttcgtggtataaagggactcgagtatgacctaaccatcaacgtgttaggtgctctgttaccataagggctttgcgcgctagctagcaccctttggaagctgcccaagttaaccggagtgatcaggttagattgattttcgacgatcgaaggtggggttcctaaagagcctactgacgtccaggtgaagagagaaaaaaaaataaaaactgagtaacagcccgcttcccgtattctgcactgtggaggaatatgtggaaggagagttgagaccttcaccgttcatcaagtctgccttatcgactcgtgggtattcgaaccagtgtagctggtaaaggcatatcaatcgacacattatccttctcatcagcggtcgggtcctgtttagccacttgattcaacattgtcaacttagctacatggggcaacttcgtcagcaggctagagtaagttagagaggcttgaaacatactcgaggccatagtaattgctcgcaaaacatattccagttagcgaagacccatgccaagtctgtcaagtgaaaaacaccaaaagttcttcaaaaaggtaattaacatgtttaatcttagcaactaccttctggaccattttgagcgtttcaagtttggtttaaaaccacattttt

SEQ ID NO: 4575 - DNA, 2503 bp, Emericella nidulans
tattgttatgaggtaataaacggggagagagaatgacaaagagtgaggaatgagaagaaattgaagttaggagagacaaagggaaatttggagatttataggtatgggaaacaatgagttgaaaaagaggaaacaaatttggtggacccctttacaatagaccagttgagactggctaacccctattcgaggggtaagaagaatagaggggccgccccagcccaaaggttaacctcaggaaattaggtcttaaaaaggccgtacaaatagtaaggccacccccgcctacaatcccaggttttgtcaatcgattgtcccatcgttgttcaatcataaaccttttcattccactagaggctgcaggtcccatcaggcggcgtaaatgggtatatgccccttaggcccacaacctttgtaaagaagctagattcacgtccggaagtttggcttgaacaacgaccctttctccattctcccttgcgtcttatgttagctcggttatctcagcaatacatcggggattcaaaggattaagcccaggcgcggcagctccgcaagttccgacccgtctgattaatccccattcttcctctcgccctttctttatttcacattttctctcaactcgatctctccctattctaaaaactaacggctcgctcctatgcggtgacagtggcatttttcggcctttgcctggctctctcgctgtcccttgatagtctcggtacgatggcagtctccaatacgctagccgcccggggtggcgccctctctccgagccagacaacatcgcaaatggccacgaccacagttagtgtggggggaatgacatgcggcgcatgtacttctgccgttgagggcgctttcaacggcgtcaaaggtgccggtgaagtctccgtgagtttgatgatgagcagggccgccatccaccacgatcccactctcctccctccaggtaaagtcgccgagattattgaagactgcggctttgatgcgactgtgatctccaccgacagttcgtcgattccgtcgcggagcgccagcgatcatggagcatctgaggcgaatgtcgtgacaacaacactggccgttgcaggaatgacttgcggggcctgcacctctgcagtggaaagcgggctggcagagaaccccggtgtacgatccgtcaatgtctcgctgctatcagagcgagcggtgattgagcatgatctgtcgacggtctccgctgagcagcttgccgagatagtggaggatcgtggctttggcgcaagggtcttagaaacctcgacatcccgggctggtcctcgcggatccgagtctacggatccctcgtctcagtcaatgaccactaccgttgctatcgagggtatgacatgcggcgcatgtacgtcaagtgtacaggcggcgtttgacggcgtggaaggtgtgattcaattcaacatcagcttgctcgccgaacgagcaatcatcacccataatcctcaaatacttccatctcggaaaattgtcgagatcatcgaagatgccggcttcgatgccaaggtcgtttctgaggtccaggcgcttggtcagaagggcgggccgactcaggtcacgcttgacgttcatggcttacgagatgctaattctgctgcagccctggaggactccttaatgcaaaagccggggataatctcagcgtcagtaacacttgccacctctcggctggttgtctcgtacgacacctctatggtcgggatccgtacaattgttgccgtcattgaagctgctggctgcaatgctttactagcggattctgatgacaagaacacgcagctagagtctttggcgaagacgaaagaggtcttggagtggagacgcgccttcctgttctcactatcctcgccaatccatgtgttcgtgatagacatgattcttccgatgtacctaccaacgttcaattttggcggtatccgaatcattccgggtctttacctcggcgactccgtgtgtctattactcacaattcctgtgcaattcggtatcggtaaacgcttctacatcacaagctataagtccttacggcaccgtgccccaaccatggatgttctcgttatgcttggcacttcagcagccttcttctacagtgttttcaccatgattgtagccatcgttattgaccctcaccaaagacccaacactgtctttgacacaagtactatgctcatcaccttcataacccttggtcggtggcttgagaacagggccaagggtcaaacgtccgctgctctttctcggcttatgtccctcgcaccatcaatgacgaccatttacgatgacccgatagccgccgagaagatggtagaagaatgggataaagttgacggccaagagcaaaaaacggctacaaacgaaatgtccaccgtctcacaaaaaatcatccccactgaactcattgaagtgggcgacattgtcgttctccatcccggcgacaaggttcctgctgatggagttgtcattc

SEQ ID NO: 4576 - DNA, 1325 bp, Emericella nidulans
  unsure (1)..(1325): unsure at all n locations
cgtcctttggtagcgtcgagacatactctttgatgatttctgcgcagggataaatcgtaagaaagtccgggattagcgcgagaaggagcttggatcggttctccgggcggacaatgtcattttttggatcaagtagcgcacggcagtattccagagtacgggacggctcgaaatacatcttcaaggaaatgagcagtagatttttgggcaggaccgggtaggtctgcttcgtgctggtagccattttcgctgcaagtcgctaacagcccgtgtctcttcaatacggattttctgcctcactgtctatcgctgccaaaccagttcttgctggcttggtcagataaggagggtcgcggattatgctcgagaagtggcgacaccagaagaatgatggcgaaatgaatcgaatgttattgtacccagaccagaacagagcttgccaatcactgcagagtgtctattagtgaatgatccattctcgacggttaacaatctcattggcgactagcaaaaccactctgaaaagcgagagaatggagctgcactcggtggacttacctagtgagaggaaagacacacaaagatcgtcccacgcagcagcatgaacccatccaatcaggctaatgcccggactgttgtgtgccgctatgtcgatgagcgatgatagtctggagaagacgatccggggataaaatggagaacaatggggaggaaaaaagtggacaggcggggcgctctctcagggaccatcgacgtatttgaattgtcggacagtaggccagaaggccagaatgtccagcacggtgatgaagttggtcatgagactgatgacctcgagagttggtgcgattatggaagtgggtatggatccgctggatgaatgtggtatcccgggctgtgcctgagcagcaacagtctcctgagggtaccgggcaagctgaaaggagcctcccgagcttatggtaataccagcgtaaaattaccggaattatatgtatacataggataaagatactgttacggctggtaaaatacggcacggcgggggcaaccttgaacacggcggggcagcctcgattggcaggtggggtagctcgccgagcagaactgcctgggctccagagttgcagtcacagtggattactccataggtatcgggaatactagtgtcgctgctaatatagctctgcgatctatgcatctgccctggtacagcactccttgaattgggtggcgcggtgaagagaaaatggacaatgtgctacgggagtagctgtggccagagttaggattgcgaggccttcgtcataggcnagagagcgctt

SEQ ID NO: 4577 - DNA, 6128 bp, Emericella nidulans
tgacaagtatggtaataaaggaacagagatttactgtgtaatcgtatcggcggtatctcgctcaccttgattgttctacccatacctaatcgtcgagtgccggaaccgtactgtagtcttcgtagatccggccggagtgacggagtaactccccacatgtgattctccagtcggttgcagtcaagggatgatagtacataaatacgggagcatcaccactgcacagctctagagtattgccttctgttacgtttcatattcctcaattcatcattttgtctcaacctcatccagttcttctcaccgacgtaagtagcaggaatagccttgtcacgggctttccctgtttgtcccacccagctctaggcttacccctcattttacccctccactgaacagcagcctgagcttccaagtcccaattctttctccatcaatcgtctccaacttcaccatctcaataatcaacaacagttttatattgcttctccgagaaacatcgttctaatcataccctcctttagtaacaccccacctcgcctatttacattatggtcaaggctggtatgtcgacaacaaccccctccccaccgttctcttcaaatgagcgcaggatctaacgtatatagctgttcttggggcctccggaggcattggtcaggcatgcatacctaccttctcaacatctgtcgatatttgatgcaattctgaccgacgtttccagcctctatcccttttgctcaaggcatccccctttattgacgagctcgccctttacgatgttgtcaacacccccggtgttgccgctgacctctcccacatttcttctgttgctgtacgtcacgcctacatagaagcagtaatctaatggactaactcaaagacagaaaatctcaggttacctgcccaaggaagatggcctgaaaaacgccttgactggcactgacattgtcgttatcccagctggaattcctcgtcagtacaatatgatttattggtctatatctccacaatattagtggcactaatgttgtctggtttttaggtaagcctggtatgactcgtgatgaccttttcaagatcaacgctggcattgtccgtgaccttgtcaagggcattgccgaatacagccccaaggctttcatcttgatcatttcaaaccccgtcaactccaccgtacccattgctgccgaaatcctcaaagccgctggcgtctttgacccggcgcgtctctttggcgttacaactttagatgttgtccgcgcagaaaccttcacccaggagttctccggccagaaggacccatccgcagtgactgtccctgttgttggtggtcactccggcgaaactattgtccccctcttcagcaaggtttctcctgccttccagattccggcagacaaatacgatgcgcttgtcaaccgtgggtattcctgtaaaagtctaagcaataatgttacgtcttactgatcttcgtataggcgtccagttcggtggcgacgaggtcgtcaaagccaaggacggcgccggctctgccaccctttccatggctttcgctggcttcaggtctggcatcctgtgtgttttgggccgccgcttttaatgctaactcctatacaggtttgcagagagcgtgatcaaagcctccaagggccagtctggcattgtcgagccaagctacgtctacctaccaggtgtgcctggtggcgcggatattgccaaggctaccggcgttaactttttctcgactcctgtcgaacttggagtgagtatttggaattgaggtccctaggtgtctgaattaatgctaacaacacaatagccgaatggtgttcaaaaggccataaacattctcgacggtattacagatgctgagaaaaagctccttgatacggctatcaagggtctcaagggcaacattgacaagggcgtcgaattcgctcagagtcccccaccaaagtaaacacgcccttccccgtcctcaattcaaggctcccattcatcggtcggtcatttatgcagctcgcattcctgctccgactgagacgtacctgtagcggtcctccgagacttgctgtccctgaagaagcttcgctaatcgctggtattcgaaaaagataggctttgaatcatttaaatgatatacggcgaacgttgaggagggccgtaaaaatgtttcggttagtctgcagctcgtatgataggaacaaaacagcagaatcaatgtcttcctaaaccgcataagtcgtgtagagctctgcccagttgttttaatggtagttgaagcagcctccagtcgctaccagacggtccccaaaggtttgaagccggcacgcaacatagataacagtgttccctatttgttgattgtctttacctggaaggtggccccaggaagttccgtggtttccgcctggacagtcgtatgaatgcccaagtttgataatgcaccacgaatgacaccacaaggaaaccagagatactatttcagattagactaactcaacatgaatgcatgggtttcttaccgcttgcgccctggatagtgcctcgttccttgaggacatgctcattttcgcgaaaggacggaaggaattgtctgtcaaaacataaaccccctaaattgaaatctcaatgtcagctagagacctcaaaaagtaggccagctctcaagtagcacttacgcgatgatttgtttttaaattatcgatttgcttcttgaacaatgtcatccataagtccttgcacaggaatttgatgacatccaagttatctgtgaatcgcggtcgatcccgggagaacctgccgtaatgcaaaatgtgctcattagcatgtaagatcttctaggcatggtttcttctatattggtttccagcagcgaaacctgaaagagtttgaaactactgtgtgcgcacctttccgcaagaccttgcccgactctatagcccagggactcgaggcgggaaaacgccgtttctttcgtttcttcgtcgtccagtaatctttcatctgctgcgagatctttcgctattcgttctgccatcgggaccagctcgatgaggaggaaatctagacatgatgcgctgaggagtcggtcttgggagttggacgggattgggtggatgccggccgcatcgaatgacatgattgcgggcgtttcagggattggcacggacttattgatgatagacgaaatgaggaaagatggaggtctgtttaagagccttattagctattggggctatattatgcggaaattgtgtaggtgacaacggttgattaagccggtatggatttgttttgcgggccggcgcttctctcctaaggagtagacatatcagcacgtcagaagaccacctactttagcacataactatgaatcatgtctatagaatttggttcatccttttgagttaatttatattactcttatcttatgcagggcacagtgaattgtacgtccacggggtcagtggcacagtcttctgctaaaatgtttaacctgtttcctgttgaacgccaaaatggcctataatgcaaatgcactcctattccccccgcccaagaaaaaccacacgccataacgccgggaaagatgcaccgctagataaatcgtgcatgggacggccgtcttaaggattattctgagccaaaggtcggaagaggatacccgcccgtgtatgagctgcggggatcctgtttgggcaatggccgatgcaaatgaactgcctgtcttttcggtggccttattggggagtcgtcatcgtcgtcactacccgtaaggtcaatgacaggcgctggtcgtttgctgctcgaccacgctgaggactgctctcgcgaggtagctggtgtctgccgccacaaatccagcgaagataggttctcttgttttacaggtgtaactccaggttctctaatctcaaccaattcgtcgtcgtcggttgcaggtgtaaaggtgcctggtccagtcgctaccgcctcatccttgggggttgaccattgcccgttaggttctataattacctgctcaacgtcgagcggcgttgagcggagtatatcgtccacgtatctagaaggtaagaacagcgtcaatacaaagaagggatgttgggagcttactggtcaacatttagggactcatagctcgttgcctttgcgcaaaccggacaagaccatgttggtgcttgttcttgcagttggagaaacgacgatgcgtcaaagcactgattatgcgtgcataacacagagcgacatggcacctctattcgtcgagtcgagagcggacactttagcgacatcacggtcgacgtagcaacgatatctgcatcttcggctttgcttttcactgaaggagtcagcattttttcgtcctttagatagttacgcgtactttcttggagcacctgctccctcgtaattgttttcctccgtttcagtttatccacaagttcttcgatagccgtacactcaaccagattggctacaatgaagaacctctgaatcgaagttagtaaaattgacctttttttttagaacaggactttgtttgcttactttctgggttagagcgtacgtcatcacaacgtgatttgtataaccagctttttttcgaatataatttgtgatatctgctggtcttgtagtaccgggtttattcttgagacccctaagattagccttcacctcatctagatttgccttgagttcgacttgatgaggaaacgcaatatcagacttggtgaactgattgagtccagaatccgcggcgcagaatatcatgacgcgtagctttggttctgcaagtagcctggatgccacatccgcgtcgaggtgaatcttcagctctacgctatctctagtatgttcacgtgctgatttcggctattagggtcacatcccataactccgaaggatattctcacctttgcattctatagtaggtgtgagctgacgtattatcctataaaacggactgtccttgaatatgagcggccctagagatcatgagatacaagccctaaaagcgctgtagaatatcataccaggtacggacccatgcgaggctacgggcattcctaggggtgactgtctgtggtgtgattgtactgaatgagtggttggaatttgttgataatagttgcctggcactggtggcggtattgagggcgacggaggcattgaccgatgtgcagtggcataaataaatttcctgagactgtcataacgcccaaggcgcccagcttggaagtgtccctcgagggctggaatcgttagcatcgtgattgcagttattgccatagagagggatgtacaaaccattgatgatccgcacttggagtgcagctttcaacccagacaccgccagcccttcatcccttaaaatgtctttcagttgcgcattggtcagggtcttgaccaaagcaatcacactttggagctcggatgtttggtcaaaggccatcgtggcgacggatgtgcctgaataagcgctgaaggctggatgtatattaaagcgcggagttcgggcaagtatacttcaatattaaaggctccttctgatcagatcccttaagagacatttcaattcgcgacctataaatgagaagggtgtgatgttgattagaacaatgccgccgcggtcacttcaagttgctggcgagtctggaactccagcaactgggttgggtgcggaggtgagaggcggctccgactcggatgacataagactgtgaactagataattgaatcgaaaacttttctcaagcgataaaacctcggcgacgaaaactcatactcaacctattcatttgctctagccccgcacatctacaatcataatggcgaaaagtgttcgtgccagtgttcagaagcgcaacaaagcaaagcttcgctctacagtttttggccctgctgtggatgcccgcaccgaaagattgtccgcaaagctgcaagagcttgctgctcaacctaaacctagagctcaggaaaattccaatacagtcaccgaggctacgaatatcggtatgtggccagttaaggctgtaagggaaaattggctctaattaacaacatttagttacggaggacgagagtaaaacaaacccgtccgagaatagtgaaggtgatag

SEQ ID NO: 4578 - DNA, 1428 bp, Emericella nidulans
gaccctgaagtctgttgcgctgctcatttggtcttcgatccataaaatagcaagtgactgaatcaacacgtgaccttctcagagtgtgctataaggtcagcttttatccaggtggccaagggacggatcataattatacgctgtacctgttcctgaaccagagtgctctgtgagtggtacctggatgacatccagcctttcatgctatcacgtgcgacggctacatgtgactgaggggttgacgagacattgtatgcggcaagcacgttcacttggttacctccaccgcttagaaatcaaggatgcttatcccagtataaaaaggctggcttccatatctctttaagccttcgtttctgagtaccagattatccacaacatgtcttccgacctctttcccggcttctcttctcagtacgtcaccaccgctcacggtgcccgcatctttgtccgcgtcagcccaacgcaggacaaacctcctcttctcctcgtccatgggttcccccagacccatgctgaatggcacaaattgacgccgctgctcactccgcattttaccgtcgttcttgttgaccttcgtggctacggggcctcctccattcccgccagtgccaatggctctggctataccaaacgcctcatgggccaggattgcctgtcagtgatggaccagctcgggtacgcgaatcagagattcgcagttgtgggacatgatcgaggagctcgcgtcgcctaccgccttgcctttgataaccccgagcggctgtcgaaggtcgtagttgtcgatattgttccgacggcggctatgtttgcacggttcgggaaccccactgcggggctaaaggcgtaccactggttgttccttgcgcagcccgaaccgttccccgagaagatgattggcaaggaggataagggaaggctgttccttgagcaggcactgtcttcctggacggcggcggggacgttgcaggctttcagcgaaacagcgatggagcggtaccgggaggcgtattgcgatgagcagcggatccatgcgacatgcgaggattaccgggcgggcgcttacttcgaccgggtttatgatgaagaagacctcaagaagggcaataagatccgggtcccggtgctggctgtttggggggaggagggcgggttcacggggccgaagaagagtgaagccaagaaggtgcaggaggggccgttggacgtctggcagcggtactgtgtggatctacggggcaaagggctaaactgcgggcattttatccctgaagaggatccccaggcgctggctgatgaaattctgcaattcctattatgaggtcgttgtggaaggtgcactcttcttttcactaattttacagacaatgggggttctgagagggagcagaaaggctatctcggtaagcacggaacacatagctctga

SEQ ID NO: 4579 - DNA, 610 bp, Emericella nidulans
aacatactacatgacatcgacattatgccaatgatttcccgatattactctacatgcatattgacgtactctacgactacgtttattatatgctcttataaccgtggtcttgatatcgagagtgctgatccataactgaatcaataaatcttcttgtcttgccgtttcacccataaagctaggtgtgagccactggatctcgcttatccaatcataaaatagtaaggacagcaagctggcattctggtgatgttatagatgtacgattgtcggtagatcgatgctatgatgacgctccaaggatttgaggaggttatataggattagtacttgctggaaacatataaattaaggagtgattcgaacccctttcagctcgtacaattaatttgtcaaacaccctacgagcagataactggctttaagaccatatcccatcaccgaacattgagcagcttcctgtaagtgctggacacaactcgggattcaacccaagaccattgtcatatgtatagattgcacgtgaccgacataaaagaaagtatcgaacctcccactcagccaaaaaaggctaacccccttggagagctagttctgctaatatcttgtt

SEQ ID NO: 4580 - DNA, 2069 bp, Emericella nidulans
ctttccgccatcaaagtgggatccggcacaattgagtctgtctgctctcgacgacaagttgagaaaggcagctatgaatagtatgctgggtgcccttggagaaccgtagggctccattaaccagttgacaaggctgaactcatctgttcgcgacagtgccaccaggtccagactgcgtctagtagcccatgcctgcgggggataaggaatatggaaaggatcatcccattctgaagttcgtggacgtgatgctacgtaggttcgctaccaagtccttcgtctcgccgtctacaatcttgccgccttgcaaatcttatcttcaactgggcatttcgccgagtacagtctttgagtctgacttaaggacgaaccggcatacatctaatctttggctcccgtaggttgacggtgatgaaatcgttcaacgaatcttctagacgtgcaaatgcgtcaattgaattggattattaccaatctttcgccatctgagaaggaaaaacatgctgaagaaggatgaaaccccttaaccaattcaggtcctgcggtttgcatggagaccagtccgtgacagcagtgttcctggctggtagatgatctcgtcggagtaaagtggcccagagtgctgatcgccggaataggcagtcccgcgctcccagacttggcaccccaagctttccgccatcattcgtcttttttccaaaggatgaagaatatgatgagtggtgatgtgtgatatgtgctctggtccgtggacggcccggctcgcaacttccatatgagaagtgcccctgcaggaacgaattgtggcgaggatgtagatggcccagattaatgtgtttcaagcacgacgatcgaggcctggaactttgccgaattaaacgtgacgtgcagcgtttcacatatcaggacaagcactcttagcgctggtattcgtcattcgccgaagatccttccccacacgggcacgggttgcctgccctgccaggtccctcgaacagccgtgcgcgcacgagtgttccgcggagtctgctgccctcttgacttgatcccgttgtcggcggcatggcgaaaaattgagcaacggaagaataacgccggacaatactggaggtcccagtggaagtaccgcattgtcagccctggccaaaatctaatcaatatcacggacggcttgaagtagtgatcagccctgctgggtcctatcagggcttaggatggtctggtacggcgggttaaattcgggcagagcatgccacggccattctatccattaggggtaattcaaagactttggatagtgtaaatccaccacagttgtttgcgcacatggcgtcgtcccagacaggaaccgattccccccacgtctcgggctgtcggtcaaaagagcacgccatgcggttcaggactcgaccgccgttcagactcagaatgagctaatttgtggtttcagtttcaccagcatccaagcttaagtgcttattccgacctcgggattccaggtggataaccgttttgagtttccgtcccttgcgctagtgcctggcctgtttctagtccgtcccagctcctgtatccaaaagctataaagagtgctgccatcgcatctgttccgtcgaccggccaaacactcactcacttccaacttcactcacttgactgaatctggtattcgtcatctacaacgcctgtctttcccttcgtttactatacaacgttccaacccattcttttccctttttcaaaatgagatactctcttgttgcatctgctggcatcctgggctgcgcccttgcccttcctgctcctcagatctctcctttccccggttccggcggcagcgagggtggtgagggcggcgatgcccctacgcctaccggtgccgttccatctggcttccctggtggtgacttcggcggcttcccggtgccttctggcggtgccactcccagaggcttaccccgctttcacggtttccctggccgttccaacggacagggtcctttttccgtctggcttccccagctttccgggctttcttgtaggtgcttttcctttgcttacccggcctt

SEQ ID NO: 4581 - DNA, 1528 bp, Emericella nidulans
agttcccatttcctcaatatcccattatataaaaattattaaaatatatatactttagttgttgaggatagctttaaaatatctagatatattattattacttaagctgcacagcttgcttgtatatatagattacttatagattatattatcttgttctaagtttaattctatacttagactagactatatctaatttagctcctctctactaagattaaccttgaacttggataactttattatttataattttggtagttttctataattaaattagtagaaattatagtattttcctagctctataatatataggtagataatttataaattttattagtattttattttgaaatttatagtagaaatatattagtctggtaataagtagattatataagtttttaaaaggtaaataaataatagctgtttattatctcttaaaatcctatttttataatccttatatttcttttttttgttcaatgctatttttataatattttcttatttttatatactaaattataagtactacaaaactatttttattacttattaagttcttagtatacagattctatctatattatatttatatccaacttaaaaatattttcaaatatctatttacctggtctattaaatacaagaaagaatataaatattattattattagccatagtagctagattctaaaatatcctatttaattaaaactaatataatattgctaccctaagatttcggttaaatataaatatactatttttaagaagtttactagaaaaaaaaattattaaaaatgataggccaggccagattagtctagaattttatttaaatctaacttaggtatactataactctactaaattgtcacgggccagcccgagcctcatcctgagccttgattctgccgccgctgaccgcccggttagctgagatttctggagctccgactctgaaccaaatcggaacctcgagctacgtctttgtcttgtctatgcacctgtctgatagcctgactctgtagcctgcctgttgtatctactccgttatcctgttctgaatatactcctgcgcctgtaccttgacataaataagatttatattttataaatattgttttgaaggttattactagattctggcatatatttatagaaacccctaagattattaagtagattaatttagaagattaacagataaaaatactactaaaaaaatatagagaaattaattctttaaaattatttatttataatattaatttaaaagatgcaaggagattaatcagatcttgtcttagtatatcaatcaaatagaatattcatagttgtaggcctgattccttgaatatatgttagttttattatttatatgaatcttaagtgtagacctgatagtaagctaagatccaaatctctattatattaatagagggttaaaattatgatccttacctaggacctttataagagaagattatatagctgttgttatatttaagatattata

SEQ ID NO: 4582 - DNA, 1787 bp, Emericella nidulans
gactgataggcacggccacgtccctagagaagaaaatacatttcaagcgggatacagagagatcgaatagagttggtgaggaggggagaagaggagtacaaataatgatgaaccacaaaaagactgccgcaccagacgatctcgtggcccacgacagggccaaccactctgaggcgccgctgttgtgctgtggtgggcctattacaggttagccgtcggcgttgacaggacaacatggggtcctatgcctgaatgtgcctgaggctgtccgcagcaccataacaattatgtaatcaggcccctctccaccacaacagtaaaatacccagttatctccactgtttatttattactctctcccgacctcgggtgctaacctacctgatacagagcaagaatctcaatagccgtttcaaggatatattacgaatccttttgagcgtaacatactgaaacctgcacatattctgcgttaagcaatggcctgccgccggtctcagtgacggcggctagtctgtcctaacggtcgaattcatactacataggccacgcccgctccaccgggttgaagaagatctggtcccaaatcccagttccaactggaagatcctcctcatccagagtgcccgttatggtcctcgtaaattgttgggaataccgtccgtctgccaggaccagatatatatattgcgcatatacaaccaactggccctgcggaagactagcgctggacctgtaccctgttgttgggtcggtcgacgttgtaggaggatacgtggagttatctccgtatggcctcacctagatagctgccggctcgcagtttgccgctagaattgcgccatttctggacccatctccttcaacggtgatgactgcatctccagcagacagggcaataggattttcaatggtactgttcggccaggaaagggtaatttagactatatcaccactcggcaagccgtttgggaaactgctctgtcaagacctccgagccgagattgtagaaggtgatgacgatatgagcctgggactgcccgccatcctccgtgggaaccggctgctggatggcatcaaaccaccaccagtcataagtggtcgcgttgatggggtgaaccttgggagcgtcgaagccatcgcggccggacgtgtactgggtgacagcggtggcattctcatttcggcaagctggaacgacgaatttctgtggctgaggccgagaaaagacattcgcgaaaagcaaagccaggttagagggtcgaaagagctcgaaagacatcatacaagtcgtccgagtgggcaagatgggcatctcactggaatccttcttgggcagcgttataacccaatatcgaattgttatagatcgccgctcgacatcatagccagatctcttcgatattgctgatatactccagagtagatccaatacggagtaagctgtagatgagtaaaaagcaataactgtttgctttgcaccagatactccggcttagtcggctgcagcgctccctgcatggtgatgcgatgaactggcatgagaagcagcaaaagaacgcaaataacagaagagactttatactttgttactgcacccgctcccattttgtcatctactgcatcaatcacatctcgcaagtggaggaatccaccgttttggagtaaacccgacatgcttgccccctgcgtttctccagagctgatcaactaaattctccttagagcagtcccttctcttcgactaccatcagagccctaagacgtcgagaccatttctctgagac

SEQ ID NO: 4583 - DNA, 3159 bp, Emericella nidulans
  unsure (1)..(3159): unsure at all n locations
cctgtaattgctagttagcggtgttagccttggtagttaggtcgagcgatactcatcagcccctgactttcgtatataggcactaatgccactggcttggtaatgtaatgtcagctgtctgtctagttcctatatatttactcccccatgcaatcgacatgacggatcttcgttcaagatcggctatgttgttggtatctacctcccgaagtctcggtagtccaaaaatgtagggccgtaattttttgtttgattcatcaatcgaactccatacttcataatgaaatgacattgtaatgcccaggtagtatcttccgcccgccagtattgcagcctggacgagcgaacgggcgctccctatcttgaagtaatcatcagcaaataaaatattagaatacagagcaccttagtgagttaaagtgtcgtagtatcattcaaatattccaacccaaagtcatccccatatacttcttgatctcaaccggcggaggtagccttggccgcctgactccacgctcacccctgataggccagcacttttccgagggttccgccttccaaaccctgtcccgacgcactaaaatgaattttgcactgcaccacaatttctggacgaccaaagcgggcatctgacaacgacatcgtatcctcccctcgtccacgcttcctcgttcaatttcagaaatccagctctccggaatcctacctgccaaaagggatgcttccaagacccctactaagctggtgaaggtgacccgtgtccttggccgcaccggtatgcataccaatccttattcgatcgatcgatcgatcaatgaatatatcgaaatctcttgctgggtggtcagcggcggcagatatattagagcgccgctggactgcgacagggctaaagggatgtgccgttcttggagatatggaggctaataggagtcttgatgataggttctcgcggtggtgtcacccaggtgcgcgtcgagttcatggatgatcagacccgttctatcatccgtaacgtcaagggacccggtacgtttatagtgtgatatcgcgacatgcagagccctccaatcaaacccatccggcaaagcgagacattaaactatgcgaggggagtactaactaggatcgtttcattcagtccgtgtcgacgacattctctgcctgctcgagtccgaacgtgaggcccgccgtctccgataaatgcattgaacgtgaaaacgacgtgggaggcatcaaaaatggaagcatgaagaacgagttcgggatcgggttctggttggttcgactgtgttcggatacgtgccatatcgatggaaatcgcggcgccgtggataatgaattcatgatggagccattcggacctctcatttctgcttgctagaaatccaggaattttacgagaatcacatcctgattttcttcttcaatgtttccaccttggatacttccgcgacggtggtgattttccagtacgctcgccatttcaataacgacgacaatagtcctggcatgacgtcgatcttcatcgttcggggatgtttccgtttcaccgtccgcacaaaatggtagaacatttcttctggataatccgagaatataaatgagcggcaaatcccctccgatttatacctcccggtgttcattttccatggccagaccctgcgcgcccacgaagaacccgaatacgttgttatgtttccctttttacgcattcactctcgaccgtcccacgccgctgtccaccactattagtagaagctcacccatgatatggtttgtaagctggtcagagtagagaactcccataacccacacccctccccgtaaaccgcccgcaagtaacagtttaactacatctacaaacagccggcccaccacgggttgatgatcgcaggcctcagggacatgaatctatactggatannttatgaagattttgttgcaccgcagttatacctaaggcaagacggcgaagatctaaatccttgcactatggaaaataacttgttcacaactgaagaattcggagcaaagggtctctccatttgaagaacaaaaaagggatatcatattgtacaacaatcacctaaaccaggcaacaacaacatcacattttcaacgcatcacaaaacaaatggggtacttaggtgttagtcgcggaaaataagcgcatggccagaaaggaaagaggcgcgtcgacaaaagaaaacaaaaggaaagagagggcgtcaagtcatcactcgtactagattaaatcggccgattcactgagcaatctatatcgttgctatatccgccggtccagtctaataaaccggccttgacctattatgcatccgagtggaagtgcgccttctccgtccgacgtagccgcaagtaaggcaggaaacgaggacgccaaggaccgagacgatgccgttaatgacgaccttgatgccagttgcgattgcgttgatgacgcccatgatgcatgctccaatggagcggaagaggtctctgatctgtggagctgtcagaaggcgcgggtctaatagcaggtagggattaaagtaggaagagctgaacgtacacaagaaaagacggcgcccattttgtaaagtgtattggtagtggtttatttctttttggtaagcttgaggactttagaactggaagaggattgagagttgttcgtagagttgttattgttcgcgttcgaagaggttgagtagcttgaggatgcagtggtatgtgtggagatatcgctgaatggtttcattgttcctgaacacttcgaggtatgtatagatttggtctaggaaggaaccctaccttgagagactcgcgaaaatggtaggtaatgacgttgatgacctcaaccagccagaatgataaggcaagggtaggagcggacaggtgtgactgagacaaggatatagtggaaatgacgtccgactggaagtcacgcagtggcaggggggaacaaatgaaaatgataggttccgtctgcaaaaaaagatgagagagttgctgttcctcatccctgaactgcccaagtcttgactgttggaagcaattccgtcatagcgacgacttcagtccggccctaaaagcctctgaccgaatcatccagggtcttgtggaaaccccgcaacatggcatgctgtcagttccggg

SEQ ID NO: 4584 - DNA, 1841 bp, Emericella nidulans
ccaacggggtacgcgcagagccaaagatggtgatgatagaatacactttatatttgacgttgcgtcgcaatctctctgggggatgttttgtggctaaggattttgactgccagcgacccaagaaaaggtcaaactcgaatccaaactcctgtattggaaggataacgaagaagtatccaacaattagcagcgactgggatgatggcttcttgctcgctggcttggtcgataaaggcgccccagcgccggacgggataccaaggcttacatcaacgcatgagcctatatcctccaacttcttgtcgtcatctaccatattatccgcgactttcatggaggagatcgcgtggactgtgttctcagtgatccatttagcgaatctgccccagaccgcagcaactttgttcacattgaaggccatgatagctaagggtaagacaatagcagccgatacggagacttcaaaataatgagcttcatagatcagatgacttttaaagattgaaactcacacatgatactcgacacgaaatttagatgtaatccgtcaggctgttttgggaactctacaatgtcgattgcgaaaaatgctgccatgaatgaaaggggcaacttccgattgttaggtgtatgttttgtgatgtagttgaagaaatgtgcttacaaaaatgatagtgaccagcgtgaataccagaagggtatccccttgctttgcggtgtcatcggcctgtcttcgtgaggatcgagcttcctgtacgtttgcatgcttttgtttcaagtccagaaggtgattgagctgcaacaagtcaggagaaggagctacagtacgagaatgggagcgtaccgcgttgtatgtgtcctttgcatgctcgtccatttttttgacatcggccatgtattgctctaatattcgctttggccgcgagttatcaaggcgcaggattttctcaaaatctctgattactttttcttgatcgcgaaataggaccattaatgtatggagttcgtctcgtatatccttgatcttctcaagcagtttcacatctgtaagtatgtctagaggatcgtacttgcgcggacccttcatgatactttcatcttcagcaacttgatcgcaaaactgccggaaacgttgggtctcgtcgttcgtctttgtgaatgtcagtttgctaaagggaggttattagggtgggtgggaaaacttgccacctgcccaattgcaccttcgtaaaactcctggaattgaagttcaggcctagtgttgataatcggatctaggcaggatgtcaggcacttgcagataatactttcagccagctggtggggctctttaatttgagaacggtcttgaataatattctctagaacatccgtagtatcaagagcagaaggcacctctttgccttttcctttgctccatctctctgggaagcttgtaaccactatatctaagccatgggttagcggcaagagctaatgtgacacgagaagacaaggcttctgactcttctcaagcacccatagccagagttggtcgacgacaatcagcacgggttcaccatccaacatgttgtcctgaaacatgcgactaacgagctggtccctgtcgcgatctttagtgctctcaagtgcgtggtagtaatactggtcaaggctacggcgaatgtgtaactgatcaaccagacgtcgctctactttaatctcactctgttcgctatcattagcgtctggctgcgtcatgtacaccctcataagatgttggtgttttccgttagcgcaggcgcgtacttctagaggcatgcgcgaccttctgcgcgtaatcgtgcatcttctggaatgtg

SEQ ID NO: 4585 - DNA, 3472 bp, Emericella nidulans
acacctccctcctcgtggacgaaagtatcgcatgcagatcccttccaccgagctttgttcgtttgagagttcaacggcgtcacaaacgccccaacttccgtcagctcttcacgcgcaacgttctgttgacgctcctcgttcagttcctcctggccttccacacgagcgccttcaacttaatgaccttcaccttcctcccaagcccgcgcgccccaaatttcagccacatggatttcttccgttttggtggcggcctcggtcttacttcctcacgggttggtcttgcaacagcaatcattggcatcatcggtctcccgctccagatctttatttacccgcgcattcagtcgaggctgggtacactgacctttttctgcacattcctcccattctcaccactttcatatgcgctcatgcccttccttgtcttggtcccaagctacccctacctcagtttggccggcattcacgcttgttgtggctctacaagtagtgtcaaggacttttgcgcttcccgcggctgttatcctagtcaataacagtgtgacggacgcgtctatcctgggaaccgttaatggagtcgcaacgagtatatctagtgcagcaaggacgctgggtccgctacttggggggtggggactgggcttaggtctgaagtatgaccttgtcggtggggtttggtgggcgttggcggttgaagcgctgctcggttgggtcttacttgggtcaatctatgaaggtaaggggatcgacaggacgaaggatcttattattgagagggaggaaggtgagcaagggcaggaaaggaggtgaggtgagacatggtgtgctacagactgaagaactaggtgtcaggcggttaccacctatggtacaataggaccatgttaagtttgacatatgaaataggaatggtttagacatagcaacgctttgtatatacgagaaatgatcatgatttatgacacaagaaagagctttgctcaatcaaatatcagttagaacgaagaactaactcatagctcttcatttaccagctccgtagtataagaatgaaccaaacaccagactcaaagccaagcccgttgactctctcaacccaatgagacaactccagtgaaagtatggcagtactgtataccaaacgacctactcccagcaacccaagaagcccaagcaaatgcaacataaacctaggccacagcagttgctggcctaataaacgcccggattgccttccttgaatccccctcatgcgctttcaaaagctccgtcgctttgattttactaaggtctagctcattcatctggggaagtaagccaatcagcttccttccaattccaaccttttcagcaatataagccacaggagaacataccaacaaagacacatcgtcccccgagacctttacagccgcaacagcagcagccttcttcttagcttcacttgtcttacttccaccctcgcccttcccctttgaaccagcatggctctttgtaccctctgccgcaatctccaaccgactcatcgccttacccagcgcctcctgatctgctgaggacggctgcttggtttctgacgctgcggtttcggaggtgatttctgtggtgtttaaggaggagagggcggcggcggctttgcgatcttcagcggccgctgaggctgaagggagttcggaggtggtggttgtcgtggcggaggggatggggtctgacatattggttcggttattctgtgttcggaacggatgggatgagatgagatgagatggttgctttgctgagttgggcagggttagtcgcggttaataaacggtggtgacggttagtaaataatgatgaggttgagtactgcatttgttgtgaggttggaatgaggagatagatgcggggagatacaggtatggatgatctgccgatattgtgatgtcatcaggtggtcgaatttcatagaagggcataaactatttatcgggtgcctgagaataacggatttgattcctgcgttttttctccattttccaggatcttccgagctccctttaaaaagtcggaggccgaggttagctggcgtgtttgaacttcctcatcgattaattgggtattatctagctaacactaatagagacgattgaagacaaatgtctctttagggcacattatacagcataaatcttcgtaatcagccatcccagacatagatagtaaaacaacctgggtaatctagagccccaaccccctaaccagcaaccacagcacaaccggcacaacgacattatcattgcaccccgtcaagaccgcctccgttgcactagctccaccagccgcaaggatggcctttaccaatgccccagaccaggaaaacggctttggtccatcgaatccaccaataggccactgtcctagcacaagccagccctgagcaaacagcaatccgaacgtcactgcaatcgcaaaggcgacactgccctcaacggacttgccaccgccccaaaaccacttgcggcggccgaagcgcctgcccatgagggaagcggctgcgtctccaagtccaacgcaaatgatgccgctgagcatgcttgcatcgcgagtctggacgttccatgatttccaggggtagtcacctgtacgggagatatcggcaagggtgagccagagtggaatggcactccctatgagaaggaatatgtgcgagacgatgacagggccacggtagtcgcggccatcaacgtagggttcgaggaaataggtcaatggccgagagatcggcgggagctgggaagcgcggaaaaggtccagtagtaggaagatcgctaagaccagggccatagccagggcgcagaatgctgggtcgatgtaaattgttgggaggaacattagcaccatcgtaccatgaaagactttgcgccttgtgtcgacttctacaaaggtgcccaaccggatgactgttgcaataccggtcacaagtacagctaggcagtacgcaatgattatgagacgcatactagcctccccaagggcgctttggcggatatgctctacccgaccgagatggcagaaagcattcgataaactagcatcaacccgaggaggtatcgggatccatcgctccaggctcgaggttatgacccaaaacctgaaccaagatacattcccaagtaagtatcccagtgcccagccaaagggatcctccccttgtaatgctcgctcaccaacgtactttcgcaccggcccgagaatgacggctaagacggccaagtaaacgtagaaagcataaagccacttgcggacttggacttgggggacagtcatcgtaaggaagggcgccaaatcaggcgccattgaccgcttgcgtcggcctcgcggagttgtcctcgtcttctctgagcgcatggcatcttcgaaattgggagaagtctgtctttgtgtaaaatcctccactgcagcggtgtctgagctgaactgagtcttg

SEQ ID NO: 4586 - DNA, 2439 bp, Emericella nidulans
ccattcctcatgactttcattgactccgctaatcgtaaatgggagatgcgtgccgagttatcaagccacattgtttcgagcgtcgatttgtgccgtgagagagatgtattgaatgcggatggtcggaagccctctgctaggagggcatctgtgtgctggtatttaaaggacttcagggaggcgcaagaggagagaattgactcgaggccttcgagggcattgctggaggtgagagttatttcggtgaatgattgactttgagatctctccaacggaggttcatttatttcttctttgtcgtttagttcgtctgccggctccggtcggtgttcaataagcgagtccacggcaagtgtagttagacatgcatccgcaagaacggcatgatttgcgacggagacattgtgcccttgtcctcgtcatcccgagttcgttgtcgcaaagacacttcatgcagtcgatgaaaagccgggcacctgtcaaacggtttctgatgcgtcgtagccctgacgaacaaccggtccaggtagccccgtgattccaggcggtgggaataaaccagattgagctttctgatattgtgacggtggacagcagcagcccaatccacgcttggtctataccctcgatcagatcatttacccattgggagtgctcttccgctgaatggctattcgtctttgccgagagcgagaaaattgtgaattcctcctcgctcaaacgaggctgcggactcgaggaatcccatcccgcacagtctagcgaacgcaacacgctagctagacttggtcgcagcgtgattgctttcaaaaacgactggacttgcgagaggttctttaaagaggctgaccggtatagagcgcgagaaaacagttcatgaaagcgcctgttgacgaagatagcattgtggcggtcactatgcccgtcaagataatctccaatcagaaggaggatgtcgtcattgaggttctccatctcgctttaaacaacaagcaccttaattctgaggtatgaagagggtcgacggaggaacggcgctatatacccaacattgcgttgtcttcagtactgtgaacaactcagcctttcaactggagacaattcattcaaagctctgcatgaaatttgtctgatcttcataggacagccaatgagactggaagttaagccttctggaagtgggttgattgcgatggcgcatccgcggttccaactcggactcaagacactgacgtcctaaggaaggactggcgaggccgcaggtgggcttaacgcatccataagagtgttagaaacatagacagcggggaagaggtcactgtggccacgagtcgccgtccgagattgcacttttctgcagttgtaaggatcatcgcagacccctatgaagccgctaagagtaagattcaaacgatctataatccgtatagcgcttgctgatgcatgacaggagaggaaggcaaggcgagtttgcaagcaattgagggctctgattcgatcatacgtcaatctcttagcaattcgccacggtggatctgccgaagattcttcacaagggacttgtcggagcaccgccgagaccgagaatggcccgctctatttactcagcatgctccaatttgacgtggtaggtagtttattccgcgaacatgcaaagtatttacctactgacaggggttcaaagcgtcttatatgcatcagtcgacgtcacaagatgcagagatctgcagcgcgtcgggcgtaggaacgaaatccccctgcgcaaagcgcttcgggcgcttcttcttgtaaatcgattgtgcggatggggaaagtcattgcagtacattcgcggggttcattgttaacgctaatgtaaccctagatctggaaagaatcaggattggggtgtgatatttggtggatgcaggaacctgggtgctgcagtcttcaaagcattcaaagcacatccacagtcctccgacaaaagcaagaagcatcaacctcaacatcagccgcagcagccacaaactttagctgctgcttgacaatcttggcctctgcgagtcttccaagtctcacaagacattcatgccacccttgcaatgaccagacgttattggggtgctgcagtgccctaggcagagtatcatccatgcctagatcagcactatacacaccctcggcctcctcgactcttccttgctcgagcaacagcgccccataggcatgccgtgtgggctgcatccacccccagggttcgtcgtagggaagattgtcgtctagttcaattgagcggcggaggtgagtgaacgcagagtcgtaattgccgcggcgatactcgagttcgccgtctagcatggcggatgcaatggcgagaatatcggtgcaggcattgttgaacagcattctgcttgtcgggacgcgcttgaagctttcttggaacagctctcgctcgtg

SEQ ID NO: 4587 - DNA, 2744 bp, Emericella nidulans
acaagctgaaagagatatgtgcgggatgtgtacgattcaagattgagaatctggaggccacaaagagtaggccggatttactgaggagtttggtcgaggcgactgatccggaaagtgggaagaggttgtcggaagaagagatcaattctgaggcttttgctgtcctgtacgaacccttgcgtagcctgccctaatccttgttccactctcgcagttgtcccgtacatcgggacctccagcgctttacccaactcataggtatacgttgaaagagcgggctaacatgcccacagcgtcgcgggctcccactccacagcaggaacactcacactcctcttttggcacctcatccagaacccgtccatcatgcgcaaagtccaagccgagatcgaaaacacccttggtccgcttaaggacagaacctcctatccgatcgccggcatcgaatccacactgaaatacacaatggcctgcgttcgcgagaacttccgcataaaccccgtgtttacgatgcccctttggcgccgcgtcggaaaatcgcatgttcttgagattgatgggcatcatattccagaaggcgtacgtactcctccgtgaatggacacctacttgtgtattttactgactgatgtggaacagacaaacatctgcatatcgaactacgtcctgcatcacaacccatccgtcttcggccccgatcataacaccttcgtccccgagaaatggctcgacgaatcctataatagggaaaaggggcgctatctgattcctttcagtgttgggcatcggatgtgcattggtcggaatctggctatgacgaatatcctcaagagtgtatgcactctggccactttgttcgagtttgagccggttgagaagaaaaaagatgttcgtgtaattagtccaggcattggcgagatgaagggtggctctgaggtgagggctagagtccgagaagtgaagtaggtgcgcaaacacgatggtacatataccatggattggggcccgttgttaactggttccaatccaggcgaggctcctacaagaatgctctttctacctgatatattgcggcaagggcgctaggggcatgcgaggtgttcgcaggaccccggaatggcccatccatactgatgtgcttccacgtctctgtgctttttccgatgtcacacagttcaggactgcttacttcatgcggctatcacatctaactttctgtctcaatgaccacagcagatttccactttgtctttgcccggctatcctttgcgctgtgtgggtccataccgatagcctagttacggttttcgtggccctgtatatcagtttaagccctaagcacagaaccaaaactaacttatgttccttttttctgtatatcgttactaataaccctaaatcattcgtgatatatatatctggcgcaataactttgccaaagattttgcgagaaggcaatatataatagtagaattgcaccgcaaacttgtcaatgcgaacccgaacgacaccttcgcctagctcctcgtctctatatgcacttatctcctttgttaggtgatttggctccaagaatctcgatctgagggctccagggcgttcgatgcccgtgggcgattgtttgtgtgcttgcccgcctaatataggggcagttgtccaagtgcctcaaggccgaataaatcatggcgcgagaaggatacgtatacctcgttgctaaagatatcatcatgctgtatactttgcagtctgaatcttaaactcggcgcaactccattgtagaaaaactgcatgttcttggttagcgtccagtgttcgtcgagtttgtgtatttcctttccttctgcctctccagaacaacccgataccagtgtatcttcttcacgggcgactatagtattgcatgtatatggagaagcaggagggagaaaggcaggtggtggctacagatccatctaaaggatcctggctgtgctgtgtagccgttgggctgcaatgcaggagctatgaggggaacagctagactgcctagacttggatcacagatgcagtttatcaaaactgtgatgagtggcttggtctccaaagggagcataaccatcctctctagctaggtgttgttatcaagatcgagtagtataaaacccagaggcctactcaccaatctagaaaatatgctatgcaactaattgaatccaaaaaaacattctcttataaactatttattaaatattattactactaaataagtttattctatggctgcaccgtaagccagattatatggtggcggctcacctctgctgcactctggcggtaccaacctttaagcgacccagtggtgttgcggataagcagccagttaccctacccctgacgccaaaaaaaaagggaggtggcgggtggtcttgtctacttcttaactgattggacctttttgtctgattggcgtatggtctctgtcagccctatctcattaactatccatatatacaacgagcaacaagagacagatcgcacacccctagacagaggaagaattattactattcatccttccatttgaggacagccttgatcacagagccatcatctagcccagccagcgcttgcctaaagtcacccgcctgccattccagtcaagtcagccaggatctcagaaccgtacggtacggtatattgttcacgcacctcaaagtaagtaatcagcttctcgatcgggaaccgtccttctctgtaccactgga

SEQ ID NO: 4588 - DNA, 1183 bp, Emericella nidulans
atcttcaatatactttcctatactcccttctgcttccctttcttggtctcactgcctgtttcctaactgacggtttggtctaatggcatgcggtgacaatggcgtcgcagttaacgcagaagccatagacttccaccgacgggaagatagactattcatcgcaagctccaaagatcctggcaatcacaggtgttttaacgggactttcgctcgtaatggtggcattacgatgctacgtccgggcctttatcctccgccgattccatgctgaggatggcattatggttgtctgtggggtaggtgcagctactgtggaaagaagtccttgctcactgtattaggtctgctgcattggcttcatggcctgtcttgtcggcgagacaaagtgggtatgggccaatatctcgcggcgatcgaaaagcaagaccaccggggcaagctcacccagtggatatggtggcgctctcttgttgttgccctggggatcagtttggccaagatatctgtaggcctcttccttctccggttcacagctcagaataagtggttaaagtggtttaacattggctcggttggttttctggtctgttttaccatcgcttctctatgcacattgatcttataatgcgtccacatccaggcagcgtgggattctgaactgcgagcaaaagaatcaacaaaatgttttacactcccagtgtttctgggcatcggccgatctaacgcctgtaagttccagacaccagccagtccgtcatgcttagttctggtgaatgttctgatacagtgagtagccatcaatattatcacagatttcctctatgccaccctccctatcttcatgttctacaacgtccaggtgaacaagcggtccaagatgtcgctaatgggcatcctgggtttgggttacttgtaagcagcatccgttgacttggccagcagcaaaaactgacatctcagtgcgtgcgctgccgctattgtaaaaacggttttccaaactcgctatttcttcgataaagaggcgtaccggtatgttctctatcacctgccttaccagcaatcgactgacccctgaaacttcagtgaatacacctaccatatatggaactagtatgcaaccctgctaccagtctaacttcccatccgtctgcaggaactaatcgacttgatctcatccagcgtc

SEQ ID NO: 4589 - DNA, 1964 bp, Emericella nidulans
cttcaactcatggtgcgtggaatccaacgatcttctctacgtactgaacgagggttgattctgacgatctataggggtgtcgtcaatacatggggtgtttatcagacctactacgagcaaaaccagctatcagacatttcgtcctcgtccatcgcctgggtcggttccttacagtctttccttctcatgctgttcggcgtcgtaacggggccactttttgatgctggatatttccgcctgcttcttggattcggtacgatcatgttgccgtttggtttcatgatggtcagtatttcatccaagttctggcatttcatcctggctcaaggggtctgtgttggtttagcctgcgggtgcctgttcgtcccggcagttgcgatcttgccccaatacttccgcaaaagaagaggactcgccaacggcattgcagccacggggagcagtattggtggtgtcatctacccgatcatgttcaacgaactgcagaaaaaggctggctttcactgggcgacgcgcgcagtaggcttcctcgctttcggaacctgcttgatatccttttccctcatgcgcatgcgcttcctccctactgagaagcggaagcttatccaactgggcgccttcaaggagcccatcttcgtccttttctccatcggcatgttcatgggcttcttgggcttttacaatttccttttctatgtccagtcttacgccattgagaccggtattgtcgacggcaaccttggcttctatcttcttgcgatgctcaacgcgggttccacatttggtcggattgcgcccaacttcctggctgaccacacgggacccttgaacatgctcatccccgcagtttcaatcaccgccatcctctctttcgtctggattggtgttcacactgtccccggtatcattgtactgtccgttctctacggaatattctccggtggctttgtctcccttccccctgtagtcatggcatctattaccaaggacatgcgcgaactcggcacccgcatgggaatggtcttcgccatcacttctgttggactgttaattgggacacccatcggcggtgctatcatgagtaatacgcataagtatttgggtgtccagctctttacgggctgcgccattaccgttgctgctgctattttcctgggcgtcagattggctcgtacgggagtaaatcttgccgttagggcttaaaattagccacccctggtgcttggttacggctggctcatcagctttgcattgcattcggtgtctggcatttcggcattatggtcatggagcgggttttgttttcgactttagaaagcccatttggatatcaaaagtgcattattggtgcgataatggagatcatcaggtatgatgtatatagatattcacatagtaataaatattaggtcacatatatacctatcacctaccgcacgtcacataatcgacacttgtgaaactgaccggactctggaaatatcggccgaggccaattaatatatattcatctatctggtatcaacgcgaggcccagcgaaaactcccaaacaccaatatgctaacaacagccagacaagccgaaaaccctctgtttttaagatacatgctccggactgaccgggaaattctccccgttctctcgaatatgctctagtttcttatcccgactacacggtttgcgcatatcgaacgcatcctcgcccttttccgacatacctgttggatcgtcgctataataattgaccacgcgccggaacacggagtacctgtccaaaccgtcagcaaatacatgttccgaaacgggcgaagaaaagtaaagaggaaactcgacgccccccagccctatacatatcacaggaccttggtcctgcccgacatacaaatcacaaccaagcattgttgaattggaacccgttcagacgctcgtgagtcgagcgcggccaatctccgctgccgggcac

SEQ ID NO: 4590 - DNA, 1932 bp, Emericella nidulans
taagaaaaagagaaagagagagaaagaaagggataatgtaaaataagtgtgagaaaagaagaagaatagtaatgagataggaatagtgttgaatgaatataagagaagagtgaaagggtggagtgataataagagaaaagaaagaagaatcaagaaaagaagaagtgtaagaatagaggaggtaagttgaataagagtaagaagatagaataggatgaagagaaaaatgaggatatagtgaaaagaaaatagatagagaaaaagaaatagaaaggtaaaatatataataaagatgtaaataagaagaaaaatggaaaagagtataaatgtagaataaagttgaaaatagaaaataagaggtaaataataagaaaaatataggaaagtattgagtagtaaataaaaacaaaaataaagataaagaagaaaaagagaaaaaaaaatggggaaaaataggatagataaagaaagaaaaaaagcaaagaaatagaataaataagaataatcaataggaaaagaaaaggataaccattaaaaaggaaaatgagaagtaagtatgagtaaaaatcagagatagagcaaaaataatgacaaggcatggaaaaaggggtttgccggtcagaacataagctagacaatgatctcgtggataataaaaacaaggtgtgaatactgcatctgaacaagggtatatggtaaaaaaaatcttatatatgtgaaacacacagggcgtcactccagttcttccaacgagtccactattggcagcataacaaacagatttagccaggacctggatctggtcgacatgtctctgcccctagatgccctcagctgtcttgctggtacctccctcttcccttttacataatggcaaaacccttttcctaacattcgtcaagcggtatgcacgtgcgtcctaaagctcctcatcctgtgtgtctccgccaagtatctcgccgtcacgatccccttcatcttgatcacgatctattttacgcagtctctgtacctgcgtacctcgcgtcaaatgcggctgctagacatcgaagcaaaagcgccgttatacacgcacttcaccgaacttgtttccggtgctgcgaccatccgcgcatttagatggcatgcttcgtcccagagaagtgcacttaagctgctgaatctttcacagaggccggtgtattttcaatactgcatccagaagtgtctcgggtttgttctcgatctccttgttgcagttttggctgtgattctggttgccacagttgtgcttttgcgagacaagtttcaggccggcgacgtcggtgtcgcacttgttacggttatgacatttaactcgagtcttatgaacctggtaaggttctggacggaaatggagacaagtattggcgcagtgaagcgcgtaaagaattatgtgaagacggctgagccggaagaggatgatgtttttcaagctcggcttgcagagttgccgtactcgtggccggagaagggagatatacgctttgagggcgttatggctggtcatttgtaggtttcatttcgagcttgatgccctgaataatctcatctccctgatgactattccacgcagacaacgaaactgatattgaacaggccatcgtcaccgcccatgctgaaagacttaactctatccatgtcgcctggctctagagttgccattgtcgggttttccagcagcgggaaacaaccctcctccttgctctgctgcgactggtggaaatccagaaaggctccatgatgattgatggattagattagaaggcttaccgccgcgaggaaatccgaaagagactgaagattataacccaaaatgcgttcctggtttctgagagtgtgaggatcaatatcgaaccgtggggaaacgccccagataaacgtattgcggcttcgatgaagacagtacgactg

SEQ ID NO: 4591 - DNA, 1807 bp, Emericella nidulans
atacatcactatacaaacagaaactcctatgtacagagaaaatactgcgtggttcttcctgactcttgaactcttaccagcaacgcctcagtgtcaaagatttgagtgtttactggaaaagttcaatgcaatcaaaaacctatatcagtggaccagtcagtcgaccaaccaacaaagtctgcgtaatgtagaaggacatgaatgatacgtaccacgttagggctcaagaaggcgtcacctgagcttccggaaataacgcttatagtgatctatatacacggtcagtcagccgggcgcgggcgccagaatgtattagcaatgggacgaaccgtattctcgcccgtaacaattgttccagcgggcacgctaacatcatacaccttcccaagcccacggtaagcaccttgcgtgacacctcgggagttgagattagttggcgcttaaggagccgggccggtatagctgttgatctggatttcatgattgtcagttacactgcattgctgttttgctttattgaccagaggcggctgagtcgcttaccgttgcctgcggccgaccaccagcgaaggagagggttgtgcctatgcggagagttgcagcacctgtctgtgcagaagtagcggtgaacttgatcgtcacggggttattgacgctcttgaagacagccatggggaagtcagagagcgaagaagagccaactgtgtaggtggaagaccaggagtccatccgggagtcggaggggtgcatgcggagttgtttatctgcgttgcggaagccagttggtctggaaaatgacaaagcttgggtcagtcggctgtcctttactggtaatgaaggataattagtgctcactggccatcccattctccaattttgaagatcgtcgtgcctgttttgaccgagccggagatgtttttcgtggtcgatgatccggccgatacagtcacggtggtttccgccactgggaattcgccttgatagtatttcatcgtgtacgtgccgggtttcatggcaggagaggtgaaactgccgtcggacgctgtgtaggtccagtactgggcatcattgttgtacctgaaacgtacacaggtcagctacattatgatttgctcagtattccggtcataccagtgaaccacccagtccatgctcgagtctgcgccggaagctttgccggtgacagttccacgtccgttggcagcaacataacccttaataccaaggctggcgaagaaggatgtgtcgatgttggtgctgggggttccgcttcgactgaagtacatcgagtagggaccgtggaggcccgtacggaatgattcggtttggacgtggccggagttctaacgtaattagtaggaagacgattgactgatatattgagacgtaccatgtaccaatagagggcattgtaatcaccgccgttattggagttgatgtcgctgagtttgttagctattgtacgctttgataaatctagacataccggaagaaaggaccaccagaggaagactcgtattggttcaagatcatgcagacacggtgtgcgcttcccgaaatgcctgaaaacaattaggcgggtctagaaagagcttgaaatcacttacagtgcctgtggtcatcgataaaccgttcgctggagtagaatttgctacgggtctcgccgttgaccaggaatacatcggagccctcgatagctgacccgccggatgtcgtagatacatccccaaatggctcttcattcggcaggaggtttgagttaagtcgagcaataaaccgcagctcaccaataacaggctcggcgtca

SEQ ID NO: 4592 - DNA, 2314 bp, Emericella nidulans
ggaagtgtcagtaaatcttgtccgaaatggagtaatgagtgggtaatccgtacgcgcagtctttcgttattccctaagcgagattattaaaagtgactagcctcaatcggctggcgtgtattagtagctagtggcaggagttaaggctttatttaggcagcccacctgggaaatccatacgttcggtagagctgagatgaactggggtggcgggcgagtgtggacaaagtcctgcggcaggcaggtacagcacctacaggtcatgtgttgtcttcaccttctcttctccttctacttctaacaaaccgcctctggaaaagacctagttattccagaacaaccaacctctgaatctctttcacaaatgagaagcataataattacatatcaaaatcataaagaattcccttcaagtctcaggacggcccgacctcaacgtgatactaccccgcctactcagcggcagtgttcgtgcccttcctccgtattttgatacgtatttgtcgccactaacctgcctcttatcttcaggtggagacgaattgccatttacagactaggggtgtgtgctcgtagccaagcctcgaaagtctggggagaactacagggaagagatgtacgacgaacgaagagttcaagtcctgactccaacggacaaagccgagctccaaagcccggttgccattcaagatacgaaggcatcgtccatcatcccttatcttgtgtcaaacgcctatcaacaatagatttcttatccgcgccttctcagtcgttcttcggtcccacacggcagctcaatccttccggtccatcagcccagtgattggtttgtgactccagaagcttgacttcgcttgacagtcgcgtgtttcgggacccagaaacccccacgcgacgaatctcttcttggtcgcgccgtatccaatactgaagatatcgcctccgtctcttccggaaatgaccccattctatcgcgaaatctgctccccgtgtggaccgaatgataataataactgattgtacgcgtttgtgtgagaagaattagctcctcaggtccacctacatatacagagctggtccgcgtcacggagagaaaaaaaatgtattctcaaccaagccagaggggctttgcttcccttcttagcggaatcagttatcaactcttcatgataatatcttcattgaacaacatagccaatctacaacggccttcactaatccaatggcgggagcattcgatttcgacctggagaagaaccctccagtagttcagtcaactgcggataacagcagtgacggcgctgtacccggcgagacctttacctacggcgactccacgtacgcgaagattcagcgccttgccgcagagctcaacatcgagcagcgcggtattgaacgcgttcctgctgcggagcagactgatacttctgtctttaatataggcagcatgtggctggcggccaacatggtcgtcagttcctttgccatcggtgttcttgggaaatctgtttacagcctcggttttgtcgacgctattctgacagttttgttcttcaaccttcttggcatcatgaccgtctgcttcttctcctgttttggcccatttggcctgcgtcagatggtgttttcaaggctatggttcggctggtatgtcaccaaaggatgtgagtatcttcaatccaccatggtttataatatggtttataattgcggcgagggctcatatatcatatctcctgcagttgctgttctcaatattcttgcatgcttgggttggtctgctgccaacgccatcgtaggcgctcaaatgctccacgcagtgaactccgatgtacctggcttcgccgcgatcttgatcatttccatttgcacgcttttggtcacatttgcgggatataaagtggtccatttgtatgaatactggagttggattcccactttcatcgtcttcatgatcatcctgggcacctttgcacattcgggggatttccaaaacatccctatgggagtgggaacatccgagatgggcagcgtcctctccttcggctcagctgtctacggcttcgctacgggctggactagttacgcagccgattacactgtgtaccagcctgccaatcgcagcaagcgcaagatcttcctttcgacctggctaggacttatcgttcctcttcttttcgttgaaatgctcggtgttgccgtgatgactgcaacggatattaaaggcagcaagtatgatgtgggctatgccacgtccggaaatggcggcctcattgccgcatccttcaccactgggggctttggcgattttgcc

SEQ ID NO: 4593 - DNA, 3331 bp, Emericella nidulans
tctttgccgggagaagctgttggaagtggcgatggcgggacatcagccgcgcggtcttcttcgttgaggacgctggtcatcctttgcatgttctggccagttactgttgttaagtttcgcatctgttcaatagcggtactccacctcgcgatatctgagccgcccccgtcggcgccgagggccagaagacagcagagaatgctcttcctaacaaggtataaccgtccgaatagtgtacgtaggccgcgtaaagaaaattgatcttcggtttctcggtcagcgagcgctgtttcaacctctatgagatcttcttgcgaaatatcgtaaatgtcgtagtatttagcgagatttgcactgtctgtcagcggctgtagaacatgctgcgcttgaatatagtggtccagcatagagtaaaagcattcggatacgatgcgacgcagtcgcagacaccgacggacctgtgtctggtcttcgagtctacttatcggcggtagcggtgtacttctgcaagacaattagccattgtgcgttgtactgggttctggaagactcgcatgcgatagcccctagataccagttccacctcctgtatgaacactacggatgctgaagccgccgagtcgaatccctgagcattacctatcaacagcacagcagcatcgacggcttggtgtcgcaggtatttcagccactggcgtctcgcaaacgcgtaaaataacactccaagcaccggaaccagcactaaaagcacgccaacctttcgagggttgatgcccgttcccgcccgaggccgactccaatgtaataaccaagcgatcgagaaggaggttgaggctgtcacaaaggcgccttgtagaccaaacgttgtagatattgcaggaaggtcagttgggacggtattggatagcacatcggtagcggaggtgtacgacggagcgctatgttcgttcagtagttgcgatgcgacaatgacgtatccgaattgttccaagaatctctcattatcattccgaccgagacgggaattcaaagcagactatcgccgtcagcagactcctatcaccactcgtgttttatacatactgtgcagacatcgtacaaccgacccagggcggctgtctggcgcgacgcattaaagtttacaggttttggcaatttgttccgtatccgggtctggaacttcgacgcccctcgaggcgcaaagtcggcggtcgtcgagtcggataggtcgtcttcatgctcgctctctttgactggccagtctgaactatgttcaccttctcctgaaagacccagaagtcaaaacatcatccgcagagtggtatcccaaactaacctcgaagatactcggcaaaaggcgaattctcgtaaaccagggattccataatttatgctcattccgtaagcggcgatggaaagctgttcggattgtatttgcgtgagaccagagcacggagggaactgccagatgacgtgggcaagagcttgatgtaggaaggttcagatgcaacgtgctattcctgggccatctctttaagccccaaggaggatgcttctatcgataaggagcaggtaatattcgaactcgacaagtcgtgacgtgagggggcccggagtaactatgcaggcgaaataatgatgatgttatttcaagcacagcagagaccagagtaccggttagaatgggtatgcaggacagaggcgccgtgcagattgcagaagggaacgttgatgatcagctggccgactggcggcgtgtctggggaaagggagagggcgagagactgagacggccaaatcggagtgaaatcacaggttcaggaacggcggccgaagctagagtcgtagtgagagggcgacacgccccactgctcatctatctcgccgtgtctgcatacggagtctccgtaatttacataaagagcaatagcccgggcttagaaaggactgacaatactcggcagtgactgtctacgacgtttggtgaagctcttgtgaatgtcactctgccgagaccgaggtctccaaccgccatacagtctgggcttcaggtgttcgttgccattcttcctcggatcttcagcataacgtttgtttcagctttatacagggggacagctcggttgttggagaagctcctgacattaattgattggatcatgttgatccccgcccttacgatcgtcgtgggcacggtgccaacatcaccgtagcgagctggacctgatctattccccgccgcatatgcgaagccataatttcttgtaccttagactctaaatccctgggacttgaaatgcaagatctcagggacacttgaattgccagcccggtcccttgctcatatgcttcgactagcaagggcgcacaaatgcgtgtccctgaaaatatatagagtgcggcaaacttgagaatgagtccttttcgataaaacaagaaatgaaagcaagaaatgacaataactctatgggaaaagaaaaagaaagagacctgcttgtttagcatagtctcgtggttttgtagcaatactattgttcgcgcatcctgatattccctacctggacgataatggggctattgtggcctcaggcataaaccgttgtacaggcaactagggacgtcaacagtcgcgcgctacatctgccattgtaattgacgcttcatattatcacgtccgccaattgtgatatataacaccgttattgattgatgagacaaagattgttttgcattttctaaagaagtatactatgtctagcttattcttatatgaagctagcacaccgtgcccaggggccaaaggggcgagagccagcaatgagagcggcaacggaagcgacccgatgagagatctgtgggacgaggacctcggaaattacgacgacacgaggaacatcgagttcacgaccgagatcagagcaccgattctgggagccaaaccgaaacggcgaacgaggacaacaacatccttttccatccacagtgattatgacgagaaaccacaagcaacggttcgttccaaggcgggaaacaaatcagctggaattgcccctgcgaatcgtaagacgtccttgctcgcacaacccgcgcagcggtttcgttcacggcccagggtgagctttgtccctagtccgctcaaacattgtcagcagcacgacaagaccgagcctgagaagagaagcacaagaccggatgtgcagaagaacaacgagcttctgaaacgcatcaatgccacaagtgaagaggtcgtagccaagcatgttctaaaggatgcacggcggactacggcctttttacctacagaggacacgactgcggccagtgtttttat

SEQ ID NO: 4594 - DNA, 2045 bp, Emericella nidulans
cattccggagcagatcaagatgtctaccgcaattgcctgatcctgcatttgaggtgcaggttggtatccatgagttattgggacacggtaccggcaagttgctccaggagactgcaccgggcgagtataactttgacgtgtccaatcctcctatcagtccagtgaccggcaaacctgtgtcctcatggtataagccggggcaaacttggagctctgtatttggagccattgcttcgtcctatgaagaatgcagagctgaatgtgttgctatggtccttagttgcgacttcaatattctcaggattttcggctttggagacggaaaggaaaatatatcaaatgaggcaggtgatgttctatttgctgcatacctgcagatggctcgtgcgggtctagttgccttggagttctgggatccaaagacaaagaaatggggtcaggctcacatgcaggctcggtacagtatcctgcgcactttcctcgacgccggagatgattttgtcaagctcgcttataccaaggatgatctgtccgacctcgagatcaaattggatcgttccaagattcttagccatggacgcccagcggtggaaaaataccttcagaagctacacgtctacaagagcacggcagatgttgaagctggaaaagccctttacgatgatatcacctctgttgacgagtggtggggcaccaaagtccgcgatatcgttctgaagaataagattccccgtaagatatttgtgcaagccaacacaattcttgagggtgacgaagtcattctcaaggagtacgagccgacactcgagggtattatccagagttttgctgagcgcagtgtctaattagatgctcccaatattctaagctacctcaactttaattcaccaagtgacttagaaatcaacaatcacctttttcaggcccactgtcaacacagcctaatagctcttcgtagtccttatgaggtgaactttacgtgctgggtcgaggcgaccattaggctttcaaggaagggaaaaagaaagcattgtagacttttagggtgtagctcaggaacagatatattctgaagaataaaaaccagtatttgtaagcagtttcttaaaacattgaagtagttgtggttcgaagtgtgattgaggctgtgtgttcccctcacgaatacggagtcagcctctagatggagcgtggcccgcccaacgaccttaagcggcttcagccaacctctattctcctctattctcctcttttattgcccttggctcgcatttgctttcgttactctggacgggattatctcaaataattcccaattcctcactgctctcaatttgttcgtctagcaagggtcgctcaggtccatgcgcaggcaagcctgaactggtgggctcttgatcgacagagtaggagagtctggatcacctccaatcaacgggacggacggtcttgcaaggcaacgtcaactccctcgcttgactcaactacattttgggtacctagaaccatcgcaaagaatttcgacgccttgtcgtggccaccggattcttgtggctcggctcccacggggccggcggcttaccttcacgacgacgacttcttttataccgcaccggcggcggattccccttactcagaaagcttattctctaggttggccttttcggtcctccccctttaaatcgttcggttcccctcgtaggggcaagccattgtcaaaccttaggtttagagccgggggggctttccccactttgttttcccctccacgggggtcatgacccggcccccgggggggggggaaaaagtacctttttaggcccaagggggaactcccacagggaccctttcctttctagggggccgattacttccttctttgggggggggggggggttttcttggaataagggcccttacctcgggcgcccaggggttgttataatcaattgggcctgtgtgggggagaatcctttggggtgtccggagtatcctccttggggttctctctctacaaacactcttgtcttttttttttcgggtac

SEQ ID NO: 4595 - DNA, 2106 bp, Emericella nidulans
atctgtaccaatatatttatggcgctattccgtactccgcactgtagatcgacgcacttcctgagtttcttctcaccgatcatgcggagaccaaagcgtcccgatgtgtacttggtctgcgttagctataacacctgcaaacttgcccgcagattcataagtcattggtaggtaggtacctaagaatgactgaaaagacacgcctaatgagcactcgataatgatacagtatggccaagtagttgcattaacggagcatggattttgcttacatagcagccattgaagactgaatgtggtatacaaccaaggggcgctgaaacccaatttttttttttttccgactactgagctcgtgtctacgtatgtgactaaacgcatggtaaggttatagaattctcctaaacgagagcctacttgggagacggacaccctcggttcccttacggtttagcagacttattgcttggtgatgcattgagtcgaggactagagccaaaactcgtgaacaagaacctaaatcgattactgtatcttggtcctaggcttcagaagatactcaacaccctgcattcaacttccataaaataaatagagatacagcgaagggaggcaaagaaacagaaataaagaagataaagatgaaagaaaaagagtaagcattaaacgatgcaagtttgcccccatatacaataagatccaaaaagcgatgcagatgcagggtcattcctcttatcatggatcacagagacattggtattctttttggtcgttcttcgtagtcttcttgattgagatggtgcttcaatttcttagattttttttgtcttttgctttccggcagacacaactcgaaatactaaaaaaacttggggaagtaacaggggagagggggtggggtgggggtagtgttgcacaccatgcaaggcgtccgcgtatcgcaaaaagtcatggcttcaacttgcgtgatttcgtttttcggcgaatgggagaaacataatcgagtccgtatgaacggcgcgcctagagggctgccccaaaataacttctaaacttggctggatcagagaaatactttctttttgtgattctctttagttgcattgtcgtttcatcatccctcatcgaatcgtaagccgatcatcgcacaaaaagatcaggcctcgtgatataaaaggtcgtatgcgtctttcggtaaagcaatctaacagttttcgttgtcttcatctcccattaaacgtttactccacaataatctccacgcccgagctggtgcgcaattcgtcacttccacgcgactggtgtccgttggatcgtcgaaaacctggccctttctcgggaatggggcctctcggctgcctaataggcatgcgctcctgtgactgaccgtcaaatccaactccgatggtgcggttactaccaatgggaccagcgctataaggctgactctccggctgctcccaggagaacatacccctcaatctccttgggcttgagttggccccccaatgccagttcccagagaaaggctgctcaagctgttgaccagaagaccatcgtcccgttgcataccaagggaagaaccagatggggcaggtgtcaaggttggtgtattggacgcaacacttgtcgagccgtcataatgctgaaggcgcgcgccgttggattggagtgcagccgggaaacttgccgaggatgggacaggagatggagtgtaagaacgcaagtccgcgaatgatttcgccgcgcgtaggttctgcgtatttccgaaaccagcggaagagtccaaaactcccaagaagccggaagatggctgtccccgaagggtgctgaaatgggtaggtccctcattgcgagcctcgctgaaatcaatagtcgctgcgcggttgagcccgcgacgagcggtctccgtgggctgaacagcggcgggaatggcagacaaaggggggctcacattcgtgcctggtgcgaccttgaagacttgcacctgacgttgatccccagttccacgcgacgcgtgaccaacacccatgttgtgagcaagagtgtgcacagtgaagcgaaggacaggagtaaggttcggcggaaaaataatggagtcacgcc

SEQ ID NO: 4596 - DNA, 1855 bp, Emericella nidulans
cggtccgtgccctgcgagcgcacgtcgttcttgacgcacgtcccagactctcagcttcttgtcgcgagatgttgtaacaagaagggagccatttgcgctccaggattgctactgcacaatgtcgccaacgttcaatgtcaacttggatgcaccagcctcaatatcccaaatcttcactgtatagtctccggatgccgtcgcaaggatgttttcagccgcggggttgaagagcacgtgcccgaccttcctgtgacagatgtgagactgttgatcgcaaacaggcttatgtatcgacacttacttcgggtggccactgagctttccaactggcgcaacatcttggatatcatcggcgtctacatcaggggatagcgtgaaccccttatggacccgccagaggaagacctacagaacatttagttcggccggcgcgtaactaattagttcactatacaaccataccctgccatcatcggaaccggatgcgatcaaatcatcgttgaaagggttcctaaatacgttggcttattctgaaacttgcgacaagagtagtatggtcactgcttaccagtccgtatccaaaacgaccgcggtgtgaccacgaaacaggggtatccgctcgggcaatttgcctcgttcttctaagggaataacggcgaaagcacctccaccaccagcttcccagttcacagacagatatttgggatttgcctggatttgttaggcggcttgaaagtggcgaacggacgagcggcggcagtcacgaaccttaacaaggttggtatcccaggcattccgagagacacgtaggttatcatagcattgctcctatccaattgtaagcattattcaagtttctggtcgtattcaaggatataagcacctttcgtgtcggtcgtccgaagacgtggcctgctacctgtcagattgcgggcaacaggagagagagataagactcacgatacttggatgaacgcacgaaacggccagacatgatgctgggtatcaaggaaccaaaacaaggctcaaaaaaaaaccaatgcagaaagaaagggagggaaactgaaatgggggagagggatgaatccaggaggcttgctccagcttaagggtgatagcaattaatagcaccgttgttaattaccggggccggcaaggctgatgtcggcctagcaccgccacctggaccagataaaggtcaacgatgttccatataatatcttggggattaaacaagagctcaagatgtcttctccccagaaatatgatgcacagatctgtcaaatactgtactcgatatagaggcataaccggggaatattgaaatgttgtgacactgttaccgctagtccctgaatagtatagttctgccccgccaatgcatggctgagtcagctaagcttgtttaccgccttcgtcgctggagaaaccgaagcaaactactccctaaagcggtttcaccaacaatcaatccataataatgcagccagtcaattgaaaccaacccgccttcaaagatagctcccccactcactgaccacgcagctcggctgctgacacgctgcattgcgttgatttgtttatcgtcgtccttgcataacctcgacctcacatcattcgcataccgcacagtcgtcggtgaagaggccatcatggagaatgtcagttcggtacttgctgtcatcgcaccacgagaccaggtctcccctaatactattagccaggtacaatcgagaatgcagggatcgcgcatccccggactcaaagagatgaacccatcagggacaaatgctcgctcaaggctgccgcagccaggcgcaattgcgaacaaacccactgcagtgcctcgtgagta

SEQ ID NO: 4597 - DNA, 2655 bp, Emericella nidulans
gaggtgttgaagtcgagcaagtgacttgcagaacggagaagagcggtaaatgaagaacgaggggaagtggcccacacaggcaggtgctgatgtagagtaaggagtaaggggaaaggaatttgtttttcttaagtatgaagcagagaagacgagagggaggacaattgatggatgaatgaaagaaaaagagaggccgaggtgaagcggccgacttaatgtttctttgggcctggagggacacacaaaccagtctttctacgatgatccagcaacttccacaccttctccgccccttcacttccagcgccttccagctcccactggccggtagtttgctttcagcctagcctgccaattaccagtaaaatttcttcctgctttgcctcatttcgcccctctcgctcacaagtcgtcctcccgccatataaaaattcaggcgatccagtcacttcattcgctattgtccgcctctgtacatcggagcatgtgttgcctcgttcctcaggcgcctaatctagaacgttccgctccgctgagtgaccgcggagcctatcatagctcatggatcagtacattggttttgatgttgcccgggtgtacgatgctcccccagcctcgagcaggggctgctaggtgccgtaggtaactgctcgtttatctctgcaggttattgctaggcagccaagagctattgggaccgaaggctggatcaacctgatggaggcgaatctgagaggagtctggttcggcctgtccaagtttctattttctctaaagtgaggaccttgtatgcgtttgtattaggacttagcttgaagaatcatctgtacccaaagctgaaacgccagctattcgttcataagcctaccagtactatcaagctgtggtttgtgaatacttctcagtatcgatatttctctcattgaaactcatgtccctgatgcacttcgttatcttccgaatagctcctagccagcaaacctcccccgagctaaactgcatttacaaacacatggccatattatgacccaactctcgatacgtgaaagcaacgcaactcctgagtatcttcctcagggtaaaagcaaggaaacgtatgctatgtatagtcacaagcagtaagaaataaaaaagaaaaaacgggaaaaaaaagaaaaagaaaaaaaagaaaaagaaaaaaaagaaaaggaaaagaaaagggaagaaataaacaaaacgggctttgagctcgctatgctaaaatgtgaaaggaaaggtcatgacaacaaatagaaacaaaacgtcatgaaatagcagccaaacaaacttcagttagaaatggaaatgagtacgagacttttccaaccgctaaatgcatggtgatggggtagggtcgcataacacatgtcattatcagtaaatcaggggagtaatacatgtcctggatcaaaagacaattccgaacgtgaagaacttacggctcgaaccaggttgaaggatgaaaagtcataagaccgaagtatgaacgagcctgtgtcatccgaaatatttcgttattttacctgtccaaggaagatttaagcagcctggccttggttgcgagccttagtgttggcgtttccgcgcggccccgaggagcaaagcccccgcgtccatcacgctggaagccacccctaccctggctgcccgcacggtcaccgcggccccggcctgcacctccacgtccagggccgtagttggtatttccgccgtagacactgccacgaggccggcgttcttcaaccttgacctgttcggttccaatctggtggggatttgcagcaacagcggcgttgtagccagcgcggtcagcgaactcgataaatgcacagttctaaaaaagggtcagtaaaaactaggaattatccggcggaactgagaagatgacgacaataccttttgacggctcacatcaaaatgagtaagctttccatatcgctcaagggtttccttgagcaagtccgcattgaccttttccgtaacattcttgatgtagccaagaacggcctggttatcactggcgcgagcctgtgatttcttgtggtcatgacctgccgtttgccagccggatccatcgttagaggatggctggctggggccgctctcagcggcaggggcggcagccgcagccgaagccggagccggagctggagcagcaggctgggaggcgggagcagccgcaggagcaggcttcacaggagcaacgggaatagcaggaacaacaggggccgcagctccagttttggaggcaatgcttgcccaggtcttgggaacagcctttgcaggaggtgctggctctttggtaggagcctccttctccgcgggcggagcgggagagggttctggagaggcaggcttctcgggcacgacttcagccgcaggggcaggggtctctacaacttcggctgcaggttcaggctgctcggttccatttgtctgaggagcggtttccgcagccggagcttccgattcagcctcctcggccttttcaagcttctcatcaattttagcagcagcctcctcagtatccacttttgattcttcggtttctgtgataggtcctgccgcagtttgtgcaggggcctaaaaatccggctcctcaaccgtgtcactagaaatggcagcatcctcggcgac

SEQ ID NO: 4598 - DNA, 2577 bp, Emericella nidulans
cctataattgcctagattctaatgggatacacatttaccaagaaaataatatatcaaaaggaaggaaaataggcataagaaaataaaataaataaattttaaacataaataaataaataaataaatgggggaatgtaaatggtggggtaaataggtcaaataagataaaaataatgtataaaaaaaaaaaaaaaaagaaagaaaaagcctaattcgtatcatttattctactcccattgcttcatgagtgcatttccctcaatctgcttatcaaaatcaacaatatgcgtcgaatggcaccatggcttgatctcctcctccttccgaataatgcctgaaaagaacccacaccatcctattcttggatgcgcctcattaacctcgcgccggaacgtcgggtggatcagcttctcgtaccccttcacccgcgggtgagcgccaacattgtcatacagcgtggccagctggatcagctggcccaggaacgtaatcgtcccgtcaacgcccatgtcctggtgccggatgatcgcctcagcggctgcttcggcctggtcgatggctgcgccgtggtctttgagaacctgcagcgccttgatgccgccgtagagatcaaatgacatgcgcgtcgcggtgaggttctctttggctgtgccaatgtcgtgcagcaagcaggtaagtgcccaggttgccgggttcaggtcagcggattgagagggaaattgctgcttcgctatggccattccttcacggttggtaagtatgggtagagcaaatcgagaactgaaccgggcttccggctcgcttaccaaagtagtagaccctcatagagtggttgaaggtctcagggtcaagcacggctttggcgtactcgactgttttgctgacgaccaggtcttcagctgggaatcggagctcttctagtaagacagcctttgcgtcctcgaccaagggctgcttggtgaaaattgcgcctgcgtcaacagggacggcagtccagccattggctgcgatgtcgggatggcacatggtagacctgggcgttatacggacgaagagaaatgtcttgttttactctaggcagacttgtaactgagagaagggcgagcctaaatacgtatcgtggtgattcatcatgacctatgtcacgacttggatacgcatcggccattctataataggaagttaatcttggtgggcccgggaggcaagtagtgtcaaccaatggcattactgcccaacagatagagtgattggttcatatctgaaaagcgcatcatctactttgtggtttcacatctttggcaggcaagccaaaagggggctccaaatctgagacttggaaagcccccttgaaagtcaagctgtctcgtggatacaaaggcttggcagggccgacatgcatgtcttaaaccctagaacagacgtcctccaagttaaccccaagttgaagcggagtttgaagcatagtcaacaagtccaaaaccgtcacttgtgcaattgttcgctatttggagttgtgaatggatgtgatgccatagaagacagttccagagaacaggacgccaaccaatatggagatattccatctgtggagttgtacatcctcactagatcttgcgcgttagccacggagccacagagcagtagctggctctactggcctagctcaagttactgatcaggccggacgtatcatgatcgacgctctctgaacctcactgtctacaagtgccgtggtctcgggtccttatgcccaacacagttaacctgtagactggataaaaccatatggttacgtagagcgcaagcttgcgggacgaacacaactctagcttacgtggtcatggtctgacaagaacacatgtcatacgacgaccgggtttcggaaaatccattaaggtgtgttggaattatgggacaagagataagtcggtcgttctatgatcataaaggcgcccttttgcgcaagaacaccttgcaaccaccgcaagcggaataccttggctgtttacacgatccttgaggtgttgcagtcgtgccatgagaatcggctgagattttcaggccgactccaacaaaggataaactagtatttgtttggaagaacaccaccatctgccggcctcagaattgggcatgcattaatacccgccttgacaagaccacaaggacccctgtcggagcatcttccgaaggatcatgcgccgtgccatttaaacttgaccagcccccgaaaccccaggagctttgctccctctttctaaggcaactattttgggtggaagaactcttcttcagaacacgcactccgggcaaaactcaaactgtattgcactttctatccatggagagaccttatcaattgattaaagggcgcctctacaccgtcctcgttggaggggtaaatccctcaaaaggggttgctaaaattatttttataaaaaacaccacttactatttttaatttcccttatacttattttaatattgttcgagtttcggtcatacaaatctttaatcctctctctccttgtggcctcatcttttttcttttctattctgtgtggtgggatcatt

SEQ ID NO: 4599 - DNA, 2303 bp, Emericella nidulans
  unsure (1)..(2303): unsure at all n locations
ttacaatatagcgacaggcgtaaaaaggggggatgttttcgcatctgctatttttagacatagttatgatcgagcgggaccttgatgtacttcaccatcccaactagactgcggcaatatccgcagtgcagatttggatattccatggatagatgaataatttgcataattgatacatgttttatatgtaatatattgtttaggggtgtattaaagttgcagtttgaacatgagaatcccgatactaacaatatactaagctatatttgggactcctaatctactggctaatcatggcttgataatcatagtagaatagtagagccagcaaaatgtagtaactatagcatgtttatctaacaaggctggtattaatatatattttattcatgttagatgatagtatcatgaagaagtagtgtgtgaagctggcaagcttattacagccagaacatgcatagttaacgtatttcccgggtgatccgtggttcccgggtgatccgtaattttcccatcaaaacccatgcttgctcaactttgaagtcctgtaaaacaaccaacagtgattcaaatcaaataaactaaataccataacgtttaggacagctggttctcttatgcccctgaatattacattctgaacatgttggtggagtacgttttggtatacctaaaggttggggcgcacttccaccagaacccccccatcttgcctctatttccttatttctcaacgaaatcaggtctctggcttcctgaaatgaaagaccttctgtaggggacatctggcgtttagaacgagcctttttctgcctgtcattctctatagctgagcggagatcacaattttcctttgctagtaagctggcattatagatcgccaactcacaccctttcaccaactcatctaggacttttttggtaggagttggaggacttttagaccttctccaaagtagctttttaactgaagagccttttcgatgcacatggcgcacagtataaggcgtaccaagctgtgatgaagggattgaagcacccccatggcttggagggggggttggagtacccaggttgatatttaatttttcaagtactgccttgggagttgaaggaagtatcccagttgctttgaatctgctttgaatattctctgctgtaaagacttcctgatgagctgctggataagctttcaaaaaatctagcttgtcaatatagttgtatcccaggcgccctttctcctcaataagcttgccatacgccctttttaaaggtccgaaacaaccaacatccaaaggctggaggaggtgagatgaatgggcaggcatgcaaagaggtataatattattctccttgcatgtacggtcaaactcaggcgttaggtggcttccatgtccatccagaataagaagtcgataccccccccttgtacgctcagttgtagccgggataaagactttttgaagccagcgaaggccaattatatctgtagtccatccattggcactcatttcaatcctccaattgccagggattgtgccttcatcaaaccatccctccatatggacttttcctttgaagataatggtagagggaattggccaccccctagtattgatgcattcaatagtggtaacccattcccgattccctggctgtattagccatggtttaccaggcatttctgctctggaaaccacctttattgttgcaataagacccatagcaaacccagtttcatcaaagttgtagaattcttatcctaaatcccntactgatctctggttttctgcagctcatcaaactattgaccaataatcctaggatccttatatagtactctttggcgactaattttttgtacaaacctagttttaacctccaggcgcctcttggtgaactctgtaacctagtttttgctaatagatagagatagagttgatgttgcagtatctaagattatttgcaccatttcttgtacctgggagggcctaggggcggcgccatgtatatccagggatactatccaagctattaaagcttcctcctgaagcagagatagcctgtggttctggttgcagagttctggttaagataggtggcccttcatccaatcacgtagggttataggaggtatattataaatgcggctagcttcctgagcattgcgtgttcctccattttttcattatttatagtatatttcatccaaccttcttgatctctcaattccgggcgcgttttacgcgctataaaaacatggtagttggtatgaagatagagggtggttgacgcgttcgaca

SEQ ID NO: 4600 - DNA, 3861 bp, Emericella nidulans
tacctagtattatctatacacaaatattgaccccatccagcctagagaaagccatcctcaccaacttcaccctgcaggccagaagctcaccatctgcggtgccttcggcagtggcaaatcatcatcagtcctaaccctcctgcgcatgatcgacgtccagtaaggccacatcgccattgattgcacggacctttccactatgaagcccacaatgctgcactccctgatcactgtcgtgcctcaggaccctttcttcatacccggcacgaccctctgtttcaatctcatcctagacccccacccccgggcacagcgcgccgatgcgcgagtgcatggtctcgaccccctgcaaggtcaggctttgagacaagccccgcttccttggtggcctagatgccctcattgacgcaacgaaactgtcatacggcgagaagcaactcctcgcactggctagggccctggtggcagataaaccgatgctgattctggacgaggcgacgagcacgtgagcttttttcatctatgggctgaaatttccgggctgacttggttacgcagcgtcgactgggaaactgaagtccgcgtactggagatcatcaagcaccagtgcgcagcagagactgttctcacggtgatgcattggccgcgccatgtcgagtggctggatcgcattgcggtgacgcagaacggtcggctggtggagtttgatagcccggagagactgctggcgcgcgcatcgcggttccgagagctatatacgatgtctgttcgggcggcgtagttttgtgggcggcttcgcggcaatatactaaataatgaaagatttgcgtggctatgctgtgtctgctgagtttgctttttcaagatgcccttatgcgagcgagcgttgcagtcaggaagtagaagtgcgggtattatctggaccgtccatgtaagcgaccataaaggattagaatgctatagaaaaggttatcagctcagctgtcattaacaggcttgactattagatgcatgaaatatgcgtccgttgatttaattcctaatactggttccttacactttctagacttgtttaaaccgcgggttgcgttgggctttctacctagcctgatccacctgctgggattttgcaatgggctgataagtaacctgcgcaagggtttatcaaaaagctacatatcatgatatggtcttgaaaggaaactctcctatacagttgagcggatctgccatgagcattagcacatttcttacagagtaggtagagcagagacaattatctgatgtgcttagcttccggtagccgaagcccgaggcctgttgggccgatcacgaatcaaatagaggatcactgccggcgaatgcgcaaccgagtcaagttgatttttctgcatgccaaggtgcgcattctgctcatcaccctccgttatgacccgcttgaccttttgtctagatcgcgatctataccggcgcctcatctggcatgcactggcgataataaaggccaaaactgtgagtcagttgcgccgtagttattaggctaccatgtgatagagggcgagtgaactaactttggtcgaagcagcaagcgtgactgcgatattcagcaataattctcagtcaggatcatttttcaagtaggcttataaggatgaactgagtgtgacgtgcagtaattggggagagagatgttgccataatacttcagtagctgggatgggagcccagcgatccctggcagaccgtgttaggctgatatcatcgcgatagagccctgcgggaaatgaaatagcggttacagtgggtgatcacctgacgatcgttcccacctgacgatcgattttcccctcaccgatatttcaaccaccaaacgtcaaactcttgtatctcattcaatatgactccaatggatgcggcgatagaagcaattgaatcgctaaagccaggcgattcaattaattatactaaaattgcgaaagagttcggggtcaaccggataactctgtcaagaccccacaaaggaattcagcgctctaggagagaccaatatgaagaacagcgaattctcaatgaccagcaggccaaggatcttataaaatacattgataagctctctggcaaaggcctatatatattgcatgagatgcttcggaattttgcaaaagaactgacaggaaagaaaccaggaaatcactggcctggccgctttctaaagcgacactaaattgaactctcctctgcctatacaactgctatggactccaatcaaaagtgagctgattctgcatataaatattcgcgatactttgacttattagcccagaaacttgataaatacaaggtggagccagggaatatatataacatggataagaaaggatttcttattggaatgctgtcaaaaggtctcaggatcttctcaaagcgcaaatataagcaaggaaacttcaagcagcgcctacaggatgggaatcgtgaatagataactgcaattgcctgcatctgtgctgataggaccttgctatccccagtacttatttaccaggcagctagcagtgatatacaagatacctggctacaggatttcgatcctcaacaccacaagaccttttttgcctcctctccaagtggttggacaaatgacaagcttggatatgcctggttgactggagtttttgaccgggagacaaaggataaagtacagaggcaatggaggctcttattccttgatggccatggatcttaccttaccatgaagttcttcaattactgcgatgacaataagatccttttagcaatatatcctctacattcaacgcattcactgcagccgcttgatgttgggatcttcagcctgctttcccacgcctacagcagcgaactggaggcatatctgtatatatccatgggactaagtcatattataaaacgggacttctttcgcctcttcttcccggcctgggtaaaggccttatcaagcaaaaatattatatcttcttggagaatagttggaatacatcccttcaaccctgaaattgttctggcgagatttagcagagaactgcagtcaaggccatcaacaagtgagtcctcgcgctctatattaggtgcagaagactggcggaagatcaagaagctcctccatgatgttgttgaggatgtatacagtgaaaataccaggaagcttagtttggccatgcataacctctctacagagaatattcttctaaagcttcaatgcaagggcctccagatagccctccagaataagaagaagaagcgtcagcgcggaaagcctttacaatttcaattaaaagcttcagacaatggtggtgcagttttttactcccctcaaaaaattcagcaggcgcaagaccttcagcttggaaaggaaagagctgctgaacagctaaaggcctctaaagaggagcaaaaggtccgccggcagcaagagaaagaggcaaagcagcgcctgattgaggatcacaggaaaatccaggcatctcagcaagaaatacactgcctggaggcagagcaaaagaggcaggagaaagaggatgcccgtatatcaaaggaggccgcgaagcagcttcaaattgacttccaacaggcaaagaagactccaaggaagtcctctaaagcttcaaatcatacagatacacaggacactggcccgccatctcatgttgttgttgaagaggtccctcctacagtaaatcggcgaggccgcgagatccggctcccacagcgctttcggaccaattaaaattgacagaactactctaaattattactatattatgccaccaaaaatttgagtgataatattagttgtatatggttgaattgcttcatgtttgt

SEQ ID NO: 4601 - DNA, 1742 bp, Emericella nidulans
gaaccgcggaggctggatgcttagtataatcctctgcagtgttgagctatttgtctatctacggacaatatataggacgttttggtatccttatctgccttgccctcatccgactgaaccgcagttgtgcaatagctggccttccacctccacccaattgattcggtacatggccgatcggacgggtattatttcgttcgcaaacctgccgctactatggctattcgctggccgcaacaacatttgcgcctgggcgacaggctggaatttcgccacctttaatgtctttcatcgacatgtcgcgtggattgcgacgatccaagcggtggtgcatacagttctttatcttgtcttgttttttgaaagtcagtcctgttcttacccggaggtttcgtagcatggactgactcttgcagattctaatccatggagaaaattgtccaagccgtacctcttatggggtactcttgtaagcggttccttgataactatcgtgactaatgctaatcggcacaggccatggctctgatgatactcatactccccgctgcagtaacctggttccgccaccgcgcgtacgagacattcctcttcatccacatcgtcttctcaataatcctgctcgtcgggtgtttctagtgcgtgcctaccaccatcctaagccccgtcatactaacaatatgtgtcagccacaccataatatttgaaacccacgaatattggttctacctctggctccccgtgggtatctgggtattcgatcgcggtttgcgtataatccgtgtaatatatagcaacatccatgttcgattccatcaaggaagcgaaaccaaggtacaggctacaaccagtacagccacctatgatagagtggccgatcttatcacattaactgttgtgcctggatctgctgccagcgtccgtccttgccctggacgatactacttcctctatcagccgttcagactcactggatgggagagtcacccgttcacgttagggcgctgggagtaccaggtcagagccggtcgcggcttgtcgggctccggccggtcgacgcccagagtgattaaaggagacgagacagtggatgtttcccagatcccgctgttgtcagactcgttttcctcagacgggccgacgagggagtcctcgtctgccaaagaacccagccaggtagtgatgaacctggaactaaccttctggatccgtccctatgacggctggacgcggcaactcagggaccgatgcctcaggtcaccagatttctcgacaaggagcacaatcctccttgaaggcccctacggacacgaatttccgttgtggagatacgactctgtactcttgcttgcgggcggaaccgggattgcctctgcggtaccgtacattcgggatcatattgcgcggtcggagccactcagggctaataagcttggttcaggtgcttattctgacttgtatgacgacgatgtagatgggaatggggagaaatcgcgcacgcgtatcaaagatatgcatctcgtctgggtcacgcgacaagaagcgttcatccaccgactgctctctaccgatctgagaactgcgctgggaagagaggattttcgagggtcattctacgctacttgttctcctccctccatctcaccgcttcaccaaccgcagcgccagcagccgatatcacattcagagcctaccaatattcccacatttgcccagcctgaactggacaatgacgccaaagt

SEQ ID NO: 4602 - DNA, 2308 bp, Emericella nidulans
  unsure (1)..(2308): unsure at all n locations
ggattccccgttgcacccattttatattgcccctcatcatgcctggcgctgacaggaagcccaagactttgtatgacaaggtctttgatcaccacatcgtgaacgagcaggaggatggcaccgtcttgatctatatcggtatgttggttttgtggccgttctgcatagctcgagctaactttctcgcagacagacacctggtccacgaagtgacttctccagtatgttgcttcacatcgctttgtcgtatcgattctcttaacactaacgtctgaatagcaagcctttgaaggtcttaagaatgcgaaccgcaaagtccgccggccggactgcacgcttgttaccgtcgaccacgtatgtctcattatgatccctaatccgccactcagcgctgacaggctctgtctagaacatccctacctcgtcacgaaaaaacttcaaaaacgtcgaacagttcattgaagagaacgactcccgcctgcaatgctccaccctcgaagagaacgtcaaggacttcggtttgacatactttgggatggacgacaagcgacagggtatcgtccatgttatcggtcccgagcagggcttcactctccccggcacaactgttgtctgcggtgacagtcacacttccacccacggtgcctttggcgctctcgccttcggtatcggtactagtgaggttgagcacgtccttgccacccagaccctcatcaccagacgcagcaagaacatgcgcgtccaggttgacggtgagcttcctgctggggtcacgtcgaaggacgtcgttctgcacatcatcggtcttatcggcaccgctggtggtacgggatgcgtaattgagttctgcggttctgtcatccgcgggctgagcatggaggctcggatgtctatgtgcaacatgtccatcgangggcgatgcgcgtgctggcatggtcgcaccagacgagactacctttgagtacctcaagggccgccctcttgctcccaagtacgacagcgccgaatggaagaaggctgtcagctactggtctagcttggcctctgacgaggatgccgtttacgacaagaccattctgatcgacgccaaggacattgttcccacaatctcctggggtacctctcctcaggatgttgttcccattacaggcgttgtccccggccccgacgacttcgaggatgaggctcgcaaggccgcctgcaagcgcgccctcgagtacatgggcctgaccgccggaacgcccatgaaggacgtcaccgtcgacaaggtcttcattggctcctgtacgaactctcgcattgaggacttgcgcgccgctgccaatgttgtgcgaggtaagaaggtcgcctccaacatcaagcgtgccatggtcgttcccggctccggtctcgtcaagcagcaggccgaagccgagggtctcgacaagatcttcattgacgccggctttgaatggcgcgaggctggctgctccatgtgccttggcatgaaccccgacatcctctctcctcaggaacgctgcgcttctacctctaaccgcaactttgagggtcgccagggtgccggcggccgcacacacctcatgtcccccgccatggccgccgccgccgccatcgtcggcaagctcgccgatgtccgtgagcacatcgctgagagcccccgccttggaaaggttcagcccaaggtcgacgtcaagcctgaagccgaagacgttgacaccgaggaagaactagaccacatccttgaccagcccgccgacaatgaaccccatacaaacacgcacacccctgccaccaccttcggccagttccgcccattctccgccccatggctgactaattttttttatttatgcagaggccgaggccgcctcggcctctgagctattccagaagtagtgaggaggcttttttggaggcctaggcttttgcaaaaagcttcacgctgccgcaagcactcagggcgcaagggctgctaaaggaagcggaacacgtagaaagccagtccgcagaaacggtgctgaccccggatgaatgtcagctactgggctatctggacaagggaaaacgcaagcgcaaagagaaagcaggtagcttgcagtgggcttacatggcgatagctagactgggcggttttatggacagcaagcgaaccggaattgccagctggggcgccctcttgtaagggtgggaagccctgcacagtaaactggatggctttcttgccgccagggatctgtatgcgcaggggatcaagatctgatcaagagacgggatgaggacgtttcgcatgattgaacaagatggttgc

SEQ ID NO: 4603 - DNA, 2248 bp, Emericella nidulans
tcaaatgtctagctcccacgtatatgggaagcttcacggctccaggcgccggtcttcgagcgaaaggccttaataggattggcaatctcattgttcccaatagcaactattgttcgtttgaggactggttggtacctatcttggacaaaatgttggaggagcaagaggcggccaacaagaaggcccgcgagactgggaacgaggaggatgagttgcactggacaccgagccgtataatcgaacgtctaggtcgcgagatcaaccacgaggactcagtgctatactgggctgccaagaataacattcctattttctgtccggccctcactgacggctcgttgggtgacatgctctacttccacactttccgcgcatcccccctccgacttcgagtcgatatcgtcgatgatctgcgtcgtattaatacgatggccgtacgagcggcccgcgctggaatgattatcctcgggggaggtattgtcaaacatcacatagccaatgcttgtttgatgcggaacggtgcggaacatgccgtctatattaatactgcacaggaattcgatgggagcgatgctggcgctcgtccggatgaggccgtaagttggggtaaaattaaggcggatggtcagtccgtcaaggtgtacgccgaagccacagtcgtgttccctcttatcgttgcagccacctttgcacgagcaggacaacaaagtcccgctgaagaggaatcccacaattgacaacgataatgcccaggtccgtctggcatccaacctggtatctcattggcacataccgcatggtcacgctgcataaatcgcagttggaacccgtatcatttcttcgataacagcaaatcgactccacccagtccgccgagcatcctcggcacacgttcggcattcgttcgccaggtagcgaacgaacttccagaaaagccggagtgggaactgcgcgggagcagaaccagagataagcctcaggaacaaaattttccactcaacagaaacgcgatagcatttcgtcccgaactccggtctggagccaggagcgcagactcggcagagggggaggggaagaggcaaagtttccggtgggcgggcagctgctggatgacgaatcagagggtctgatgcaggaaatcgatcggttgagtgggctgttcagtgggttccaatgatcgccacgccttgacggggccgacaacacgaatggcatttagctcgatttgcactcgttgtcacggaccagacaatcagtttccaactgggaacaaaagcaaagatacgttggcagaagcgagtgggggtgcccctttcaccgcggcctttcggcagctctcgcatagagccagggaattctcaagagagataggggctggtggcgaaagatacgtactccatagagcggccagaccagctcggatgaggatgaataagacttctttcagaaaacgtggataagaaccagcggccccaaggcctaactctgaacagtagaaatccttctgtaggctgaaccagcggtgagcgcgtctgatttggccgtggtaccgcctcattctcgcagccttgcctgcacgatcccatcaatttactcagtctttctcgcttcttcggtcttttttgtcctgaattttctcttttctctacaattctttcctcgacttcaaccgacttactttctctcgctggatccttgcaagaacatcgctcgtcctctccttcgtgaaacatccccagattctcacagccgttccccagctggctcagttgctaccccatacagataagcgtcttatcgcagcctcgcgtcccactcgactcagcattcagctccctctttctgcctgcactacattgccgcgcctgctgccttctgcgtgactcacctttcgttcttgcatagtcttatatcccgtgcttcttagattttgggtttctgctgcagcgcctttctctgttctgtgtacccttggttattgtttgaactcgaatctgtccgccgttcggcatacttctgcgccactatggacggaaacagtgctgtcatggttgagcagctcccggtgccggttcctctcgacactgagtcgagtcctgcagaaccggtcaccatcgacaccatagtgcaggaaatccccaaactccgacagagaccgtcgttctccagccgccacattcggagtcagagcctcaacaggactcaggccctgatgcggctgaacttcccaagaggctgaggttcaaga

SEQ ID NO: 4604 - DNA, 4540 bp, Emericella nidulans
gcagtccttcctttctttgtttttcgatgtcgctcggacttgtcgggaattaacctcattgggatatctccagggcttatgcccgaacccatcacacttcattaagtaactccgaggcctcccagacatgaatatcccggccgcgcccgaccaagtcccgagtgagccagtttcaactgcagatgatcgcttgtcaggcttcctacttgtaaaatagaatatggttctgctattctgtcaaatcgtccagtccccaaacgtcatgctcaaacatccatcctttggacagaagttcctccaatgattcctctgctgcattatgactcatgtcacagagggtggccttttttcaggtttatctgcctcttgggcgacaaggatgatgccttaagcggtacagtggcattagtacttctgttttccaaacaaagatatgtaggatagtgcagtcgcactaagcctaatccgggttagacgttggagccgtacataacaaacatatcagtgacttgtgagacaaaggatctcgaacctccaaaatcttagcttgaagtcggtgcaaccgtggcgaacaccgatagcctgccaaccgggcacttgtctcatattctgaggcagatatcagtaaggacggatcacaagggggtagcggtgctgcccgatacggagcgccgagatcaaggtccactgataggagggagtgcctcaatagctagaacgaagcttgctaaatgtgacactcgttgcttaagaggtgagggctggaaagccacctagcagagactatgtttgagtgtgacgtggagatagcttatgcctctggagcctactggtgttggtaaaccttgcaagaggatggatttacaagatgataggccggtctctaactagagtatggtaaccatgtgaatccagtggaaaaggcggtcatgatagtgccctgaatatacccagtgggagcttgtttactaagccaacgggaacggtctctaaggcagaaggtggtcgtacttcaatattccattaatatgtgtctgccaccaaaactaggagggtcaagtccgcctatcggcacaaccgctaagcttcaatacacggtaacctctgaacctgaagctgccatgggatattgccggtcgttggaatagcaggccatacgaaaggcgtacaaagcttatcctaaagaacttgcaaaaggattgacccagccagattatcaagccgtcggacggccagcttgcgggaggagtaaagccgaccatttcagatctgttgactttcatcaaccaggcctctatatccgctttcgactttaaaagatgctaaagcatatttgaatctatagagtctgctatactgtagaaaagtataatattatggaagctatttgaagagggtctacaatcttcggctgtattaggtttttatggtttaggaaatattataaaaaagagaaaaagaggagggaagaagcatttagctagctttctctcttttgctgcgtaatccgggaaagactttcctcaaattactcagctagattctgttgtgatatagaattcatgcaataggaatagggtcatccttaagctcagtacaacattcatgacctcgagattttactgctccaactatttaacagctgctttattccatcacgagcttctctggcggaaccacacggtcttgttgagccattcccgaccgagtattccactagcttgcagcaagtatttccatttggccggcgtccgcgaatcttcaacgacgcgggaaaccttgacaaaacgataaagtatatttctggtgagattgatataacgatgtagttcaagcgggttccacctttggggcgaagcagaatcgcagtttctagggttcagaaagcctggtgcgccaccgtttactttatgtagaagcatgtgattatacgacctctcattgatggcctatcgagatgacactggaagcctatctggctatatagcagcatccttgagcccgacgcactcaagttacaagggcttcttattttctcgcgaagaaatcctcacatctgcccattgacgccatatctcctacccagcacaagaccaacacactgggggccttgatctcaatcatagttatcatttgccagcaaccttgactctggacgtctctgagtttcagtctgccagctaccgagcttcggccggttggccttcagccggttaccattaccacacatacgagcttgtcctctctcctatgtcaaaggttggcagaaacttgcttagtatgctaacggtaggctaactacgcgtagggctaggtgccagcagttgggcccttgaggctccagggactatagggagaaggagctgagtctttcattgacaccgtgccacttcagtggaaagactgaattggctgagagatggtgaacctgcgtggtcacgcggccgatcaaaatgctgcctgcggggcttaacgaagcgcaatttagcctccttggcggctctggagttatatacactctgccaatcgtcattttttcccggtggactaacagtcaacgccacctgtcctgacgaacgatcagtatgacaacaacccacttccgccaatctcccctcaacgctcgaaggcctgtccgccgggcggcgcatccggccggtggttactatcgacgatagccgatgtccaggacgacactgcaattgcagcagagctctcctcccagggccagagggaccagttggtgcactgcaatatcaccgagtaggagtcgcaagccagagcgttccagcgttggtgttctcttcttccaccaggacccttgatgcagtcgctgcattggcggggtggatgtagggtggatgtaactgggggtcttgcgacttggtatcgctgcagaaatcagtctgaacggcccacaacttacggtgccaagcttaggctccaccgaaatcaatctcaaggggatgttctatccagcgacgagggcgctgcctctcgcagctcccgttgtcgaccggcctattgagttgttcgagagcgtcttcttgatggtcagatttgttgatgacaagcacagcatggcctatacagcctcgaattcggcagccgcggtttcttctgcacgatcaggcaacaagcccagtcgcagatccacgtgtccgttaacgcgatctgtccgtgagcgatgcgaacgcctatgggtgcagcggatggcggatcagggatctgcccggaaggagattacaatggtccatgatggaagttcttacgtaggcattggggagaatcattggtgacccagggcattgcgggcacgaccgtccacccctcttgatgctcgaggctaatgctagagggccgctagatgatatcagggataatgcaaagcgtggactgagcatcggtgcatgctaataatcgttcttagcgtgggctatcgctgttatcgccgcgctttcccgaacaatggtgaagcatagtggattgacgatattgaaggcacatacagtgggctagcactagtcgagctgatggcgctgcgcaaggctgctgcgactttgcgccgctaggactcagatccctcttccagtccgttggcaagcttcgaaacaatattgattgggcacaccaacttatagattgtgaataacaaagattgtccctcacctgctcctctgttccagccttgaattgtcaagaatttgttgacgactggtaattgcttttccatcccctccccggtcccctcttccacccgacatggctgccatcgatgtcgctcaaggcccgggtacggcagaaacgcaatagaaacaatgagctcactcgcaacagtcttttgtggcgcaaactatcgatcgtctcccaagaaatgttctagaccagatggcatggatcaggcccaccacaggtcaattaaaattggagtaaacagccgaccagtgtgacagcttgaatgacgttctgataaactggtgatcagaaagtatccaagcattacgctcgaatgcatgctgccaactatcatagacacttctcaagtagacgctagagaccagacactaagtcactgccactgtcactcgtcaactcgtcacgagatttatgccacatatgcattcgttatgctgttaattacataatctggcggaattgatcggagagttatacccacgtgccgcattacgtatttcagccaagaccatacatggagataggaaagtatgagatacgaatggcgagtcagctagcaaaccagcgtgaagcgccctgctagtcggaaaaaacaaagtaaaaaatggaatggaaaaagaacaaaaatatgcgcgtctggctcggcaccatgaattagaaacgtgatttggtaataaaatatacgatatgtaggacgagcctgccaaaagtcctgtcgcgtgggatgctaatgcttccctgaatcaagacggtcatttgacgcacgcactgcttggccgcaggctcttcgtgtcaagccttgatcgggttttttgcagggggcttggccatgcttgcatgcttg

SEQ ID NO: 4605 - DNA, 2385 bp, Emericella nidulans
  unsure (1)..(2385): unsure at all n locations
gatcgaccagggcttagagatggccactgtccgtcctggtcacagtcagcgcgtttgcacctcactccatagaaagataagtacatacgctctggatcaactttaacagcccgacacatctccggataatccgcgcccgccttatgattaagcacagcatcccagataagtcctaagccgaactcctttgccgttcgtgttaattcctccaaatcctccctactgccccatttcgtccgccttgctcccttctgctcaaattcgcccagatcatagaggtcatagatgtcatacccgtttccattcggatccatgcccttgcaacccggcggaagccaaacggagtcaatcccgatggccttcaaccctggcagtgcacgcgaaagcctgcgccagtgctggccatcggcggggacgtgccattcgaacccctggaagagagggtgttgtccggagcagtccatgaagggagtgtctgaaggcgttcacgggatgctgattctacgttctgtaagcatcttttagagctaacaggcaggagggactaaccttcaatctgtctccatctctttctgtcgtcagttttccaggggaaacagcatgttaggagcgacaacatcgttctcctgggggcagacaaagcctacgtggcgctgacaagctgcttcaacttgacctctatcgcaggtgtaagctgtggagaaccatacggctactgacagccctgaacgtgacaacggtgaaataccgacttgcgtatcaaccaatctggatgactaactgaaagtctttaaattcatcggatccattcgaatccacgggtctgtgaaacctgaacgaggcggcgggtcgggactaagcatatgattggcgaggcttagcccgcttcctatttttactcagtctgagggcacctggcgaatgacaggctagagaaaaaatttgctgaagcccccagtgatttttattgttatttctactcttaaaacgccggcttcagtccaaaaaaaggtaaatggtctgagtcggtacttcagcgttggggatcaacgtcattgtacaaatgtggatctgggtgcttccatggtcgccaaactagacaggctgagcttgagacttcagccacgaccgtggcgcggtgacgatggctgttatttcgagcgcgaagcagtcaacgtgttgatgatcatactatgcgcctgaaaaagtaagtacaggtaatttattgtcatatccctcgttgacaccttctttgagttgcctattgaacaaaacactaaagaaagattacacaaatatatatacacacaagaagcacaggtctgattatgtacctgggtatcactggcgtgaaaatgaagaggcaaaaagatgaaaacagatcaaatcacgccaaaagcagtacgcccgctagcaccgacataatcatcaccaaggtagcattggcttcaccaacaatccttccacctgaaaccaccctatccttccctgtctctaacttcgctagactaacgttccccccagcatgtccacaaagcccacttccttccatcaggtctgccgggaagaaaacccgcggctcccccttgctcatgggcacatcaagctcccccgcacgctcgccgctcccgacactcgtataattaacacagtgcaacacatccgtaaccgtggtgccggcattatagctaaccggcagggtcaatgtgtaagggtcacccttactgccctgaccagaaagcaacataataatctgccggccctcaacgcctttactaaatgccagctcgcttcccccgcggtagagggggacggtctgttcatcaaggtagtccgagccaagggagatgacgtgcttgcggattttgttaagcgtagcaatcagcttgtacaattcggaatcggtgttgtacgccgacagccagacggcctgacggttcttgggtgttccgtcgccggaaaggtgctggttctggccttgttagaacatggggatgccggtcaagaggatggtgaaagaaaggattgtttttgggagcttgatatgcatggaatggccctatttaagaatggtaaagatttccccttcttctaattttcccttctaancaaaaagaagggcatgaattgccgtagggaagggttccttccgcctttttaaattaaagtctggacgcccccaaaatattggtttttgggaaaggaacgaggggggtggaatccgaaaggaattttttttttttttaaacttgtggtaaccggaggagtgtgccctttggaaagggttcatctgggaactaattggttttggcacacctcatatttttctcttctataaatatatatattcgttgagaattccgcgacacttatttaagtctttat

SEQ ID NO: 4606 - DNA, 6642 bp, Emericella nidulans
caaagttgtgccgcgacctggctgcccttgaaaagtgggaagccattgaccacaacaagaccggcatcctgaactacgagcccaacacccctgagcaggacatcttcggcgctaacaccagcgccatcctcgcacctaccgttactgacggcccctactacatctggggtgagctcatgaggcaggatgtgagggaggagttctactccgacggtgtcgatctcttcctcaagttgcagtacatcgatatcaacacctgcaagcccttccagggtgccattgttgatatctggaccgctaacgcctcgggtgtttacaggtatgttttgtccaagactgtaattgggtatcgttcacagtcgcagtggtgttgtggcccccggcaacgatggcggctgggacacaaccttcctccgcggtatacaagagtccgacaaagacggggtcgttaccttccagaccattttccccggtcactacgagggccgcgccatccacacccatctcctcacccacattggcgccaccgtcaacgagaacaacggcaccctccaggtcggcactggcagcatcgcccacatcggccagctcttctggaacgaggtgctccggtctgctgtggaggacacctacccctacaacaccaacactcaggagatcgtttccaacgcggacgacatgtggagtgttgagcaggctaccgacgagtacgacccttttcctgagtacatctacctcggcaacggcttggatgatggtctttttgcctggatccagatcggtatcaacgcctcggccgactacaccgacaactcctactacagcattgctggctactacgatgagaacggcggccaccagaacgctgacagtgctgctttcggtggtggtggcgatggcgctgctccctctggcgccgctccttctggcgctgtgccctccggtgctgtccctaccgggaccgccgcgccctctgcttagacctcaaaactttgccatcgattcagagtgactaagggctgcatatttgatatatagacatttataataaatacaaagatattttctcacattattccttgcctcttcagccgcgtatagtaggagtagccgagtcttttcacggccgtccttatccaacaccaacctcacgggcggaagcctcctaccagggacgcaaaacaatcctttgctaccgcaccagagcacaaatgagctactgttacaacgattgggacaatgccggcgctgtcgaccacattgtttctccatcgaaggatcagcgaacatatgctgcgcgatcagtgtcactgtgtcacaaaccactctcgcaactctgaaaggacagatttccatcagtcttttcattatcttcctagggcaaccggcgacgacaagctggaagtgataaaatcggtgtgctggaggaagttgcagtccctggttggccggcggggaacctgttatgtatttgaaatttcagcgacttaaattgcgatacgtatctgaagtgtggtttttactatgttgaaactgacggtatgtaacctcacggtggggaaacagcagatgacctattgaaaaatacaaattcactgtatggtccactggcagtagttctcttcaatgaccccctagcctccgttttaacagcagcagcatcaccaacaatatcccaattgaagagacatacaataccaataacacggctctcaaaggtctatccacatgcgcagaagccgggactgagttagcgtgttagtacgcgctgtgctcatcccccagcactggttatacagtgggtacactggccccaggacctaactctatcccagcttggttggaatattgtagcgccacatttgtcgagccgttaatgtcgccccggggtcatgatgataacagtcgggtacggattcgtaaaagcatcggcgtctgagactgtgaaggtagtaggagtatcaagtaatactaaatgccgctgcagctggggacgacggaaggcgtgtgaagtactagagtcccacttatatgatgcatggtataccggaaagaaataaggtaccggattaattatgatgtatttatttctttgctgtatttttatcgcactattgatactactgaggtcggggttcgattggactacggacatatggcctactcagtccggcctcatgtttgcctagaagggctatccagcgtccaggctggagtataggatctttgtttagactatcacattatgctacggctgacgaagtcgattctcaacccagctggtatgtaaaaaacttcctcttctagtttaattcggattatccggcgtcagcttcgacagccccctgagtctcgacccatacttcataaacaggaacggaatggggagtaacaccgctgcaacagcgccgatgattgacaccgcaggaccaacatccatcgcatcgatcattggccttgcagcaagcggcaatcccgcagccatgatactcctcaagaaggtcactgcagccgtcgaactcgccgcatatataccatacatgtcgacaagatagttgagacactgctggaagatgcagttgaagccaatccctatgaacaaggccgcgaaacaaggcagaatccagtgatgaggcggcttcgcagtccatgcgaaccaaaacgcgccaataacgaagaacaccgccccgaatgccatcggtggaaggcgcccttctggaacggccttcccacctgcgttcttggcgatgatgttgtagcggtattggttccagatattgaggccgacggaggagatgactcctatcagtagggcaaggaaaggcagcgctgcgacgaccggatgccaggcgcggatctcctcgaagactatggggaagacttccagcgtcagatacatcacgccgtagacgaaggaggcgtagatggcaatgcaggtgactacgggctcggtgaacagcatgatcatagggcgagaaagctgtttcgtgacgatagagtggacatcgagcttgaggtgctcgtgcgggtggtaatagcggttgtcgttggtttccttgcgcagccgctgcgcttttcttttcaacagtaccaaagggtagacttccggtaggaagaagaaggccatgacgaaggtgaccatgacccaaatcgcgagaatgtagccgggccagcgccagttgagatgcgggtttgtgacgagggctgcgccgatgacggggcctaaggagggcccaccgttcactgcgactgcgtagagactaacagctattcctcgtctctcgcgactccagatgtcgccgagggctgcggtgacattgctgattggcgcagatccaaagaagccggtgaagaatcgggtgacgaataccgacgcggcatttgtacttcgcgaagtgccgattgcgaacagtgcctggcagaagaccgcaggcaggatactgactcgccgtccccagatctcggatatgggcgcccagatgatgggcccgaagataaagccaaccctacatcttgcgttagcaatgtacccccaatatatcgagctggcagccgccaacctacagatataaagcaacatttaaaaccgaaacctcctggctcacgccgacatattgcgcaatgagatgatcggctggcgtcatgatgctggaacccaaactgccggccagcgccagcatgcccagttggaaggtcacccaccacttataccggtctggccagttctggggattcatcggttcggcctgatcccatctgaccaggaagtcggggtccagctcagcaggccccttttcgtcccctggcgtgcccttgacgccgacggggaggatacccatgatgcacgtccaacacaactcaacggggatttgtcgagtgggtgtcgttcctgactagagccgcgccatggaagatataaaagaaagccaggcactgacccgggtaaatattcttggtcgcccctcggccgagatttctgcagtggggaactcggataagtcggcgataaccgtcgatctttgagactcggtagccctaaccggccagacagatcacgacaacacgctcgacgagctttctagcagaactgcaacgagtgtagtggatctgcgcttggtccagggatcaatcttctcacaggctcactttctagacatcaagtatcgcctttcaagctacgggttctctactgtgaaagcatgtcgctcttcgaatgaccatatatgatatatagaggaaattgttaaactcaagtttccggtgtagagattatctagtatagctacaggttaagcccagtccaagggtactgtatcctcgacgcgtgtctcgaagttggccgaactaaccctaatatatatagtcttagcttggatggcaccatcagcaaggactttcaggccattgcgctttcaatagatattatttgttctttcatgtaccaaaagctatagtaaacagccgaggcgacttctggcagagctctgatgcttgggccctgcctacagtaaagtcaacatgaaaaagaaagaagtgaaaagaaaaagaactgtatatcgctttcacaccctattcccgcctcccctccttcccatgaaaagagcgcctcgacttatatccccattatccagcacatccatcccataccgcgcgcgataggcgctcaagcttcgttcctcgcccgtcctgagcaagaaccaccgcagatgcggcagtggtttgaccagctcatccacacagtctagcatccatccgcccaaccctaacccctggtactcgggaaagaaatgtagacgtccgataggtaggcgatcgtgcaattgtcagttatcaggcgcgcaaaagcaatttgttgcatctgtggccgttcactttcattttcagggacattgttgatgaaggatggagtagcagtttcgggtgatggtgagggggtcttgtaaaggccaaaacaaaaagagttgtcaatcatgtcttgaaggacggattcgggaagagggtatgcccagtagagtgactctaaagcaaatgcagcgttgatggcggagacagagagcagggacttatcggttgagatgagaaagggctgtcgggtccattgttgggggttcttggggagggacattgcgctgaggtttttgagtctgatgtagtgctttaagaatagagaatataaactactgggtgggaggttgagatgctttttatattcgtatggactatggagtcggagactcatccgattatgcaggatgatactaagtgtgagtcatacttcaaccgtcatcgacagtgtgaattcccaaggagatttaggtgatggcctgtttacaaacataatgatgtcgctctgtctacgtgcaatatacctcgcctgctgtcaattttatccttaatccatataccatacacccacattcatgaaataaaggctgagcatagtccaactccattatggcaggaacaaggatatactgatggatatattggataagaaaaaccaggttgctaagctgttatatattagactgaggatgtacaatagactttatctaatattaatatatccctgacccaggcaacatccttatcctggtacacgttattcagggctctgtgattatccacccaacagtcctaagaatctatatatgcgtatactatgataacaaaagcgcttttagctgcttattagtgccacaaacaaggtaaatccacatcgatacatctacactattaggttctctttttgtccagcttcgattctaaaaagcgtactgaacaggagccccagcggctacgctttcgataatcttcattgacatgcaccagtcagattccaagggaccctcaagcagtatctacacgagagagtgcttaatctacacttggagccatgtttcgctccagtatggagggaatgcagtctaatctatatctgccttcgaagggtatgcatagttggtatcgtcaagggcaaacgatagccttcatctagatccagttatttgcagtcggcgaggctctggtattctatatgggcattgatagaacgggaatggcgactacttggagaagcagacagtagaagtggaggaagtccgatataggggcatattttgccggtgaacattcttactaggcagacagctggtcaagttgcattcattttcttctgctgagaagagggccctggcttgagtgtagaataatcctgtttgtaccggcactcaggaatgctgcgtttccaatctccctttacttagcactggatacctcaactgaagagatgccttaatacacctgcaatggctttgattggtcaggacaatacctagccctgtgaataatcaaagaataccatccctatcacaataccctttttggtaagacgttcctggtcctcagcagcggctcggtagtgctgctggaaggcatctctacctcacctacgcctcctcattcccttcaacatttatttaatgtttaatatcgcgttcctttattttgcccatgatcagttccggctgctggggctggctatttgtctcaacgcgattttgattgtggctatcgggatcagaaccggtggtttccacaacagcatcaagagcgacagctttatttgtctccatctccacc

SEQ ID NO: 4607 - DNA, 3692 bp, Emericella nidulans
aagaacccgagatatctaaagataaagagaggaaatgggctcagggaaccagggaaagggtggttttacaaggttcctatgcagccgggggttctccggggggcaaaaacaaagaaactcaacaagctggagggcaaaaacccccaaaaaatcccgcaatgatcaaactggtcaactaaggcaatggaaatcttcccagtggcactaaaagaacccaaatccgccgcgcctccaacccgcaaaaacccctccaacaccgacgatctctcagagatcagcaatacccatggcggtagccctcgctacgcagttggcatgtgtatgtgacagaaactcgaatccccagggcacttcctgcagaatggggcctcgtagaagagccagcacgagagtcaacgccagaaccagatcccatatccgcgccagcttctgattcctacttcaacgccgagacaaacacacaagtacacacgcctcgccccaaaaggctcgagaataaggtcaaggacaataaattatggattctgcccctcagtctcctcaaagacgatgtggttaagaaagagggcaaggataaccgcccacacctcaaattccgtatgctcgaccgcaattatatcctccaaacaatcacaaacgcagagcgacgcaaaaccaagcaaaaaaacttcatcgcgaacttgatccctcacaggtggaagcctccgctggggcctttaaatgcagaacatcaaaaacgcctcgcctggcgagctgatatgcctgatttcgtgctcggagtgaaacgtcgggaggcgttgaagcaattgaaacatgtctcggatttattggactcgaaaaataagtcacatgcaaggtggatgtcttttgatgttcagaaaccttactccgggaagacgcttgtcgaagggctaataacagaaggccttgcagggaaggaggtacaccatgggttggagacaggtgtcttcctggtcctcggagacggttcaggtagtggtgctggtgatgcttatgaaccggccaactttcccgaatccgtcgcgcttccaggcattgataggaaagtcctatctttgacctaacgcgacttctttcccaggctgagcttgaggaaattcgggcttatcacgttcgattccagaaattcggcgcgttctttaagccgtctcgccagccttgcattgatgcggttttggcattgtggaatctcgaggggtacatcagggaagccacaagttaagaacaatcacattttcaaatcgccgattcctttctatgcgacctatattctatcctgtttataccaacaatatatacacccatggcgtcactcatgctcactccgcggcttccaacaaatccgaaagtttatctaaataagcactaggcctcacaaccccctcaacgaaatcctctttactacttacccccgtaaggactcccaacgttcctcccagattcccctcgagcccaaatcgaatatcagtattcgcacgatcccccaccatacaagctcgcgcccgatcaagctgaaacttcccctcaatcgcatccatcatcgcctggttcggctttcccaaagcaacaggatcccttcccaccatcagaatcagtggcgcactcactgttccagcaccggggaacaacgtccccgagtttggcagcgtcgagtcgatattcgtcgctaggaacaccgctccccgccggatgtagtggtatgccagtgcgagcttcaggtagttcaagtggaaatcgagcccgacgaggacaacgccgacttctgggtcgagtagggattcatcgcctgctgcgatgagcttgtagtcttccgctgtgatgtcgcgacggtaggaggggtctgtgccgccgatgaaggggacattctccgagcgaagctcttgctctatgcctgtttcgccgaggacgaaaacaatgcgtttgttggcggggagattaagaatgcgtgagatgtagatccaagcgctgtatgaggaagaaaagatctcttcctttggatttggaccttcatgttagagatatcattatagatagggcttggattgcggcaagtactcaccgtggtcgccgggatccctaatgtctctaattttcttttataatccgcccgagattttgtactgttgttcgtgacaaatacaacttgtttccctaccaaagttgagaacaccagtcagcaacgggatctgaccttagactgaaagtatacgtataagtgtatacacataccgcgtgatcgcagcaactccagtgtctcaaccgtccctgggaagaggtggtctccggaccatagtacacctgagcgttatcctgcatgtcagcatctcacattgtacttcgacggaggatatagtattggattacgcgagggtaactaaccgtcacagtcgaagaggaatacctgccagacacatacgaataagtataatggttcatccattcagaccgccggactcacatcaaacttgtctagaaattccttgatgccagctggatcgccggtcaggtagcggggtaccgtcatcgccatggcagggcagagaagcagaacaggtacgcagagcggaaccaggcactaaggaaggggctggatggtcgtctatgattgtcggcgttcaaccaattttcaatgtcgaagaaatatgtacaagagaagtagagatcagggcagaggtattaggtagaacagggagagtacatgttcggagagcttgccgtctttgcgggcactagcggtccatccgtgatccactatgctgcaagttacttgagaacactacgaaatcggaagacaataaacatacgtgtctactgtagaagttactccaaagcgatttgaaccagtgaatgaagacgtagagggagtaagaggcggattagtttaatttctcctgcgtaaaaaaaagtacgagacgtcagcagtagggttcgaacctacgatctcgaaagaactagatgttttgaacaaagggttcacttatgaaaagttagctatttagtgtcgaatgacatcaaggatatgaaggagcatcatacagtctagcgccttaaccactcggccatactgactaagatgttattcagcatttcagctctgcaaatatcaatagattcatctgcttggtgattgtccattcaaacattacctaagccgattaagctccagtcgcgacacccttcattgtcttaacgggtcttttcgagcttatcctgatgttgctcctagtacgattcactaaactctactgtcagcaagagtataggtaaggttgtgtccgaagttacagtaaaatgcggagttagggctccacggcgacgcaagacgcgagacaagcaatcatttgccataaccgaccctatcttagtatctgagatattatggctagaagattagtgcatgcagtcattactccattcgatctgttattaaaggctacgtagcaagtccggccccttaaatagttcctgtgagacagcggtttctttcaccaagttccactcggccgtaccaacctgacagccagcgccgatgtttttgcatagggatccgctgtagctgagaagagcgatgtgagaacagcacaaaagtctcctgtatatgtcatcgcagagcaatcaagttccgccgagaattcaagagattttttaaagcaacatccagaatagataga

SEQ ID NO: 4608 - DNA, 3544 bp, Emericella nidulans
caaggtgtttttctggatataggcatttaagagaagtgcagggggggtttgaccctggtgtcatatactcccatccctcgtcatacggcattgcataagctcgagaccagcaaaacaagtgcgttggaactattaaagcagcctatcaaatacggaaagaacattgttaaaggatcaagttatccacggcatctaggtcatcgttgcaagcatgcgtcgcagagttcgcgcaggaggccctatttcaatgtcaataacatataaagccgaaagctgagttgaaagctttacctctgcggttctgcttaacctctaggacttcctcttcatcggcatccccgtagagcgcggtacttggatcaaatggtggtctgtaattgtcgatggcatagtcatctagatcgctatcgctgtcccgcggacgtacaatcatgatttgtccgggagcttcggtgtggtcggagcgacgctccattatcatgcgcggcggcgacgagtaacggcggcggcgtggtctgaccgatattgatcgcgaacgcgatacagtcctcctcgctgtggttgttgagtagtcgtagccgcggggttccgctgaaaagtagggttcaggagagggggagggctcgactatcaaggtttcgctcgccctgggctccatcgtaattgtctctactttcctgcgcctggatgtcgctctaactggagaccgggctcttataggtatgactagaaccatggtcagcctacttgctcagtggatatagggcacatgcatcgcactttcaggctgacgtttaagttcacggctcctctcaataacagcgtcgatttgctccttggaaagagctagctggataatgattaggtcaccctagcatccgtcagtataaataaaagggcggtttcgacttggctcatacctctctctcatagggataaccaaattcacgaattgcccgagtattgacgagattttgcggcatgcgggtctttcccttacgtggatacggcctcgtatcttttactgtctccgtctctctataccaactctcccgcgccgggacctgaatggtctcgaactcgtctcgtcgagtacgccggcgcgatggtggcgggctaggcgcggccctaggaagataaccatggtagtactcatctatcttgcgagagggaaggcgatcgtaggtatccagagaagactgtcgtctaagcattctaggccggggagggggactctcagcgtgacggcggtcaacgcgcaccaacgcacctccgtggcggaaatggtcatcatcgtagtgtctgatcggccggcgagcaggaggcccatagcggtcggtttcttgcaggcgagaatcccatcggaactcatcttcaacccggcgcggtggccgctcgaggaccgcagccccacgggagtgatgacggcctcgcgactcacgagaaaagtactcagtctcgctgtcaaaacccgagcgggaatcggagaatcgaggcatagtatgatcggatgacccaaaggggttcggcttgggcgtaccgtgggtgacgctggcggatgacaggaacgatccgcaggcagcagttgatgggaatgtggtggggtaaaagaaccgtgactgagaagaacgaaggtgaatctcaagttgaaaacgagatcagtccacagggagctgagcgttcaacgacagtactttcaacaaaacctagagaagtataataatgaagaaaagtcaagcgccgacgagcaagagcgagagagagtattgtggtgttttatatgctgagcgatgacgtccttttgtctggggatccctccacccaaagtccgtaaatagagtcgtaaaagtgatacaattccgtacggtaatctttcccacttcaggcctggtctgcgccccgtccatatccgcttgattactcttacaaatcacctgctaagctatgtttggggtctcaaaaggacggtgtatactgttgtattgtcgcctttgacctgtgattgaccgtatgagcatctgtaggcccacaccagttcaacacactggcccttgcagacactgtcaaagcgctggcccatgcatgtcttgctctcgccttatgatctacgctagtacctgaaacctgaacgcttgtcccccagttattcgattcctggcttcatcatcggcgctggcactgcactgaaggccaagaaggtgaatggggcatctccagccatgtggctgtgcaatgacctggcctttcgctattggcgtaagtatcaccagcaaatctataatgcaggaaggaagcataggtggaggttgcggttgtcgaggacagctacactgctgcaagtgaagcgttgaatcactacaacagcacatttgtcatgtgggttgaggttcaccacgtcctcatcagatacattgcgacagctgtaatggctcatcaaaatgatcaatgttaaactggacatgcccaaacatgtgcttcgtccatgagatccacatccaagcctgaaaagtctgcgtagactcatcatccttcgaagtccttatcattcaaactcaggatccccattgcccaaacgtaaggctcgatcgctgagcccatgacaaaccacctttcacgattggtctcatactccgtgtacttccaaatcggtggcttctccacgcccatatcctgctgatagggaggtccacgtccttgcgctgcagcatttctccaagaccgctcgcacccattggcaatcgcatctgctgatttccaccctgtataacgggaaatttcgcttaggacgccgatagtccagctccgctggtccggcgaggcgtattgcacccctgcgaagaaaatgggtaccgtaatctcaatcagacatgaacctaccactggactgaaaccttcaattcctgggtggccagtttgtgccccgtagatgcccgccgctatcctaccaatagtctgggcgtaatccgcggttgtagccgccgagtatccagccgccacgtgcatccaagggggcatcgaggggtggagccgcaacaaaagaatgcgggccggttaatagaaagccatgagacaggccataatgagtgtgtagtactggaacggccttccaaaaggagagtagattggtcggcatgcatatggtgaaggaggcaataaaccgggtcaagcccattgggcgctaccccaactgtcgaattgtgcatctgcaaaaccaattgctttatatacgacaattgacgactcgaaagttgagagtgtgctcgcttatttttggaagcgctaaaggatagtaaacggtggcccgctttggttctaactaaaaggtgcatctagctaaagtcctaaactcgcacaaaccggatttcctacatccggccttgcctttttattcgagcattgctgaccttttccctggctataacagattcatggtggcctgtctctatataaaaagtagtgcttatttgcggatttttcatgggatatttccatgtgtgctcccccccttcctattttcacatatatcccccccttttatattaac

SEQ ID NO: 4609 - DNA, 5001 bp, Emericella nidulans
tcgagagaatatagtagatgggtgacgaatagacctcgactattggtaacctggacccagagccgattggaaagaaccgaaaccaagcgatttaccttgcctttaatgagcgattcaggaaaagtatgaactgcgatatctgttcgatgagccgtttctcaaattcatttatctagtttcatagcagagttgttagatatatgcatcatgtcagagtctagagtagcgcaacgatacagtacctaacggtctggtctagcctctagcctcccggcatggtctagacaagttcatcgctcaatttggcatagagtttgcagcatgatcgcgggtcaacctgacttggtctgcatgtgtaggcttagtcgtggactagtcggcgccactactgagcggcagataaaagcgagcaccaaagaggaaagacttagaaagacgcccgcctcaccaaccccgctatctcgatgtcgccttaggtacgactctgtacgaatttcccctgtcgtcctcgtccgattcgccgcggcacgctgtagtgagctgagaaaaaaaaaaaagaccacctgggcagaacgggcgcagatcattggtggtcagtgtacgacccctccaagcgccatattaatttttggttatctctgcatcccatcactgcattcacaatgctgtgccgccaatccctcccccgttcgctaggtggccggtgctttcgtctcacgcttctggcctctgaattttcgcctcaatagtcgaaggttcggctgctgtgcagaactgcagattgacattgcagtgcagacaagtagcctgacctccaactcccgcgttccattcaccggccagaaagaccaccgggtactgtgattggggtgcttgtttgagaagggtacagcgtagtaataaataataataaataaggctcgattcgagcgggcgacaggcgttcattattcattccgtctcccgttctgctagtgcctgccacccctcttgactaaattcttttccctcccctcgtcctcttctttcatctccccctcacggctttgatctgctgctctcactctccgtcgctccaaactctgttgcttatccaaatcccttgcgattgcaaccgttaaactcttcaacgagtcctagcctgagcctacttactccagcccctccacctccagcttcttcattcagcgggacctcgagatggccaagctattcattgggtctgtccgtccgtctcttatggtcactacccatccttagtgtccctcacaatgactattttctttcttatgggatcgcaaaaacccccgcaactaacaaaaccacccaaatagcggcctcgcatggcacactaccgatgatgttctccgtgagggtttctcccggtacggcaccatcgaagaagctgtacgtctttttaccgaccttgcggcctaccctctctcctcgcgtaagaactagcattcacagattgcaggtcgttgtcaaggaccgcgacaccaaccgcagccgcggcttcggcttcgtgcgttttgccagtgagcccgaagcagacgcagccatgggcgccatgaacaaccaggagtacgtgcctaaccatactgcctcttctcaaacttaatactgactcctccagattcgacggtcgtatcatccgcgtggacaaggcctcggaacggcctgctgcccgcaacggcggtttccagggccgcggaggttacaacagccctgccgacggaggctaccgtggcggtggtgccggtggtacgttaccctatcttccatggtatctccgtcctccccacgtggcacgcttaacatgaaattatctccaggctggcgcaaccaggcccccggcccctgatggtcggaacccggtcaccttgtgcttgaactgaagattcacgtttcctcgttatacagactgccgacacatgacacgatcgatgacgcccagtttttgatggttgatgacgcctggaaagataatgaatgttgatccacatgatcctttggtcgcgatgaattcttgattttgctttacttttgaatatggtgtgcttcagctagtggttgacatctaatctggcattcctcatggagatacatgcatgagtaaagagagtagactcaccacagattttcactttcgctcagagattacgcgtggttctctcgacctctaataccgaccattacaccaatgaacctggtcctgactcgtcttctgacgctcaagcgctgtgtaccgttcgacttgcgctacccttgctgtcgcacagccacgtcggcactgcaggtattgactgccgtgaacgacaacacctcccctgacgtgttcacttatcggccagagcctctgaggctccagaaaccctttcgcaagtggcgactctataaccgccattttcatttttactttggagcacaatcaaagaaagccaacacaatcacgcgacaaaataatcacggttccaatctaggttctatatagtctaaaaggttggctatatacgcatctattccgccagatcgtcctctccttcattccctatatcacccctctcagcagcctcaagcgaaaccctaatatctcttttcgccttctcctcttccttatcagcctctcccgaaccctcaattgccctaactctcttcaccagatccgtgacatgctcatctgcacttcctagcccaataccctctagcgccttctccagcaaatacagatattctgtgttcttcccgctttgtccgacgccgcgggagatcacctccgcgacgtcttgtggatcgcggcatgctgggtcgcgcagaaattgtgggttgctaggctggccaatgtagaccatgcatgtcatcggggatgcggatgtggattggtctgtgcttgtgccagtagcggtggctgtgctcgtcacggggtgaaacggtgtatagtgcacactgtacccgtctatttcgcgcacatcaagataatcatggacttcctcggcgtgggacgctgggatgtggtatgcggcgccccagacgcgggttgtggaagactctagatgggatagctgctaggttgttagttgataatattgtagtatgacgcctaaaaggcaaaaaaaaaattaccggatcatccagcgtctcccagaaattgcgttcaatcaccgttaccacacggccgggctgctcgggggtacctctgtggtcggtactggtattcgcacatattacattaggacggcccttgtgtcttgtgagggtttcgaaagaaacccgcttacctggcctatatgaaatgtcagctttctgggtcgagaggcatggaagaaaggacacaaacctgccagaaccggcgcacatagccttcgatataccccggtactcgctgatctatcgtcgttttcgttagctggcctagcttgctttcacacttatcgtgactaggacataccaaaatgaggcggtggcttccatatcagactccttttgactagttagctaagaatgattaatatgttgagcactggactcacccatagccgaatacccatagatctccctttgggaagtattggcgccacgttcgaccatctgccggagctggagtttcttggcttgcgggggccatatttgttttgttcagtcgaggtagaatgagccttcgaagcctgtcacagatataaaataactagaatgccgagatgagtcaaaccctgttcccgaaatgcataaagtgccaataaattgcagaatatgtcgaattatgggaaagtaattgtccttaaagttcctcttcaaaattaactttcactgtacgagtaggtaaagtagcctgagggtaagattaaatccggctggacttacaatgcagacaagatcaggttatccagctctatcgttaagcgtacttgctggtggtgaaaggtgctacacaaatcacatcagtgtttgtcctgtttgcagtgatccagctttatgttaactactaacgttagttaactaactaacatgcagtgtggccaatgcagcctggcatcgctcgatagctgcacggaagacatgattctgctgtaggagagagaaacccatcaaagcccattgagcaccttggccagtgaagataccaaggatgccgggagtttcggtgggattcagcggctggtattttatcccggctgtcgagctcgtggtttcttcggactcagccacgaaccgatccataaagttgagcaatcgctggacggtaccacctgtgaagaaggctttgactggcaagacactccgccgagcgtataacgtccacaccagactttccagatcaattgacgggtcagatctgatccgctccgccatgttcttgacattagcaaccagggacgagctggaattggcggagaacaatagaggcccaatgaagaggtcgtcaggcgttatggtagcctcccgtactggactgctcagcgcgtcgtatccttcgatgatggcatgagcgtttgtcccgccaaatccaaagctgttgatactagcgcgcaggggcgatctgccagtatccggccaaggtatcggcactgttgggatttcaagacggtcacaaaatgggatgactctgggatttggctcgtgaaaatgcatgtttggagggatggtgcgattcttgatggcgagaacagccttgaggactccagcaatgcctgcacagccttctagatggccaatgatcgttttcacagacccgacgtacagcttgccgtcaggtataagcgtattagaggctgttcttggttcagtggggaaaaacgcatcgtgcacagcgcgcgcttctatgggatctacagtagcagtgcctgttccctgacagtcgaagatctggcatggatcccaaatagggtcaaggcctgcatcgcggtatgtttgtcgaataagttccgtttgagattctgcgttgggcatggtgatgcccttggatcgagcccgtacacgccgatcaagccactgatcgccggc

SEQ ID NO: 4610 - DNA, 2705 bp, Emericella nidulans
  unsure (1)..(2705): unsure at all n locations
cccgccggatatggttgggcctggctttgttccaaccagcatgggttttcttcatgcccagccagaatggtgtcatgtatccgggacaggtaagtctgaacactgctccgcattataccatgcctgtatctccccagatgggtacaagcagcacgtggcagaatggaccagcttcccagcaattgccctatggcccgtatccggtcaatcaatcacccgcgatggcctcagcgaagcctgctgcacccatgagcagctaccctgtttccaataatgtgcaatttcagactactcctggggcctggtcatctccttaccaaggggcgtattcacaaccttctcagcggaatcaagccccacttccctggtcaagctatcaaactcagccgttgagtacggccacgtacccatacgcacaatatcctggccagtcactgaataccggcctagcgaatcactcgggctcgcatcctctcccgggtagtttcagcagatcccacttcaatccccaaactcgctcttttgtgcctggtggtgctactggtccggtgcgacagccaaacaaaaaccactcgtcgaatattggctcttattcgagcatgcagccaaacgcccaatctcaatgggctagctttcaagatgtcaacagcaagaaccagggacaaatccccgccagcatggctcggggagagttgttgggaggcaaagactctattgctaaatgggggacaccctctcatctacccccgaaaccacctccatccgaagtaccgtcggactttgaaatgaagcaccgcaatgtaaactctgctagtcactcttattccagcaacgcagtaccggcgtcccagaacggcccgttagttgtttcaggaggcaccggcgtgccacgtccgagtcaataatgacgggctcgatggcataatactgttgtgtggatcaaactacatggttattatggcagttggcgatgattggatgtttgttatggatgtttgttaaatcaaatctgcccaaggtcgccaagcgttggcgaacggttcggaagatgccagacgacaagaatacacaaacatggagatgacttcaagtgaagacagacaaagttctttgctgggaaactaggcacactctgggcatcgatcgatgaacaaattagggaggttaggggattgacaattcttcacataatatcaaagtctcttcctccaatagcaaatatataaaatacacttgcaatacaaggctaaccgctatgtagaagggaaaacgtttacgaaaacacgtgctgtaggcagttaaaaaagttcgagtactatttatacaagaaatacatttgaacaatatagaatacatgagatgttaacagacgatacaggatatctgatttcaccgccatctaccacttgatgccggtctaccctacaaacttatctctgattgtcgctcagcttccttgaccacccgcgcatgctccgcagntntctcattcttcattgtcgcctttgattttacgggcgaattcacttcatcaagctttattttcgagattgctttctccaactcctcaacaccattctttcgaaattgcgtaaccttgcgcacattcaggagcgtaagttcattcagcgtctggagtccctggctgcgtcgcctcgcaaccgcctttgctgttagcgcaaatcgcatatctttcggcccatcaacgagttccagaatcgcacttggggcttgatcatccttcttcggctcaactcgtagcactcttgtgtatccaccgggtcggtcggcgtagcgctcacggaggggaccgaatagtttagggaggatttcgtgaggggtctaccggtcatccagttaatacaataatcactttcatggtaagccggatgactgcattcgcctccggaacattgcttcacgaacaggaaaacatacatagaatgtcgacaaggccgtcctccgactggtctcagtgttcttcttgcccaaggtaatgagcttttcagctagtcgctgagcctcctttgccttggcccatgtcgtcgtaatcgattcatgtttgaaaagagatgtaactaagtttcggagaagggcttgtctgtgcgaggactttcggctcaggtgtcggtatttagctgcgcctccggccatgatggaagttcaaaactttcgttttgggctggagctgagcgggtgtaatcaaaggtgtaattaaagtacgataatgcggtcaatataggtagaggagaaattgaggtagagaagtgcggtaaggtggttagcagaatagttcgagggtgctgtggtcgtggtgcttgaaatgaccgtggtagtcgattcttggaggatttcaatttctgctccgagccaatcggaatgcggcgagcttcacttgtcaataggcagaatttccaaactggagcttctactgtcaacctatctcacttaacaaacctactgattctttttaatgccgccctggctctgtgctcctccaaaattacattagagcgccatcggcttactccttgctctccggctgcttaatcctttcgactctcagccagatatacacacgccactgcatacctatacgtaggtagcaacctcatagacataaaacataagcaatcttaccggttttgtatgtcaatctgccaattagactgagccggctaacaagagttaccctaaggcagcgc

SEQ ID NO: 4611 - DNA, 3536 bp, Emericella nidulans
agacgatggactcagctgcggccgacaatagcgaccttttttcccttgtgcacgcggaaagaaagattctttaagacgggttttgacgggtcccttaacagattgactcagtcagtcgaatagtcgacctaataccatagacgacaaaggagaaaaactaaccgatagaacgctgaaacgtttttgtactctacggtcccccggctggtccagtcctccggcgggagatccctctcctgaaccatgtcctccgactcggtcgactcagcaaaatgcttcacccgagtcacagccccaaggctcgtctctagcacggtccaatcagtaataagggctttaacactcgcactcaacgaaacaacattcacaagcgctagaccaagcgagctcgcgttcgtactatgcatcgttcccaccgcgattcccatcagcacaagcacaaatccagcgaccgtcatgtcgaggacgagactgagccagcgctgcacggcgtagaggaggtagtatgggcgctgggattcagcgaggagagcccggttgcggagcttgtattgctcggcccagttgaaagcgcgaatcgtaatgaggccgttaagcagctccatgaagtttgagaagagcggtgatttggcctcgatttccatgatgcggagctgccgcgaggtgcgcatgtagaaggtgccgatgatacagtagaccaagacgcagagtggaatcgtggccgtgatatagcgggccgagacggcgataataatgagctgtgcgacgcagagaaagagcgctaggcaggtctggagaacagcgagtgggagctccatgtcgataagctcgaggtcctggctgaagcggttgagggttgttcccgagtcggttgaggcgaagaaggacatcggggcgttgacgaccgttcgtaagaggcgcgagtggataaccgacgccgttttggcgacgatcttgagcatgtagaagcaggccgtcgcgaggaggaaacaggcgccgagcacgccgaacatccagtagacgccgatcctcatgctcctgttcttgtttggctgagcgtcgttatctcgcgcccaccaggtcacccagaccgtcgggaaggcctgcaggaagacgaagatggccatgagaccgaagtacaccagccagttatgccagggtactgtggtaaggtagtacaggtacgtctggtagtcgctagacctgcgcgcgtccgaaatggcctcgtcagaatagggggctgctttggtgacctcgacggccttaggcatagcgctcttcatctgaatcgcggggggttgggcgattgcgaacccttgtatataatcgagccttttgcagcaatcgtcgaacgttccttgaacgaggatggtgccgtcggtatttagggcaatgatatgatcggcgtagggaagtcggtgaaccgcatgtgtgaccatgacaacggtcaagtgctgctttctggccaggccgttgggaccgaggacctgtgtgaagatatgttcgtctgtcactgggtcaagcccgctgagggcgtcatctaggaggatagtttcgacgccggagtaaagggctcgcgcgagtgcctgggctcttgtcagtacatcaaggctgccctgaccgattcaaacagacaggaattttatacataccagtctttgcttctgcccaccactcagcgaaacacctttactgcccactgcagtctgatcaccggcagtcagctcagtgaagtctttctctagtccgcaagccgcaacaactgtcgaataccacggcgggtcatatggcgaccccccgaggatattctctcgtatactgccgttggtcaaccaagcatcctgcccgcaatacgccatgcggtcgcagttaaccttcatcttgccagttaaacaatttacctcgccgagcattgccttcaccagtgtcgtctttccacaccccacagcacccacaatcattgtcaaactgtggcgctcgatccggtaggagaggcggtgcaggatcgactcatcgccgttcttccatccgacgtcaacttcgaatgcctcaatacagggggtcttctcagtcacaggagaactattgacctcgcgcggatcttggtgcgcctcctgggctaggtagttgcggatccgatcgagacactcgagcgccattgctgtctcgctgatcgactcaacaagagtgccgatgaaaaccgcaaagaggttgaagagggtcagggatgttagagcgcgggcactgccgaggatctcgtttggtgcgtcccctgagcccatcgcgtagatggtaaagcttacaatgggcgtcatgagcgtattaaaattggctggcgtctctagttagctaaattctcaaaatcaaatgtgcaagggagcatgatggaaacacacaaagcccaacaacagcaatcagaagcgagcggaatttctgggaagctaggatctcgtgctccctcagtgcttgaatcttgttaaacaggagatccgtcagaccggatatcttgactcccttcatggagccgagcatctccgctgtgattgctactcgtttctgaatagcctcaatccacagattctggcgctcgccagccatcatagcgatcttcatggccgtcaccgtgcatcctatttcaggtaagcatgctaagatttagacgggaagggaaggggttcaaactcaccgaaagcgataataatcggcgcgatacctgccgtgtccaactcattatacaataagtacaacgcaattccaatctcaatcagactcgcccacgtatcatggatgtaccggccacagtgagtaatgcgctcaatgtccgtgctcatgagcgttagagctgccgagtcatcgttcttatgcgcattgatggctgtgcttttctcaaagatcatatccaccagcgccgcgcgatcaatcgtaatcacccggtacgttttatgctgcgccgtcgcagtcgcgatcgcaattccaccgtaaacgagcgcataagcaccaatcagcagtgtcgccttactacgtgaatccggccggtctcgataaacaaacaactcgaccgtggcgcggacaaggaacggctgcgagatgatgaacccgctctgacacagacgagggaagactccagccaacagatcccatttaaaggctttggctatcggcacgaccatcgcgccacgcttatccttgttcgtaacattctcccagtgcatcacgacacggtgcttgccgtccgggtcggggagcatgcagctttcaaggtggaagaggtcacccactgataggctagtgcgcgcgcctcggaataagagagggttaatccaccagaagaggctgcggttgatgacgccagtccagtcctcaggtgcgggactcgcgtacattggtctaaccaggcgtcgcttttcccaggtctcgaggatcagaaggagagctttcacaaccgtgcctgcaatgaatatggcggagcacgtacgcagaccttggatggtccatattgttcgagcgagaggaatgtcgaatagtagagtgaggag

SEQ ID NO: 4612 - DNA, 3870 bp, Emericella nidulans
gctttacaccgtgaaggtcaaacagcacggcttttctctcctttttggtgagaaccttgccggcattttcgagagcctccagtcgtgcaacatcctctctaaccaactccgcagccttatcggtaatctcacgcagtgcacttttaacagtgtccctatcgcgttctgttagacgcgcttctcgaataacttcctcttctcggtcctcaatatcaccataacgtagaaaggctcgaaggaggtgacgatattccttctccactagcgggcgcttcggatccgctttcgcatttggttccgagtcatctccatcatcatcgttcatactgacctggacccgtgcttgtcgcttagcttttctttcggcacgggtatctcgctcatcacctgcaacaatgcgcttgcgcggtcgattctgttcaatgacgtctgctaggtatttctcgtcggctttcttcttctcttctgccttaatctcctcaagctgttccttgggtatgatgtcgtcccatgtgagatcgtcaaccttgatgtcgacgtaatcaaatgctttgaggaactcttcgccaccgtctgcttgaatgccctcagcctgttcagtttgatgcaattcagcattagcgagcactgaatcaatatcaagctgttccaacttcgcctggttgccggtctgctcgaacattctctggccgcggcgcttgaggattcgagagatgtcatcggtagagttaggctcgccgagcgtgatgcctcctcgagccatcttgttctgaatctcggaggcttccttatctgtaacacctcgctgaatggtgatgaactcaagaagaagcttgttccgtgctctctcgatcacttcctcttccacggtatctttggagacgaggcgataaacactgacaggctttgtctgaccgatacggtgtgcccttgccattgcctgaaggtctgcttgagggttccaatcagagtcaaacaggatcacagtatccgcagtcataaggttaattccgagaccacccgcccgcgtagagaggatgaacgcaaaatcactgctatccggggcattgtaatgctcaatagcaaggcgacgcgatgctgaaggtattgtgccatcaagtcgctgataagtgtagccacggtactccatgtaatcacccaggatatccagcatctttaccatttggctgaaaatcagaacacggtgcccatcgcgcttcaacttagcgagaagttgatcgaggagcatcattttgccgctgctagtgattaaagctcgcaacacatcttcacggcgagtgcttccttccaatatcttggtttccgcactagggaacatgaaaggatggttgcttgctttcttcaactccatcatgatgttgaggagcgattgcttttgacccttggtgccttcgttcaacgcagcgtaattcttcgtaagaatgttcttatagtattctaactgaacatcagaaagctcgacgcgaataattttctccgtcttaggcggaaggtcggactcaaccttggtcttcgtccggcgtacatgaaaggtgagatagccttggtcaactcggcgagtttctctgacgctgcctctgaattaaggtccatatcggcatcaacattgaccaacccaggatttaagaaatccaagagggccgaaagttcggctaagttattttggataggggtaccggtgatgaggaggcgggcgggagaattgaactcttgaagtttgatatatagttgtgaatcacggtttttcagtcgatgagcctcatctactgccatgaactgccagttgaattgactgaggaaggatgaatccactaagacatactcataggtcgtcaggagtacgttgaactttggtcgtcgaggattgccgtccaccatcagctcgtactctttaaggacgttacgagacgcttcgttcccgttatagacgacgtagttaaggtcaggagaccaattgtcaaaagtttccgcccatgatggcatggtagatagaggaacaacgacaacgaacggaccctgctgacgtctgacatgacggagccagctgataaaagcgacagtctgcaccgttttccccaagcccatttcatctgccaggacaacattgcggttcttcacccagttgaaagccatgaagttgacacctttcacttggaactccttgagttgaccattgtgtaaaaagcttggtgttcccttgattggctcgaaaggtttgcgagaactgggatgggactccttcttgtctgaaacgggtggccgggacgatcgatctagaaaacggtctatctcacgttgagcgatgttactaatcaactcctcactctcccatgtacaggaatcgtagaataggcgcttccatttcaccaagtattcagtgccgtcttctccttcgcgcattgcaattacacgctccacgatcttgtggtcctcgatagcatcgacatctctttcgcggtcaaggttccacttctctcggtcctcagggggtacaccttcgtcataattcaagcgcaggtcttcggcgagaaccttccgaacataattgtcaagccgacgtgtactccggcagttggccaagctctcagttgtctcccacgtcgcgtggtagtgagacttctcttgccattttatatagaattcgaactgatgacgatcaatgtctgggtcgctcggatcgacgccaggcttaggacgatgattaagcacaatgtctatcgcaggtcgatcatcttctactgtgttcacccagtaattaggtgttaaatcatctgcatcatcttcaaacatcgagtcatcgtcatcttcattgtagttcgaaaccttggcagcattcctggtcgagaagcgaacctcggcatgggaaggaacgttgttcgcggacgcttgaagcagtcgccgacgtttcgccttgctcgcgcgggcacgactaccgccgtactcatcactatctgagtcatcagagaacgttgattgcgttgcggacggtgtaggagctttcgaaatctgtgaggcgagagggcgccgacgcttagagcgaggcgccacgtcatcggactctgactccgacgacgattcggctacccgacgcgtcgtgcgagctcgtccactgcgacgaagcccgtacagatcaggattctgtcgaatgaagtccgcatcatccacagacggcgacttgcgcttcgtgcctcgagttgtttgaggggaggaagaattttcagcaacgggtggactactagctttcgcgctattctccgtcccagactcatcatcttcaccttcagcatcgggggaatcggtattatacgagtcgtccgcgggatcggcattgtcagaggactcggagacagcatcatcttcgggagattggaaaacagtgttcccatggtcattcgctgctagttcattgtgcaatccggcagcgtcggtgacgggagataccgaatacccgttggcgaaggcacttgtgaccccgggttcggaggtagatgggatcaccatgctagttgctatggatcgagagaggcatcagcattgtgtctcgagacgggctaggggatggctagaagagacaagggattgtagagcagcgttatgcgacccagatcatcataatttgaagctataaacccgagtgaatgagataggagataaaggtatgatgcaccgacatgattttgatgatgggttagagagacgcgacgaaacagacagagttaaaaaacttgcaattgcaggagttaaaccaagagcaaaacaggaaccagcaggagaaataaaggctaaatccgacttgatagaatttaaaagacccggagtacaagagaactgtagagccatggggtgccc

SEQ ID NO: 4613 - DNA, 2659 bp, Emericella nidulans
acgataggactaaacctggaaatatagcccatctggcgaacacaggcgcaccttgatcagtacaactcttcgccttttgaagtatctctattgggcaatactggatagataggaactgatggaataaactctagttcgcagccaagcaacatcgcaacgggacaaatactcgtcgtgtcaatcagtattcagtcgagcaagacgatcccggcagcaaatcataatcaatgcctctcgatccgtctcgcttgatggctttctcttccttaacccattggtgatagttgccaacctcattccagaccagagctattgtaactggcgctaaaagagttagtacctactctagctacgggcaggtcctgaggcatatatgtcaaagcgtatttcctctcatcaacagtgcagtctgactcactagcagctgcactggcccaagctcccatcaacatgatacggtgatctcgcacctcaatacatatcgattcaccttcgaccatgggagcgcaagctagagtgaagaacgaatattgtgtcagagtacattcccagcccacggctcctggaacctggttagctgccaaatgcgagcgctacagtggttacatgatatcggatatgaagacacgaatgtactggcaaatagctgtttgttcatggcgatgttctactcgttcagcgtggacaaattggaggtgtcgaatcctattctacagaaacaacccctgcatgttggcaaggccacatgtactgcgtggacgccaagatgaaggcatttgcctacttctgcttccatcatgaaaacaaacacacttacgcatattattaaaggacctctggctctagtgccggtgcaccgtctacgacaaatataatgccactgcaactcctagcgacgttccaactacgacgggatttaccacaccattctcaacgagcaggatgctaaccgactgtggcacgtttgaaaggttaggaaaagcggcggctactacgcttatgctacgttgctgatgatcgattcgctgggtataaaccggttgtgaagaaggattgttcagggctgtgtcctgatactttgtgtgtactccagttgtagagaggggccacagagctcttatgccactcttaacgcatgtaatgtgatgagagttgttcactaattatggaaatgtcctgctcagtaggtggacaatggtgctatcgttctaccaccccaaggaaattccaggtacatcatgcaactgcactttcaccaagtttatttcaggcttttttgccccattgtagagtaaaacatcctcgaatggacagccctgtccttttacatttaggatgcatttggcctttcctttgatctcggagtacggaaagctatggagtatatgtgcatacggagagaacgaatgcacgcggcgatagtggctcgacaggcgacatccgatgaatgatcaagaccaacattgttcaaacaagcctaggcaacagctcttatagctggctggattaatcggacgctgattgctatggctcatgggaggagacttgagatactctacaacacacgcaagcaagtctagaagaaaaatggcatatattaatcactaaagctgattatgtgcgtatcccgtggaggctgaaagcctcttgctttgcaatcccagttaagtccatgctttgggaacgagatgtgtgcagaccaatgctgctcgacccagccttgaaagaccttattcatgtaatcatcttgtttttatcttcttccacttggcggtcttttctgctgctaaggcgggggtgattcgcctacgtcccattatgggaaacgagaaaatgaaacccggaacctccccaactccgcgctcgcttgttgtatgccaaacaaatagatgatcgatagaaaaagacaggggaaagaaacaagaaacgagggacagcgtccgaagaaaggtgagatattgcggtatgcttatgaatatatgggcaatctccctcaagcagaggagaattgcgagggctagcgacatctgcaaagacagtcatctgtcagtgccgatgccgtcgtcgcagctcacctggttgaatactgaggagcccctcataaagtaagtgggtggttgtgcgactggtgttgttacagcgccaagacccgagtaggatcttgaaggaagcgtctacggtatgcaacaatctctgcggccacggtgttgaaatctttcaccttgtcacgccgcatgtcgttaatggcctctttcagtccggtgacgtacttgtcagattcttctgcagttttgccttcccgcagggatcccatttggatgagaatcttgtcatctgtcaaagttaataaatctgtgcgtcagcatccgcacgataaaaaaaggagcaaatgcgcgaacaaccaagggaaaatcaaacagcagaagcgagagggacgaggcagagagaagggaacattggcccgggggcgaggtgggttgggtgtttataggtgcgagcttttttgtcttccattatttgcgcaattggttgttccacattgacgcaccgctaagagccctgttccgaaaatgttgtattctctagaacggttgttgctaactctcccgtatttcatttgtcagttttgcttcaagcgtcagactttgctctttaggct

SEQ ID NO: 4614 - DNA, 2543 bp, Emericella nidulans
gacgcagcccgcgaatgggaccctgccggtttattcttaagccatttttttctcaatccggatatggaacccattcgcagtgcgccgatcccagaacccacggagagtcagaaagctgttttgcggccgctactcacccgctgtttggccggaaagaagatcctcaacctatctggaggtatagacaagctggtgccgcacagtaaaggtgagggtttcttggcttggcttaaacaggcgattagacccgatggctggtttgcggacggagctgttacgctcgaggatattattgatcagaacgcgggacatgaggtaacgcccaagatggttgatgaggcagttaggttcattggggacgcgctctcttgtggcaaggacgaggataaaaaggcttctgtaagggattctaagatttagatagtgggcctcataagattgtctacatagttagacaagtatatttatttgcgtcgctcccagcggacgtggaattcaagctattccgtagatacacccgcaaaccccgcgattttcatgtcttcgctgccgaagttacagagtactgagccgttaataagatctttcattgttcctggtccaaacttcagaacagcaggctgcaccatattatgtgtttcaccaatagtcgggcgcaaagattgaaagaatcggtgcccctttccaagggagagggaccatggaccaacggtgctgttctgaattgatggggctggctccactgcggctcggcgtcgttgttcctccatgagtttcaacttgtttggcttctaatgctggctactatcctcgtcctggctgacttgttcaaccagtctcctgagcagctggacacagtttcttgcattgaattgcaccagttacaaagactatgactgcattgggagccgcgatttgaccactatcaacgggataacttctgacccgcacctacctgcaaccaccgggaccggtcctccttattctgcacaagctatcatggccgattctccggccaacgccccagaggtgaaggatagtgagcatacttcagaacgattctatacgaaacggcctcagcctctaccgataacccaaactccgaaactgtcctccccctttccatcgcccactggaagcaagcacgctactgaggagcaggcgagcaatggcggacatatacgcgatgaagaaaactcgtacaacagtaaggggaaacttcgtgccgggtttatcagcgggacgtccgagtcatgggatacagagaaccacgctacgttaagcgttcgacgaccgaatgagtcggtagagagcaccaacagacaaagtcttaatcagcagaaaacaccaaattcagtcccggcttccattgcatcacctcctcgtgcaagcgtgcaattttccagacagggttctgagatagaacctcctgtcgagacttctcagtcccgcccccctccgtcgcaggcgacgacaacgatccagcgagaaggcagtcgctcttcacaaagttgaaagcacttgcaactgctcctcccttttcatcccacactcgctcagtcagtaatgcaactattccagacgccaggtttgccagcaatggtccgtccaccccggcctccgagaggggagaatttaggttcccgaacacacttgaagaggaaggaagtgatatagatgcggatgagaggagagtgcgggtgaacagcgtcctcgtgagccccggaaaaaacgacgattccgccgaggacaagaaaatgattccgccccgcaacggaagccgaatacaccaaaaacgagctgcccgtcattccatttgtatggctcgtttgctccgtttgacaattaccggcctagttttctccagcggagagaaagcgcgaatgatatacatcaacagcgcgagggcgtgtcggaagacgagggccgtgatcgcctaagcagggatgctgcatggcgacggcgaagcgcctggctcattaattcacgtggtctgacttacggtggtcgacagtcagataaccaagcaaaccaagaagacaaacgacccagcaacctccgccgcttaactggtatagggggaccctcagagggcggggaagggctgcctgcgccctggaggcgtcaccgggctgatcgtggctctagtctgagcgcccaaaaatggaaacaaatcaaggctgggttgaagctcatcggacagcgacgcaaacccgacagcaccgttgaccatgccaaatccgcggaattactggcagaactggcgtccggtattccagcggccttacttctagctagcatgtttcaaagggacgagcatggaagcaagcggattcctatccttcttgagcaactcaaggttcgagttacggacagcaaaatggactcacactccggagatcgtcatctcgtctttcgcatcgagctagagtatggaagtggcatgacccggatgaaatggattatacatagaacgttacgtgacttcgccaatctccatctgaaatacaaacttcattttggaacacagaagtacatccaat

SEQ ID NO: 4615 - DNA, 2895 bp, Emericella nidulans
acaattacaacaatctgtcgaatggttccaaaaggaggtcgctcgactaaatgaagaaaacgccgggtcacctcaacaaatgctgcccttattgccactcatacgcaagaactccaaacactgcgacagagctcggcgcgcgagatcgagcagttgcgatcgcaaaacgaacgtctgtccgtcgacctgcacgaacgcattaaagcagagatcgaaacggcgctgtcccagaagaatgctgaactacgccggctgcgcgaggagctggagagcgcgcgcgataaagtcaaggaactccaacagcagatctctgcccagatgaacgacaatgtcatcgcgttccgaggggaagactactttgaggccgcatgtcagaaactctgtggccatgtgcagcaatgggttctgcgcttctcgaagcattccgaccaccgtcgctgccgcaaacttattgaaatcaaggatgagaagatagccgaccggttcgacaatgctatccttgacgggtccgacacagatgcctaccttgctgaccgtgtccgtcgacgcgacgtcttcatgtctgtcgtcatgaccatggtgtgggaattcgtctttacacgctacctgttcggaatggaccgcgaacagcgccagaaactcaagtcgctcgaaaaacagctcatcgaagtcggcccgcgcagttccatccaccgctggagagccacaactctaaccctgctatcccgtcgacaagccttcgcaaaacagcgtgacagcgatactgaagcggtcgcgctcgagattttcgacactctctcccgccttcttcctccacccacccccgtcgaatcacagctcctcgactccctacgcaaagtccttcgtgtggctgtcaatctctctatcgaaatgcgcactcagcttgcagaatacatcatgctacctccgctacagcctgaatacgacacgaacggggacctcgcccgccaggtcttcttcaacgcatccctcatgaacgagcgcagcggcgaaactacatccaacgaagagctgcaagcgcaaaacgccgtcgtccgcgttgttttgttccccttggttgtgaagaagggcaatgacaccggcgagggagaggacgaggttgttgtctgcccggctcaggtactcgtggcgagaccaggcaaagacaagcgacttaacagaatgactagtagcgaccgcatgtctattgacgccagtcgctcggtgcatagtattgcgccctcgagcatgaatatgagcatgagtaacgtgatctaggcgtcacactagactgcttactcttgttttttctgctctgcttgcttgttctttgcatgaaaaatgggttctggcgtccaaggattgcttgggatgggtactaatgatattctctttttgtatttttgagaccatgttcattatgagtcttacggccttatgattttgctttagaacagaccttatgatgttacggctgtacgtatgtaaataataatgttgattttataagattttattcgtttattttttattttgaaaaagcgccagtttgtctcttgtgcgctccccacgcttaaaatcaaatacgatttatcagacttccatgatctacgaagtacctgcgcaccctcatactcagtgcacggcagcatcttctatggatgtctggccaaaggggaaccataataatataaggcaagccagaaatggatcacgtgtttgtgttacattgggcgtgtggtttaggggtataacgctccattcgcattggagaggtcccgggttcgattcccggcgtgtccacttatttttttgtttgtgttttctcttcccagtactgtttgctttcttaccctggaaacctatgttatctattttgctcgataagataccaactatgattacacctagatctgttacttccttcctcgttaatcctgatctttgagccacagagtcagtggaaatgacaaaattaatgctgccaatgtcataccaactcaagcaattgagcctcggcttctcctgcggggaaagctcctgctgcctcggactctagtcttcattccagacaataacatccaaaatccctaaccattctctcgctcggcacaacctcagaaactcctctcttccccagtcggtctatacctacccgcttctctatacgatacagaatgcctgacttccaaacgcccccaccatcctcctccatcttcacactctcctttccaacgccccacatcctcctcgtcactatatcacgagagtctcgcatgaacgcgatccccacgcaaggccacaaagacggttacgcaatttggaactggtttgacgaggagccctcgctacgggtcggcataatcacaggcgcagggagcaaggcgttctcagcgggcgcggatctgctcgagcagcttgagttcaagacgaagaatgatgatgcatcttctgcttcaggtaaagggacagaaggggtgagacgggaaccaatgccaaatggctttggcgggatctcgcagcgcagaggcaagaaacctgttattgcggctgtgaacggactcgcgctgggtggggggtttgagatttgcttaaattggttcgttctctgcgtcgctctatatttgtcgttgatgatgcgattctaacgggataatcactagtgatatggtcgttgcctcaccaaccgctcaattcgccctcccagaagtccaacgcggcctctatgcgggggccggcggcctcacacgtattatccgcacagtgggaatgcaggttggcacggagctcgccctgactggacgccgcattagcgcgcaggaagcaaaatccctacggcttgtgaatcgcatctctgagacaccagagaaggttctggatgatgcgatcagtctg

SEQ ID NO: 4616 - DNA, 2886 bp, Emericella nidulans
cctcaccttctgttttgaagtcaatgagaggattaatgtctgtgaaggatcggtgtcgaaaaccccattccgaggttgatcgatatccggatggaagtgggtaatgggattctgtctgcgcagtatgctcagtaatggatcaatgtacatgtttcgcaatgtacggcttggcgtaagagctgagcgagtatggccgacaaagagatcgtcgtcgaaaagccagacatctgcctccacacctgtacacccggcctcaagagcagaataaagaggcacacggcgccaataatcattatgtgaatggcaggaaaccgggaaaacatcccgtgaaatgtccgtaggccagcgagtgatgtccgatgggtcagcgctttgaggctgtcgccagtgatccgctactcgatcgatctcgtcagggaagaacgagatcacgataccgcaagccagcgaaagaaactggaaaatacccctagtaactcatcagcaagttctagtgcggaggccggctgtgcacttacaacatggtgaggaaagccaccacgctatataaaagacagcaggatcgggtaggcgttcggagccatcgagggcgatgctcagagtgcttggtgtggagaggaagtaaaggaagagaagattccaatggcttgtctttaccagaagcagcaaacctgggtgagaccgcagcgatcccgtgggcccatagcgagcctggtctccctctttgctggtgtttctcccgcgcttcttccgagtttgagccgtacgcagattccggcacctcacggcagccaacagtggcagtcttattgtctgctattttattgctgatactttctttgatatcctggtgagtgctgctcggcggggctggaagtagaggggcaaagcatggctgagaataacgagcaggggacgcaggggatgaagaggacgacatgactaagaatgggcattggcgtaatagccatcaatacgcagacactatccaccggttctgattctgtttaacactatctcgagcagaggacgtggagctatctatttatccttcccaacatagcgcaatccgggcaccgggcccttctttccctctttatcgatagactactgacccgtggtattacattttcaggctcaggttccaaagcatgcacacagggaaaagcaaaggattcgtcgcccaagcaaagcatttggccgggggaaatcaaagacccagactctggagaggattcaaacgaccatgtgctgcaccgcctgctcctattggccgccatggctaccgtcttaagccaaatccaaccccccttcaagaggatttgcaagcaatcagtttatccacggaccctcttgttgatcatgtatcatcagtcggtgaaaaagacctcatattctaaagacttatgcagatccctagcccaggtctactatttagcgagcagggacagaatacccgtccgaactcgctcgccacccgctggagaatccatattcgttgctgcgcttcggatgctcgttgacaggaagaacaccattccgggcttttcagttgcttctagaccgattcgtcgtcaaaataacaagccccctgaagccagagatctcatttaatcgagtctcgaacacattcctaacaactaggaaccgcttttccatgatcgtcacgtctctcgcctcgctggcgttttaggccctcaaaagactgcgggactatactccggacctggttcgtcaggacatgatgcttgtttgtcccttccgctctgtgggaagtctcgtctgcagtcagggagggtgtttgctagagtaacgtctgtctttgactacagtaatagatcactcgcaagacctggttttactttcaacatcctattcaacatcttgagcaaccgggtcggctagggctgaggaagggtattttcaaagtacacggcgagacaaggttctggccgcctaatgcctactacaaaggctagagtatcgggaaacggtcggtcaagctccaatgtctgtatggtgtagatcgtctctaggcagatatatttcgtcacttaccgttgaataatggcctggaagcgaaccaagcattacagcagcaaggcagaaaggcagatctggatggtttggccaagcaaccgtagcacaaccaattgccggcgatgctgttgagcgctttgggactaaagtaatcaagtagagatcaagatattaccaagtgatgatacctcagtaatggactaacggtaagtaagtaggccgcgctacacaactgcctaaaactaggcagaaatgcagggatggagaaactctgcaagcctgcgagtgctaccatacatccgatggtgaacgttatgctacttcccgattgtgggcgctgctaatcgcagcaccaatttcataatgaaagcaccaaaaaagaattctccaaacagcaagaattatttggccatactgatccgttcgcgatcaaaattagagaaacagtttgacgtagacaattatatacagcgatataccgcggcagaatggctggaagcagaagcggtaggtctgataagatcacgataagataaggccccttatcaatgcgaaaaattatcgcactccagctcaagaagatccgacattaccagctcgtcaacgatcaagagtcaacccacaatgcctcacaaacacaaacgcaggcataatgacgaaaggtaaatattctcaacaatagaaagtgcaatatcttacaggtccaacaacagcgcctacgacctccccccaaccttaatcgccaaatccctccccgcgcgagacccgtcaaaacctacaggcaaaggcaaaggtaaagagaagggaaagccgaacgcaaaccagaaatctcagtcgaaagatgga

SEQ ID NO: 4617 - DNA, 4274 bp, Emericella nidulans
tccgccgacctactcatataattatttcgaacccatgcaagaaagactcttcaaagaaacgcaaacgcccgcgatgataagcggatgagccaccgctaccgctattccactctatccgttacgtgtgatcgctccacttcgtcttcaaggtgggcaatactacacccgcatttcgttgtaatttcagttcgagtttgtcgagttgcccaagctaccttacttggtaaaccgcatttgtatcgttgcttgcgtcgggagttgggttgctgctgcatagcatgcaaccgttatctttaacgcattttgcttcatccgtgcagttctactttctttttccctgttgcgcattcggctagaacctgtgcgatgcaccataaaccgcgaggtgccagtcttttgccttttgtattgtttacctaatttcatgtcttatgagatggcttgcggcacactggacatttatcgtgcgatgtttcattgcagccaacgcaattatgtcaagtgattggctctcccatgataataatgttcgtgggtgtttcctttatttcttacttagcattatctcatctcgctctgtttccgttgtggatgcatttggccagccaggtttctcaacggcgtgcgttgtctgagactcattccatgttcaaaagcccaagtctggttgttaatttagtctgctgatttgttctatgcatggcgttaggaggttttgtccgttcctttacggtatttatcttgctcgttttcttagggaagcgttcggtcgtttagctgtatttacggttcatttcatgggagttttgggatcatatcaattgcgacagatcgcaatcactacacagaaacagactgattgaatcatcttccaatattttccagtagtctttgtagatggtaaagacattaattatgatgcatccacagtaatcgtcaagttgatgttcctggtcacatgaccgcccgcaccccccacccccccaccggctgcgatccaaacgccccaaacgcccgcactcccgcaccacctcagaatccgcccgaaaacgcggcctggaaagctgtcgttcataacgccctttttctctacccccacccgccaatcagcgcttgacgtcgctttttgactccttgcaactgaccctctagtctcttagtcattcagtgagcccaaacgcgcttcgaatcactcagtcgcctaccgcccacttatttaaacccctttctcccactcctacaaacaatctttcttcttttcccctctcttcccgaatccctccttatttcgacctcgccgccgccacttcatcaaaatattcaacttccatcaaatttcatcccttcaaaaactcctatacatcttttaatacctattcatcatgtctggacgtaagtatttctctatctcctaaatctgtctcccactggacgattgtcgtcgccgttggaccgtgtcccaaaacacgtgacgtcagtcctttcctccagatcaaccctactttactcatcctcaacctccgttattctttaccttctgctaacactcactctacaggcggaaaaggtggcaagggtctcggcaaaggtggcgccaagcgtcaccgcaagatcctacgtgacaacatccagggtatcaccaagcccgctatccgtcgtcttgcgcgccgtggtggtgtcaagcgtatctctgccatgatctacgaagagacccgtggtgttctaaagtcttttctcgaatccgttatccgtgacgccgtcacctacaccgaacacgctaagcgcaagaccgtcacctcgcttgggggggtctacgcccttaagcggcagggcctcaccctctacggcttgtgtggctagatctgcctgcctcctgatatacattatatgtttcgtctttgcgttttattttgcaacgcaatgggaatatgggtctcggtagggtgttattcgttcggtcgctcgggattttggttgggatgatgcctatcacatacagattatgaatcgaattgaatcttatatctagattattgtctctttcttcttctcgttcgccctagcgcttgggatgatatgtgtggcctgaccagtgtcctttttagatctcgtagagcttctgcctaataaacattctttttgtaaaacaaagtttgaggctgcaaagcgcaagtagctgatgttaaagaaggatgggcgttcttggaactttaccagcttgtaggggctccaaacctaactgtgagccgtaagccccaagcaatcttgccattttaggccgctctctagccgatcgatgaataattttaaacctgtggtctggtaagtggccatatccctggtatggcgcggttagcagactaacaattattctctaggcagggagatggaacagagaacttccgtatcaatctctcatcatgacactcccaatcaaatctgctttgatttggtggactgtaccggccaattttttgggtttgatcttagtcgggggcaatattgggaaactgctggtgtccgagatactcgctgatcttcgtcaacatgctgctcctttttgttgataggatcctccagcttccatacttcatcctgcactccagaaaaggcggtagataggagatcgtgaccgaacaggacgctatccggtcctcatttgctgaggtgaagcttgccgacaatagctacactaagcattcagacgtgtaagtgatacctttgtcagaaagcccgaacgaggctgaagaagtttgattaaaggatagttttcaccgccgtttggacgcattagcccaactatcgacgaccgaactcttagatagtccaacaagtgccccttcgctgcggctatgtaactaccaagctgcgtaccgttaagctaaacgaaagtatctcgcttccggcaaatgcaaaacaggtaatcatactggaaaccttggccgaacagtggagactaaaccaggcagaagagatataccgatgggggctatctacctgccggaagcgcggggcacgatgcgctacccaatcctcaggtactgtgtatactatacagtctttcgaccctttacaaagcgcagcggaaatggaagaaagtgatggcgacatacgagcaagcactctcagggtatatggccctgggacgcttgcacaccagctgggggaggttgaatctgcagaggagccgtgccgagaaggcttctgagggaaaatgccatgcttggcctataccggtatacagaccttatatttctactgatccttggcccgcctctaccatggccaaagttgaccaaagatgcgaaagtgatgtctgaataatcgctgggcatcgacaggattcgtgggtcagatcatccagcaccactggatataagtagggcttcacacaatatatttgcaacaaagcaacttcaaggcaggagcaggatcaaagcagtgaaggcgcagtacgaactcccagtgtcccggcttataaagacgctgagcccaatcacaactacactatcagtacggtatatcctttgccgagttggcgctgcgcagcatggacaggcagaagctgaaaagatgtaccgccgaggtctaacaggctacagatttgtgttgggtccaaacatcgtgggcgcaatcagtgggtcagatgttgaacgcgcaggcacgacttgcaagaccttcaaagtcctcaaccactcgtcaatgaggaatgctgaaagctttcttatcgttgcaacctcttcagagaatatacggcgaagcccaaagaacttcgcgttgattaaggttgattatttcactttgatggagatgcttgttctatcgtgtatatctaatttattattccatcttattttctaccttatatttctccattatcattttttttcctcgttttccttctcactttcctattttatactccctttcttactacactctttatttttacatttcttcccttttttatgtattccttttcctaatttttctgattctttattctttcttctttatatttactcttcttctttctctcttactctctcttcttatatcattatatctcatcttctcttctatacaccttcatatttcattccattcatactccatatctttttttattttcttttcactattatcatcatataactcttttttatctcctccctcctctcttcatctatactttccattcctctttttattaattctacctcatctctatccccatacttacttttctactactttaaatttatttattatcc

SEQ ID NO: 4618 - DNA, 2396 bp, Emericella nidulans
tattactgaccacaagaacctggagtacttcttctccccaaggaaactgacagagcagcatgtacaatagtccttatttctcagccagttcaacttcaagttagtatataggaaagggtcagccaatcagagagctgatgtacttttatagagagaccaagacatgcctgataataaagataacagggtcaagtcttgtacaatacaactctttagtaaaaaatacttgggaaaaatagtagttgccactcttcaaccaaccagagagccaccacgcaagccgtgtgagaaaggtaacatgtggaaagaggcactcaagcaggataaagggtataatagggcaatacagtgcctgaaggatggagcaaggaaatttcccccacatctacagttgaaagtaggaacctcggaatgctaattagacgcccaaggctatatcctcttccgcggaaggaggtgggtacctgggagtaaacagctctgtacaaatataattcaagctgcgcacaactctatattgacaggacatcctggccgggagcaaatatatatactagttagccgtgagtatttctggcctaacatgtcccaagacatcaggagatttgtccgaaactgtgatatatatagaaggacaaaatcttggagggaccagagaaagggactattaaagcccctccctgtgcctgatcatccctagcaggagatttcaatagatttcatcacagacctaccagagagtaaaggttgtacaaacatcatggttatcacagaccagttaaccaaaggtgtgatactagaaggaatatcagagattgactctgagagtgtggcctgggccctcgtacgagtacttataagcaaacatgggatcctgaaggctattaccttggacagaggaagccagtttacaagtaatacataggctcgcatatgtaccctgacagggattaaccgccgactatctacagcccatcacccctagactgatggatcaatagagaggatgaacagtacagtagagacctacctccgcatctatacctgctatgactagagggactggaacaggttactcctacttgcagagctagcaattaatagctgtacattaacagcaacaggggtcagccccttctacctaagccatgggtataacctcagcctatttagccctaccgaggaggtagagcaactagccgaagaaccagccaagagtcctatccagaaaggggaagctattatacagaaagttaaggaagccctagactgggctcaagcctccatggcctattcctaatagaatacagagaatcaggctaataaacacaggagcccggccacaaactaccaagtagaagataaggtctggctaagtctgaagaacatctgtacagaccaacccagcaagaaactggactggaagaacgccaagtacaaggttataggcctagtaggcagccatgctgtacggctgaatacacccccagggatccatccagtcttctatgtagacctgcttcggctggcttcatcagatccacttccttcccagaagaataatgatacccagccccctggcatcattgtgaacggcgagaaagaatacatggtagagaaaatcctggacaaacgtcccaggagatacaggagaggtcaccggctggaatacctagtaaaatggtcaggctatgctcggccaacctgggaagctgccacagctttggaggaagcacaagctctggatgagtggctggatcatacaaaacagtatagacttcaggacggctcactaaacagagatgcatatataaaggctaaagcgacatgacctacccctatgacctgtacttcctacatgaagaaaggggggggggtactgttatgggtcctttgcctatacaaggaccttagaccttagtgactcggccaaggcctgcgctgtcctgaaggcggtgagccacctacaagacttcctcacaacaacaatccttctttctcctttcttctttagcgattccttcctgtacgtacggcacgtctagataggaagatccatctaaatacgtcccttaacagcttacatgctgtcagtgtcagaatatcatgctttttaatggtatcagtgactttgttggcaatatccagaggtagaccagatgggggtagagtagacttgttaaacccaacccacgaaacccgccccaacccgccccgacccgccaagaaatgggttggatcatgctttctgaaaacctgctgggttttgggtcatagtgggctatcccgtggataagcaaataacccattggtttaaattattgggtaatatgggcttttgggttatagagcaacccaaaatcctagatagttatcagagcacactggcggccgtt

SEQ ID NO: 4619 - DNA, 4843 bp, Emericella nidulans
attcacaagtctgctgggctcgcagggattgcccctccggtcaagtctgggctggccctatcctcttccgacattctagcttcctttgggcaggtcaaagatgcagcccgcacctcattgaaggagtacggattcgacaagaccgagggcgtcatgctctctggaagcaacagactctgtactgccctcgtcgtcgaggcgatggatgaactcggatgcccccttcgcacggcatcaccaggccagcccctcgcccgcgtcgccttcctccctcagcatggccgcctcatgcaatgggtctacgaattccttgagcgtgacgcacgccttatcaacatcgacccggccagcggccagattacacgcacgcacatcacggccccgcgcaagaccagccaggtgatcctgcaggaagtcctggcatcagaccccgggtttgcagtccccaacagactagcctactacgccgggcagcagctggcgggcgtcttgagcggctcgacggacggcatccgcgtgctgtttggcagccctgagggaagagagctgaccgcggccatgtactgcgagcataccttcaactgcatgagttacgcacagatgcgtgaagtcacgaacctcctcgctgagcggattggccgcaccggagagacgctcaaggttctcgagatgggcgccggcacaggaggcaccacgctcatcatggcgccgttcctggcgaccctggctgaatcgggcgccctgcccattgaatacactttcacagacatttcccccagcatggtcgccaacgcccgtcgccggttcagcaagcaatacccgtttatgcgtttcgccgtgcacgatatcgagaagcccccggccgacgagctcaggaaccagcatctggtgctcgccagcaatgccatccatgccacgcacaatctcggggtctcgctgtccaacatccatcaggcactccgccccgatgggtttttgatgatgctggaaatgaccgaggtggtcccctttgtcgatcttgttttcggcctgctcgaggggtggtggctgttcgatgacgggcggcaccacgccgtcgtaccggccgagcactgggagagtgagctgcacagggccgggtttggccacgtcgactggacagacggcaacctgcctgaaaataccttccagaaagtcattatcgcgctcgcgtcgggggctcagggagcccgtctgcccaagccagggcccgtgcagaccctcatccccgagttgaaccgggagaatgttgaggcgcgcacagcgacagcagagagcctagttgcaaagtacacggctggctgggagacgcccaaactccgtgctttagcgagccgggccgagaaggagtctggcaaaacacaggcgccgcacgcagcaccaggacgcagagcgcacgaggccgtcgtcatcgtcactggtgcgactggcagcctaggctcacatatcgttcagagactcgccgagacaccgtcggttgcgacggtggtgtgcctcaaccgtcgcagcagcagcaccaccccagagaagcgccaacaggcagccctaacagcccgcggcatcaccctgtcccccggcgcacgggcaaagctccgcgttttagagacagacacttctaagccacagctgggcctcccgccgcttgagtacggctggctcctcgagaacgcgacggatatcatccacaacgcctggcccatgagcgggacacggccagtgtccgcattcgagccccagctacaggcaatgcggaatcttcttgatcttgcccgtgacattgcagaacggcccttcaatggttccagccgcgtgggcttccaattcatctcctccatcggcgtcgtcggattctgcgggcagtcccgcgtgagcgaggaccggtcccgctatctgcagcactgccgtccggatatggcgaggcgaaatggatttgtgagcgcatggttgatgagacccttcaccggcatcccggtctcttccgggcgatggtcgtgcggcccggccagatctcgggctcgtcgacgagcggtttctggaacccggtcgagcactttgctttcttagtcaagtcttcgcagtcgctgcgtgcttggccggacctgcagggccagatgcagtggattcctgtggattactgcgctgctggtgttgtggacctgctccatctcacctcacgaggcgacgaggcatacccagtgtaccatatggacaatcctgtcggtcagaactggcaagccatgaaccatgtgcttgcgtcagcactcgatattcccgcatcgaatatcatcccattcaagacgtggatctcaagggtgcggcggtctccgctgccgatggagacggagaatccggcggcgcggctggtggatttcctcgacgaccatttcgagcgcatgagctgtggcggcctggtgcttgacacaagcaaggcgaaggagcactcgaccactatggcgggggttgggcctgttggcacggagcttgcgaggttgtatgtgcaggcttggaaggatatgggctacctcgcctgattgcttgagcttacagatattctttgtttcgctaactctggttttagtctggcgtattctggtgttgggaatgattcattgtatctagactgttgttactttgcttacaattccatattattccatcagtttcatcaaacacacttcccatcggctccagctagctcacatataggacaactgcatattaggctaggccatgccctgtaacttgagtagaaacatgagatctagctctctgcatagtcctttatcaatgcacctgcaatatctcttttaggtagctagagcatgtacagtgacagcgagtttttattccttatagatgcttgaagaccctttcctcacggaatagatgcaatctgtccgtagtctacactatactatataaatactgcataagcagacagtatcaagcgagatcgtcattactgatcagtctagagaagctgcaatgtgtctatcactcagtggctaactacagtggtacgtaaagacatggctcaatgctgagtccggtctatatcctgcggccctgcatgcactcgctggtagtatgtgactagatcttgtcgacaacttaaatagtgctggtaacaatgggccttagacgacgatccagcatagccacaccatataccccacaaatttagagtactgctttcaaaagtatatcatctgctgcctagccacgtgtgtgacaggcgttgcggatagtctaacggagttagaggctagccctaatttgatgcaatacattgcaggtcgatgcaggggctaacaggaaccagccagtcacctcaactccgctatccaatcggactctacactgttccttgctgtgtcaggggcgcacggactttgcatggatttgcagactgtaagccctaattggatccccggagttacaactccgttaactccaaccttccctctcggtgcaccgtaagcatggcaacacagtaagccttaaccagcagttgatcctaaccagctccagtgaccacgccatatgcccccggctggccggagtatgctggagtatggctggagctgctggatctgggcgcagccacgcgcaatctctgaccggctattaaagctcattcgccgtaccagtcctctcctcctatcttgcacacccatccggcctgtcctaatcagcccaatcacaccaggatgcggtttctgcttcagtcaataacactagtcgctgcggcgcgcgcggcaagcatcgacctcgaatctcttttcggcccatacgtctcgcctgaaacagagatcgccgaggttggcgacgcggattttgacgaggtcgtatcacccagatggtccgaatggaggcctccgacctggacaggcgcgatcaagccgcagaccgaggaggatttacaggagattgtatacccccttcttcttcttcttcttcttatgcctcttgttctctgtttgcctttgtagtgttgcttcttaaggaaatagtgtactgacgaggcaggtccgcatcgccgtcgcgaacaatgtcagcttcatggccaccagcggtggccacggcactagtctgatttacggcaccgtcaaagggcttgatatcaacctggccaactttaacaacgtggacatcgatctggagtccaacaccgtcaccgttggtgcgggcgcaaagctgggagatatcactgagccgctctataaagcgggcaaggccatccgtatgccccctcattctctccttctccttcttaagcatgccgtctaatagagacagcccgcggcaactctccctgcgtcggggttattggcgccactatcggcggcggaattgggtacgaaacagggctcttcggcctcggcgtggacgcactcgtctctgtccgcattatcactgcgacgggcgagctgatcactgcgaatgagacctgcaatagcgatctcctctgggctatccgcggcgccggtgcaaacttcggcatcatcaccgccgccacattcatcatgttcgaccagccgaacaacggcgacgccgtgatcggcacgtttgtgtataactcatccaagagtctcggcgtcttcgagtacctctctgtcctcgataatgtcctccctcctgaactgggagtgcagctctcgatcgggtacgaccgcaccatcaacgagaccctcttgaccgtggacatcaagcacttccgcccctgggccactttcgtcgaccactgggagcatcgcgaggcgctcggcccgatcagccggaacgtatcgaacgtcactcttgtcgagctgtacgctggcctcga

SEQ ID NO: 4620 - DNA, 2015 bp, Emericella nidulans
aagtagttagtgagtacttagaaacttacttcttgactgcttgcaccagactcaagtacttgccagatatatatgacttctgatgggactgttcaacagcatttgtatagttttgtaataaatcaaagtaataaggctgaatcttagagcatgctttatttaatcctgccttgatcacagcccctttcttttgagatgcccaattctggacattagcattttcatactctatatcagttagtaactggttaccaagcagtaagtaagtattcagtacttattaagagatccaataaagagtcataatcatcctcggatttgcagtctagaaggctcatcattcggctctaaaggggagaaccatgcttattagttctaatacattttaagattgtcctttggaaatggactctgcagaagacaataatatgctgtaaatgccatgttatatcttgatgttgaggatcaatttcagatagatagcgaccaagtccttggcagttagtgagtattttggaagtagttaataagtacttactggtgtattgttttgagtccatatcaataataataccatggatcccagaaccatggataggatcaaaatatattggctgatgggaaatcctctgaacaaggctgaaaacccgcttgaaaagtaaataataaccctcagtagaatcaatactggtaaatactcggagtaatgtgataactagtacccgagtagttagtaattgcttgccaagtagttaacgataatacttacttttgcattggtctggcaggaatgtagcaaaaagcacttcattaatatcttttgactgtatttgtttataagacatatcaacctcaaaagatgacagctgtgaaagtagttgaatttgctctttaaaagcacaaagtaccatggtaccctgagaatcatgataatattcttgaatatagtcctaagtgcttgatttagtatctattaactgctctgcaactatatagcaagtacttaccttcaagttctggtcagtattctggaggaagataagactattaatatcctgtccatttggataagatattagatgttgcttttgaattattgctgcaatttggtccttattacaaaagctagaatgaatctctgctaatgtcgaagtattgtactggcgacagaaatcttcaagttgcggatttcgaaggaattgagctagaactagttaccaactacttcccaagtggttggtgagtacttaccagttgttagattagggtcccgaatctgttcaatgattctcttcacacctgctagaattctttcaggtgccttgcttggtagtggtggtggatgtttataaatcccatgcgatgtaaataacatataggggcataggtctgtattcataggtactagagcattgaagaccacatcacaggtggtgtgcttcaactgaccggacccctgaggatgatcttgatctggtaattgcttaatgactggttgcaaattggttgggaagtgcttaccacagtattttcggcgacttgacagaggttcaaaaacaccacattcttcagtagctggcagaatctctttattaaagagatcctctagaacctccaagtctactgctgtatgtccttgaattacgcccctataatgttttgttaaacctccataggacccatttatacagccaataaatggtgcatattctccatgaacatcctgtatatttattagctgcttcttaagtgcttagcaagtgcttgagatataccatctggttatatcttttgaaaactgctttgcatgttgggagttgatcaacgcatgcatggcccttttcgaaaaaggcaactttggaccgataataactaagattgagtaagtgcttagtagccggttaacaagcagttttaatacctatatgcattatgctttctgatattagactctaagatctggacatctttctgagacctttggatccctatagtgagtcgtattatcggccgga

SEQ ID NO: 4621 - DNA, 4202 bp, Emericella nidulans
aacattcaaccgtatggctagcaaaggaccaacagccgtgagttctttcctatgaaatacggtactgggataagaatagcaggcactttgaagcggcctgcaacaggtcgtcttgaaaatattgaaagcagaagcgtccgaaaacaatagagagctttctatccttctaaccctgtcagattctggcatgggccaccctggaaagagacatgtgattgaactactcgattatttttaccatacaggaccgaatggaactcacttgtgccttatcttcccggtgatgatatccgatggggagggaatgacaatctgtgggaatacgcacgaagcaggctatattcgagccatttcccgtcaaattctcttgggcctcaactttcttcatcagttggacatcgtccattgtggtatgccggagctctcaggtgatgtaagcagctgtcttacggcttaatgcagaacttcaaccagcaaacattcttttttcaatttccggaactacgaacatggaggaattagtacagcctcccgaattcagtcccgtcaagtggttagaaggagtcactgaagatgacagcgcccccaaatatttagtccctacgcaaaggcgccggggccagttggatagtaggcatttctcaacaatcgaggttaggatcggggatttgggcggaggtaagatgtagctattcatatatcttgtgtggtcagctttgctaagacttcgcatacaatatcagctcaatatatcaaccaccgtaaccagcaaccagtcacacctctggcgttgcgtgcacctgagctgatacgacgacataccgaagacacagccatagacgatactatagacatctggaccttaggttgtttagtatgctaaacctctgttggaacctgccttcacgttctaatccttctgcaagctatttgagttggcaacgaatgagccactgttccccctcgatacgttcggcctcgcacgcgatgttatagacaacaaccactgttctcttatcgatcagaggcttgattcgatcagcttaaggaatgagaaattcacaggacatctgagagatagattaccggatatctttggtgctaagaatgtggaggccctggcatcattccttttacatatgtgatgaatggaccctcgcgagcgactgccggcgtgtgttctacttcagacacagttcatatcagagggtgtccagttttgaaatattggggggtcacgaaagtctgccgaaataagatttttcttaatcttggaaagtcgtaggcttgtcgatctgtcacttaggtgcctctaaagatccgctgccctaaaggtactcgacgcttgaagtcgcgagacagctattttgtgttgcgctctcagggcagctttagataccaatgtatacattaagctgattgcggatcccgagttcgatcttgcatacattaatttgtacaatctgagaatgttggatttggcagacccggtacagcactgtatatattccagaattacaactcgtcagtggtcctgcatgtcaggaagggcactcgtcgcttctctctcggctaaggtccttaaaaagaggaaaagaaaagaaaagaaaagaaaaggagagaagagaagagaacagaaaaggggaaaaaggctaatttcccttgtagaagcctcaattcggcttgtctttctcgtccaaaatgaggtaagacttctgctgatactacatgttgtcatacgtatatcggacttgtccctataaatattaccgtgagaatgatagtcggctatattcagcagtactcgagatttaggtatacttgttcaatgcttctaaacatgtcattaataaactgaatcttgaaagcgcaaggtgcaatcaacagcctgttttacgtttgattacgcccgaactatattctagaaatacagattctaaaagaataaaaaataaaacgaaaaaatgttgggatgacccgggatcgaaccggggacttctagatacctagaacaggcttaggatgaagtttgatcttcagtctagcactcataccaactgagttatcaccccatttgatgaaatgtctttcttctttacctacataagcaaatccaatatgagttagcgcgtacacgtacttccagcagatcaactatagcctcttaggagtcacagcagttgagctaatacccaacctgacgggagaaagcaacaaaggataggcccataaatacaactatcttagctcaattgagttttcacccaccctcgaatagagcttttgcggtttcatggaatagatactggatctaccgtggaagcccgttagaacagtggctccttgcgccttcgtggctctgatctagggcgaggattccgtcgttgacaatcggcgatatgtgtgcacccactattctgggctggtaaattggtggacttctacttcgtcccgtcgttcaattgcaagacagtctattgtccgctgcttgctaaaggccagtatgattgctagcatggcgtctgttataccaacgatggcagaggatgagcatgaaacaattttaaaagtgtcgttgatccatttttgaaggtttgaaccacaggctacctgcaacgtatctacgattataaccattccaaagccttggaacagcatcccagataccaatcgacaaaaagtagatattgttattacagaagacaagtatttcataattgtgccactgtgtcttaacggccgacggtcaggccattgtagaggggtgaagcggaaataagtcacagtgcctgacttccaatcttctcccgcattgtatcccataaaccacaaaaaagagatatgggttattagattgcaggaggtaagcacggacaattcgcccgaaggacaacgccaaggataggaaatcatgctacgcagacaaaatcttgcttgtaattgatttaggcatacaactaagtggcatgattagttatcacggaactgtgcggttgggatgtcgttgactcactagacagggtctacttcctcaacgccctcgtaccccagaaggctcaagccggcaatcgcgaaatgcgtatgaaagacgtcaacggcattgccaggacgatcagcaaagccaccagcctctggatcctaaggagggttagccaaaagcactagcgctagaatggagtaacaaacctgacagcgcaaaatataggcagcgagcttggacccgtcaatccagttgagcttgccaatcatggccaagctcgccccaacccaccagctgtaacaagcatctgcgagtttctccggccgtccattgagtccgccatggtcgagctgtcgctcgctaagccaacctcccagccggtctttgtcgactaggtccaaccgcccagcgatggccagtgctcctacgcaggtaaagacttgaccggcgtgcgattccgcaccgggggtgactccgtaccctccatcaagattctcgcatcgctggacatacgagacagccttggcgacatctaccaagtctaatagtcccaggagagacaaggcgttgagcgccccataaagaaaccttgtatccaactcgccccactcgtcgcccatgaaagagccagtctccttgtcctgcagccctgcgatgactgaaaacacttagccatgcgttctttaaccctctccgaagtgataagggctatatttacaggaaccgactttcagcttgccgcccaatccgcgcttctccaactcgtcaacagcatccaaagtcaccagaatctgcaccgcagagactgtatacagaagatgcgcatcatggcccggtgcagcgccgaagccaccattctcttgctggcacgagaggacaaagtcgacagcattgtcgcgcggcaagccatcaggacatccaaggagatgcaaagccgtcaagccccagtagactccattaagtcgcaggtgctctgtgagccagtattccagctcatcttttcgctaccaacacctgtcaaccgtctcctcgtgaagagaagtggcacggtaggaaaaaaaggacgacgcacgctatccagtttcttgatatagtcaatatgtttctcgacgcatagcttcagatcgacagatgtcccagcggccctgccaggacccgaagccaaagacattggcgcagaagtatgaagttagtagtcgacaaaaatgaagctgttcggatc

SEQ ID NO: 4622 - DNA, 1988 bp, Emericella nidulans
catcgatcgtggtccagacggtttcggtcacagtcttccagacagtgacttcctcgccacgcttgtggtggtgcttgtgggcatggcccggagcagcagcacccagagcggcaaaggccgtgacggcgatggcaagtgacttagcgaggggcgccattgtggttaacgatgattgcgcgttggctgtgttatatattcaaggaccgaagcaaagggtcagacaagcgccctgattgatcaagggaacgaacagttgatctcgtctgcacagcagaccgtaaacaacggaatcgaagcgtgggatgaaggagtgaaagctgcagaaacgcaggaagtgagtgacagaggcttgtcaatgagcggatggaatgaagaggaggttagagaaggagcaggagggatcagacaaaaggcgggagggtctgggcggtatttaatctccatccttactcaatgtgtttagtctagtttgttgtcttactcttactgcactcttacgcgggtacaaaagaaccgctgccctccaatcactgatcccgaacagtggcagagtcagccccacgccgaaccgccgtttgattaccgcacaaactcccatggttcgccctctgttgatttgatttgtatgcagatcgatgaatcaactactgccatctcatctctgacctgtccaacacacctgctgaggaatttattacgatttcaacagtagatgaaaccatcaatctgattgagtgcggtgcagggtctggatcagatcccaacttctcaccaaccagacaaggtttgttagcgctctttgttggtaaatctggtaagaaatgccagggggatcagcagtccaaaagacggtccaaaagacggtgcctgaactgaaagccacacttggcactcttggccccatcgggccatgaagtttcttcgtttctgacgtgggctggagcctgaaggctttcttcacagccttccagccagtgggatggtggaagatggatcctgttcctgtccaccatccatcctgccattcgctggatattcagcttttcctgtttgccttcgatttccgtggcaagctgtgctggcctggcctcgccggtggcccacattgcgccactgagctggtatattctgggtttgtgaggtttcaggtgcaaagggctcgtatctttcgaccagtgcttctttttattggtgtcttaggtgatgctttgctcatactcgggtcgggtgggttaggaatctgcctttacagcaccaaaaatcttatagcctggaagtaagtggaaagtcgtctgttcagtcagagatgctcgggctgtttcatttcatactcgactgggggaacaatgtggacatttgtcatactacatcgctgcatgagctattgcaatttgcgccaaccctctctggatctggagcacaaagtcaatggtgtgggaacacgactcactgaaagtgacatcaccccgccttcattaaagtctacgtagcactggagcaatgtcctggattaatctgaataatcctccgacagtccaaatgggaacatgatttatcaataaatacgaactcgattgcaaaccgatcttctaagtatgtaaattgaccataaccatcaccgccgccagctccttgtggacaagtagaaaatgtgcctggcccgaaaatatcataaaatagaaaaagaaaccatcaaagacaatatccataacccgtgatataagtacaaagaaacctgatattaaagtaaaacaccgtcgatccaagaacaatgaatcagccctggcacataatgcaagcttccttgttctcaatgctgcattgaagaaccttttgtgagtagatgtccgcctcactaggctcgccttccttcttctcttcgtccgaggtgtcaacctcgccactactgtcggcctcgcgggaaataccgttggtagcattctggcttgtgccgctcacctggccagcgggagcgcgggcacggccga

SEQ ID NO: 4623 - DNA, 2410 bp, Emericella nidulans
ttgatgaagcattggctgcacgcttgcggcaaaaattagaatggaaacaacgcaacatagaggacccgttttacatcggtgctgatgaacggaatgatgcaacggcaccgacggatcggccgcttggttctgtccacagtgaggctctggatgtcgattctatcccaataatcgatctcaagattagtgggcttggggatgaatctacacccaaagcaaggtcatatgattcccagggcaaactggctggacaacccaaaaaatacgaagttattgccgatgaagtacttgatctcgaagaaacggctgatttcagttctcctgacgagcccgtcaaggcgaagagggcattactgcaagtcgactctagcggccttaaggacttaactctgggggatgacggtctcgcccacgccaatggggttcccgggaagtccgaggatgatgcagagatggctacagcaatgaaggaaatcgagaaaatcaggctaaaaatgcaacgagcgtccgagcgtgtagaactcgaaggtgccccttctgacgggatggttgtgaaaaaacgaagaaagccgaaaaaaaccagccacaacaaaactcgaaaaggttattccttacagggggaaaatagccagtcagaacacggcaagagctcttcaaccgtgcataagaggacaaggaaaagaaaaggcgatgccgaaagattaggctaaagattaagctgattgattagttctattgagaagacaaatatacacagagtttactttcaagatatgccatttttaatcgatgccttccttgtactcagctgggcttcagaggttcaagggtccgacccgcctctgttcacgtagggctcagtcatagtgacggctggatatttgccggtctttcggagagtagcatttatttcacccctaacaaggcatagaggtgcaaatgcataaataattttataagccagctgttgcttcgcagagccagtctgagagaaaggagcatctacgccagcagtcggttgaaaacagacgcgattgcggaccacaattgtggaacgatcctcagcaactcaaatacaagtccaccgcagacaacaaaggcaagaagaactatgagtgttttagcgtattgtaccagttgcctaggattgactgagacataccaacccaacccgttgatagcgaaggcttcgtgttgtgtttggtcgtagtcgtttttggctttccacgtttagaagcttcatgttttgcaaacttctcgttagctctcctttgctgtggcgtctgagtctagtaggctaggtcagcatttcctatatatatgtaaagaaccgtgtagttgggaaataactaggtaggaacgtaccatggtgataactgctttgagcttattgcaaatgcttgaatacaccggtaacaagagagctgttaagcgtgttctaattgagttggaatctgcgtttagtagtgcgcaggaattgacgattcaattgcgcctgggcaggaagtcggagaggccacgttggggaaacgaactgcttccgcgaagcgcagacacacagacacaggggtagtctaccttagggagataaccttgggagacgcactgagatccagtctattgtttcaaaatacctcacataccgttgccaacaattgggaaatcgcgtcgggtagacggtccagaatgattacttctaaaagcagtatttctcaaccaagctgctgtcactcatatcgacaagcttatctttccgccgtgggcctcggacctttccccccgaccgcgtgacgtagatgcctcgtagcctgaatgtctcaaagcgtacgacttgaagagtgacggggcgatttggactgtgataagacgcaggataccttgtactagtataatatgacgtttctgaaggctcggtggctgattgcgggtcttcaaatttgcgccttacagtagagtatgtttactagacgacgatagttacgggccccgccagtggccagcagataggattttacggcaatagattagatgagtccttgagccgggggagaatgtcgccatatttgcttggtgagcacattcaggtatagttgttaagtatgtggtttcgcgtatcctcgcaactccacgttacaactatggaggtgacttcgacgtagaagctgcgagaacaatgcagcaacagcaatatgcagtatgatgctcgcataatctgcactgcataatttacagaggccgcagagggatgcatggttcataactggtcattgagacctttatgtactccgagaaggtggctagttactatatgaagaaactgtatctgctccgccggattatcgttggaagtgtcaattgccgattcgggttaaagatctagtagaccaagagagaatgaacccaatcactt

SEQ ID NO: 4624 - DNA, 1497 bp, Emericella nidulans
gatcgtcattagggcggtggatcgaggtatcggcggagtcgcttacacgctcggactgcggggaagacggcggcaggacgaggtatgaatagagaagaaatagcgacaggaccagagggagaaaggtaaatccgccaaggagataaacaaagaggaagctgttgaagagacccattaggagcccgttcaatcaaacccgttttagcgaggatttcgcgacgaccatcggctgccgcattatgaggtaagaggagagtgaaggatggaacaagaatgtgaaggaaggtaggtttcaagctagatagacgcttaattgtgactgaatcaaagaattcaaagcaataatagtctatcttcccagcacatactgggtaagggaaaggtggctatgtctgtcatcaatactgggtagtagtagctagacagtcaattaaaggcaggtgttatctaggcacgtgcatgtgcatgccagacctgatgtaacggaggtaactatagttcaatcacatgaccatttgcaatatccaattcaaatacaggtctgtttcaaatatacggtatgaatacttgattagctgtccttttcatcgaatatacaagaattcaagaagattcagatcatagaggcttgtgacccagagcatgttcctagagagccctaagatttagattctataagcatgttcaccaggttcaccagagctcggcacaatttcctatggcacagagtttcactattgtaccatagttattgttcactacttttctaattctctcttctcaaagcagattgcaggctcatgccaactgttcagttctgatagtgcgtccagctatgcatgggcctctagatttgagtgtcaaaccagcatcgtgaacccccaacaggcacgtctgtctgttgcacgatggatgactgttcggcaaatggtattactgtaatatcaactattcggattgcaatgtgcgggacctagatctgaggtgtttcgaagcagggtcctgcgccttgtacacttccttggtggactgatagttatcaccggtgcttgctcgcggcaaatatctcagtcaagtgaaataccacgtcccagacccctctattgagggagatcagaagtattggagagtagagtctaggaaggtaatacgtggaaccctgtgtttgcgagacgtccgtcaccataccccatggcaatggttctattctgagtaacgaacaggtcgggggcagtagtttgtaggaagtcataaaatgtgttggtcaaagagggtcgcccaattgcgatctaaaactatctggaagcttgagtctatagcctacgtctctgctgaaactcccgctgatcagaccctgtaaatcatggtgtcgctaccgtatctctaacccgagtcgcgtcgtcatcggatcttccatcaagagcattccgattgccggtcgagacattacctactttgtacaaagcttgcttcgtgaccgaggcgagcctgatagca

SEQ ID NO: 4625 - DNA, 1892 bp, Emericella nidulans
ccggcagaaataccaagaagggaagcctcctttttggcggcacagatatgcgcctcgagcccgagcaaacaagccatcaattacgttcagtcatctatgtggacctttcccgactcttcgctcgtctataatgagccacgaactacttcgtaagtcattcgcatgctctcgccagacattaaacctgtcgtcgtgcgcggcagcgagcagatgagtgtgacaagcgtgcgtaagaagagcgagcgcgctctcgtccagtccgcggtccgtgtaatgcccggtctaggcgtgacgtttgagaaagtccgcattgagaatgagggtggcggccatggagggtgggcatatcgcatggaaccgtaagcaccaagtctactctcttttccctccattggatctgacatttcttaggcctcttgacgcccttgtctcattctctaaagttccgggcttctcatcggctacgaatcccgtccgctacgctgtccgccaagttctcgaccaagaataccgcaaggaatcaatccggaaaaattctgagaacttatcttcgaccggctccaagaaatccaccacaaaatctgatgatatcgagacgccagcaaaccccgccgaagccgcaaaattgaagtatggcaccgcggtgaaacgcgatttctttgggcggattatccaggatcgagtgccatcgccgcaagaggatatggagcaggctctatcgaggaaagcgaagtctgcgcagcaggagctttccagtgcaggccggaaggtgtgggtgacatatcatgatggattttcgaatgccgtgaggaaaccaatctcgatggcggagttgctgagtggcttgtaatggagataaccacactggtttgatattttcatggtgctacgactggcgttcatacacacaggtttagtagttcgtgggcgtgggcgtgggcgttgtaatttcattgtacatatgatttttcttctctagtttcatattatatacggagtgcacagaacgatattgctgtccaaggcgaactgggaatttgaccgcttcttctgcctgcgccagacgaaagcatggtccgtgaaaaacagcgagtatacggccgagctctggttggccggtataattcaggcagaaaatttatggcctcaggccttaacatcgggactgccttgcagcacttgcactccgctcagtcccgttctcgtcctcggagacattatttagaacactcccctcaattgacctctccccaggccctcccccaaatatcttcgctcaaactgggtactcattccgctctctagctatttccctttcctcctccgccagctcataatgttccgacccgcatcgagagcgctcctccgcgcaccaacaccagctgtcggtgtcgcgcgcggcccaactcgccgattcataagctcctctacagggtcaacaaagccaaggagctggaagaatacttttatacgggtgggattggcatctggtgctgtctactactacaatacgagcagtgtcttcgccgagaccccatcgcgtacgtctcaaaatctcttctgacctcactatcaccatgacgcaagctaatcgcaattcctgaataaagtgtcattccgccctgaggcccaacccaaacacgaagatgggaaatctctgccgacgctcgactccattaagcccaagagccgcgaggaaaagaaggcaccggccgcagccgctgacgctgcggcaactcccgcctcaacgggcgccaacgccgagtcagaatcgcccttgaagtccgccgaagagctcgaggccgaagcggaccagcaggccgcattcaacccggaaacgggcgagattaactgggactgcccgtgtctgggcggaatggcatacggccctg

SEQ ID NO: 4626 - DNA, 3144 bp, Emericella nidulans
gcgattcggccatctagataacagtaaagaaaaaaggatgggacccagaatgatggcacaatgatagaaagggggaaatgaaatgcgaaaatggtaacagaaactctggtagcacattgtggttaacgccgagatgaacccttaaaactctagttcatgcagtttgtatcgtgatcgtatcgtaggtggccattcacggtcgaggatatgatggaggagctgataggcgaggataccatcggtattgataaggaggtgaaagtaatacccggtactgtttcaagtttcaccatggtcctactttgacgggagttccaaggccatatgtgcccgacagaagctgctcccggatagacccaaggtcgttgccccctggactcccgaaaccttgggattccggtccgtgcatccatcctagactggatgccaaatcattgacggctgcctgcagtctgccaccggaatttgattatgcttagccaatttcggtccccagcctccatactgcaactaattccaccgcccagttggcggcctctcgaataaccagaatccaagccttgcaaatttcatcatatgcagaatcccgctctatattgttttgaggtgagctccaacgtggcaactgatggatgatttctgtaacgtcatccaggtaactcaaagatatcgaaggttgggtttcgttaggcggtaagaaatggggagtgaagtcgctcagagcttcgagaagattccccaaaggttggcggactcggttgtaggcgtagtcagattcggggttgccccccagagggaatgaggattgtagggctgattgatagtttcgaagaacctgaagggcagaagcaacgcttggacgaggagcagtttggaccacttcgtcggccaaattagggtgacgatcgcatatcgagcggagaacaccgcggagagcatcggtatctaaagtttcaagcagacgagggagcgagagaggccttccacccatattgggtcgagcacgctttatttgtcgagaggatgatggcaaggttcttggagtaaaagctggggaattcgtaggagaggctgacatccgactatcgaagtcattatgttcgtcttcggctttccatatgcggttggtggtaggagtgtgactaggggtagacactagaatgttgcgttagatatgagctaaaattaaaccccaaaaggtcccaataacagaaaagagaacctacttggtcgagacggggagagacgagaatactcataaatgtgagggggcacgggtggtgtagccaccaaactgttcatgatgaccgcaaacagatggcaaggaagggttgatggacgtcggaccttaatagccgggtgatgagaagcaagcggaggagcaaagagtcaaatatctgcacgaggactgcggaaaaaagggagatggcaaggaggaggaagacgcaagcaagggaaggacaggaaaaaggatgcagtaggtcgaaggagaaggagaggattgagaggactgagaggactgagagagcgaattggtggggaaagaagagtgaggaaagagaagcggtgggtgagaagagtcgagcgtcagtagtcacgcacgggttgcgggaggcaacgtagacccagaatgcagctttccaggttgtctttatactaaaccgactacaaatccctcaaattacgctgtatgaatggatcaaaggaatttttcatttttgtacatatcttgccacctccctcttagcgtttagatctggggatatcacgatactacatacactataaatgaacagcttgaaaccttcttagcccgacgccagggaaatgcaactaccaagacacccaagacaagacatagagacccatctacagatacaaagactgcgcagcgacaatgtccctgcgaacctttgtcaatgcggtctcaaatttgctttcaagctcttcgcttcccataaccttcgctgcctgagccatttgccgtagacattcttccaagcgacggaagacacggatcaagctgccttcatagacatctgtcataccactggaaggagatcgttaatcccagttcattatcaaggagtaattaagacagagacttaccaaatatcagcaaatgacttcccgttggcccattcgtagatcacctccattagttcccaatggaaactttggacgtagtcttcctcgctgacagccagcttcgactcttgcgcgactttagcaataatccgtgcttgtgcttgtatctctttaagcggctttgcgagctcttcttttgacagcggcggtgtttcttttgtcttttcttcgaatacgaagacactcagaacggccgctgcttgttctggagtcagtttattgaagaaaccgttgaagaggagctcgctgagcattaactcgtccccagtgctaatttcacacgccacgcgtgccttcaactgcacaacttcggcctcattgatgaaaccgaagcgacggaggacgcgttttcggcatttcagttcgtccaactgttggatcgccatgccctcagatatcttcttcttggtcgctttgatcttattccctaaatccaatttctctgcgtattgttcataaagctcctctaggcgcggcgaattgtgcaaagggttcgtaaccaagcgcgactcgagaacttcaattttcttattacatttagcatcctgctgtacataccatggaacacgccacttaccctcaaagtctttttgaattcgtcatccttgatgcccatgtcttcaatggggtcgaggactgcaataccatcagggaatcgcttcttgatttgctctaccttctttcccatatccgtccgcgaatccttggattgcaaatccttgggcacaatcatccgcacgtgggagatagcttggatgcaattaagaaggagtggaacaacttccatttgcgatttctcgccctctttcggtggacggacaccctgtggcaggtcttcgaaagtctttgtaccagaagatgacccatcagcaaccctcaaaagaacatcaacaatgtaactggcatgaccggtcagctcctctgagttcttctggggtttgcgtttcttgatgttaaaactacccccgatcaaagtcgaagtctttgtatttgatg

SEQ ID NO: 4627 - DNA, 2242 bp, Emericella nidulans
cacatgaaagaacctccggggctgcaggacaattttcacggaagatatttgaagcatccaactcgagcccatacgactatggtgggaatactacactaccaagtgatcacttagtcaatgaagatagggatactcgtattagcaacagtcacctaacatgcacccagtatcaatggcatgcaaggattagttctgttctgattcctaacacgtaatatcattatactttcccgccttctatcctgtagttattcccggatccaagttcatgtccagatccaggtccacctgcacccccgtatcgatatccaaatccatgtttttcttatagagtctgccactctcaaggcgtcccaccaactcgatgactaggttagcagcttggatctcagcgtcttctttactcagacacccggttacgacaatatcgcttgaggtcgcgaccaaagtcctggttggtcctgagggttgcaaggggagatcgtgcatgtgtttggtcagttctggcccttcagcgcctaaaacagctggggtcttcatctcataatggatcgttaatgtcaacctccaaaggtttgcgcttcccgggcttcagtcacggaccgtcctacactcgaaccgaaacccgtcattgcatcctaatcgtgccgcaagcttctgcagctcaatctgcgccctctgtgtcggatgggtgacgtcaacgcgctcatctaaaattctctttgcgatccttactaggcccaatcgttcgatgaagccagcacatgcccccagatccccgcctgagtcgacaaatatagcgccgatgatggactcgacaacatcagagaagaatttgtctgcatggattgcagagaaaagcgaccacgggtaggccgttgtgttgttgagggcgtgcagtattgaggggcagaggaggttgtggcgagttaatgcattcgaagaaccagattcaggttcgacgtggagtggtagcggtcttgagggggaatatcggagatagctatacagagagagggtttttggcggtggggatattatctctgtctctgtctccgttccggtgtcaatactgggggttagaggagagggcatggcccacttgaactgcatgcacagaaaggcaagaaggtgcccgttcacaatggcgtgtttaatctttgtcatttcgccctgttggcattcaacatgatgtgcacgaatcaagtcaacaataagcatgtcaagcactgcatcacctaagaactcaagacgctgataggactgaattgatgtatcatatggacacgagggatgcgtcagagcttccataagaagagttttgtctttgaatgtgtaaccgatatggttttctaggttttcctgttggataaggtgaggcttcttgtggtccttcgacatgggcatactctcgggtcttgggagtttagtctctgggagttcaatctctgggagaaagcggacgatgcaagactgtgctttgtggaggccgccgtcaatatacgccgcgccaatgagagcctcgacaacgtcagcaaggactttagcggacattgagcgcgtcgatgcagaagcgtacaatttctcagaaataagcggggcagaccatttccgcggggtgaatcgattgcttatgatgtacgcatcaagaccttggtccaaggcagcgcgggttaaaaccggcgttctgtacgagtgcctgcaacgttttcgttaggtagcccctctggccacttcgatttgttgttaagaaggaagccccaactgtgaattttgaacccggtctcgaaaaacaactatgcttggtgattgtcgggcttttgcacagggcattttaaggcgtgtgatacaagtttgtggccctaaaacgaattttcttaaaatgtttcctaaaattttttcgcccaaccgtctttttttttagggggaggggtgagcacccccaaaatctttttttggggggttttttttccaggttctaaagataatctcttttgtggtcaccataatttttaaacccttttttttttttttgttggggttttttttattggttgttcttatgtcctcttttttcttaaaaaaattactcggcgtggccacccagttacttaaaaatggtttttttttttttttcgtacaaaaaatatattttttttttttggggttttatttttaatatcccttttttctttcttttgtgtttttactatatttgatctctttttttctcatgtttttt

SEQ ID NO: 4628 - DNA, 6316 bp, Emericella nidulans
atcaatacatatctgcaactccgccattctgaccttttgtcttcgcgtgcattgcacgagttgtaactatgggaaccacaacttcgaccgtaaggatcatggagaagtcggacctgtccgcccagccattctagggcatccttctcttaagcattcgccggccaatcgttccaaccattgtcttccttgaacagcgactttggtccccccttgcatttgcgtagacagtcgtagcggtatcctggaggcctctcatccggccaaaaaaggcacatgaaatccaggtacactgaatagattgagcctggctctccttttagtatggcgtccaggttgctccgatgctcagaagaatcaaccaagctgcttattgtgtataggaatggtgtttgatcaagcactggtaaggctgacagcgggggcaataaataatctagaatataatatagtatcattgtttcccgaaaaaaaaaggctaagctgcttttttattaagaactgtactccaaaatacctgtatcgcgccttggcttctccctggatactcctttgacaatacccacgcgacctctgaccaagttcgaccctcatcctttttcagcttcaccagaaggtctgcctcttccgcggaccaaggcatccccttccttgagcttccttaaacccccctgcaaacaggactttgttccatttcagggcgggtactcaagtaacatgttgcccgtgcctccccttcttcacatgccattcgtaaagtatcagacatgcagcatgataaagcaccttcaaatagccaagagagaaattgcaaacagtcgtccagtggcaaagacataaagtgagattgaagagcagtaaagagatcttccctaggaggcaatagggagcatgctcgaagctgcttaggatcttgactgtcagattattatatcttccactttctgcttccaggcttgacaaccttcccatggacacccttaaggaaggatagtttgggattcacgctgtgcggggagggatgcacttgctgacagctgttggtgggaaggtggtcacaattacttgtctgagtatcaccacccttaccaccaaccctttcgttgggatctcgagaatagttaattgggctgtagagtatggttggagggtcaggatacaggcaggctttctctgtggtgatgagactgtcggcttgaggggcatgtgactggaggtcctcccaaccctcgaggtcagccaggattactggatcaacaggaatgttgtcgtccggtgcctcgggcagcctgaggaatcctctatactgtcattcaagctagatgtactcggagaggagagaccacgcgctgtataatctccccgaaaggcgggcggctcggccgggttttcagtgttgtcttgagaattgcagtgatgatttggatccgcagctggaacatgaggcactgaattgcgtgatgctgtatcatacttggatatctctggaaacaaactctgctcggattccagtctcaatatctcctgtatttgcatttgggagtaggatagtatacatggctggctgctagcactaacattcatgcagactttggctggcggccgcgctggaaggtgatgcttgggaagtggcaaagtacttggaggtagagcatgagatggtctgggatgaggagaattttgagttcttggggagcatatgctgggggttctgtgcagtggttttgtgggagggggagcccatggcttgaagttgtttatgggaaatgtaggaagcatattgcagaaatcaggatctttcagggcttattatggcagactggcgtttgggaagagggagagaagaggatttagggtaggggctggaggggagagtgcaggcaacatgagaaacaaactaagaagcaacctcagcatacttgatcccctgctttatacttgctcttcgtcccttggcagcctaatattctgtgcttctcgtcagtagaaacaccaaggcacttttcttgctgtcagttcttcaactaactctgctgacctgtcaaaccacgagcgctgcctgactgttgggacctgatgtcctctgcaaatcataaccaggcattcctgctcaaagcctcactcgtcaaataggctgaaataaaaggaagtgcagtaattttgctattagctagtaagcaggcaatgacatgtaaataaagcaatcctggtaggtttcaaagacagtagtagaggggaggagtatatcctggtttaacctggcgcagctaacatgcttgcagtcagacttggttgttagataacctacagctgacccttctcatatcagcctttaggagcccagtttaagaaggggagtatggcttttataattagagataatagagacaaccaaagaatggttgagggtccaggagctcccaggaaaagcccagatagatggcatggccatatatatcagccagaaactccagagttgccgatcaggtagcaggcaatgtacatgcagcttcttgtgaaaattagcagcgacacagcatcaggggcagagctgacagctcataaaccaataaagcaacagtaatcagggcctcgatttctccatcgtccagatggcccgtcggtgacgccgtagctgagggggcgaagaggggtgattggacggtgctatgttggaaaggggcaaccatcgggtaacacgatatcttgagaaacggcagtgcaccgggcgaggcaggacgggaggagaagatgaaagagaaagtatgtggtcgtaaattgttatgtagggcgtaacagtattacatggcgtgacactagcgtcgcgcaaaaacttttggtgcacgcctccgtacttgtgctaaaaagatgacaagcaattagtgatttattcagctaaaatagtacaccataccctggactttgagcattcaggcactcggcaaaagacttctccgtagtaatatggatattccctggtcagtctaagcagttgacgagtgattagcaatcagttgagttcctcttagaattggaggcgaatccttacctcttcgtaatcaggtcactccaggtttccgttggccacttcttgtaggtaccgaaggtaccacttctaacaatagattagcaagtgaaatgcaaaaagcagtacaatttatcatgaattagcaaagggaagctcacattagtggcaagggaggccatgatgataccaaagcagctggtaagtgttttgaaagaggtcgccagagttgaaattaattttgtgggtcgcatgagtgcttggcggtttacataagcagccacaactcaacggaccaaatttgcgacctcaggtcacctgcaaccacacttggcgctcggtggaagattgggctattaccaagcgcttttatacatgaggcttatcaatccaactactgtcataaagctgcccttgaacgttaatcgtgaatggcaggctgtaacgatggttattttggggtcatatgcaaaagccaatatcacaaggtggcagttcaccatcattgcttcttcggccccttcaaagcacaccccgcattttccggtttacttgggagtacgtacggatgttcaataccttaaggtcctgggaggtgtgctcagacaagatttcatggaattggcgataagtccttttatgatgaagatttcgaacgtctctaaatttcagactcatttctacgttatctttccaatcggcggtttcaatgctgagatcattctcttcctcttaagaacactgcggcgtcccagcctgcgaaaagcagccggcgagagaaatttcctgtagaacgttcaccatgcctgccatatcatgtgaccatcggtggctagccctgcccagccggctatgtactgagatataacaatagcttcacacgtggagaatgaaaatggccagtactgctctcatggatggccgcatggattatgggcttattgtaagtatatacctatcacaatatgggaaaagcgctgaggcctgactgccatggttggcttctagaagccatctatgtcggctttcccttgcaaggttctgatgggtcccttcacgtcatatttcaacacatcaagtctaatccttctccgcatcctccaagctctgcttctcgttcaaccgcgggttgcggatacaaagagcaaatccaataaggggcactgtcaagcaaagccccgtaatgcaaagcagccgctgggtatccatatacgcggcaataacggcatcgcgatctggtgttccaactgggttgctcagtgcgaacgcgaacgggtcggcgtacacctgcgatgcaagcgtagagttcccgccgagctggcgagtaaggttggggaggagggtttgcgaccagatcgcaccagatatagaaccgccgagtgcggagccgatgttgtacgaggagaggaagagggcggttactattgcgaggtctgggattgggttagtatagtcagatggttggagtctttgaatccttacgctcgtgctttgtcgccgtctggatacttgcttgagctgggtagggaaacattccgcccgcttgacgtacattagtaatagtcgatcaactggtgagagaacgtaaggtttagggcaagtcatgggctcaccaatccctagaaccacctccccggccacaatcccggcgtaactatccccgctggggcctccccgaaagcgatagaggattccaaaggcaactgtgaaaagaaacgttccggcaacaatgaagggtttcagacgtcggatctttatgacgattgccccgaggatgcagcccgttatgactgaggcaaagctaatcacgcgagtgtcagctcatcacagcaaaataaaaacataaaaaggaagttttaaacaataaaacgcagaacgacgaggccaggttggctgtgctcgtggggactgagtacctatacaaagacgagattcgagttgcgctgaggttactctcatcaaaagaaaccattagaacggtatagagatagtttccttgaagagaccatgcttaaaaccctctgttaggacagaatctcggccttcttgacaggtgaattcctaccggtattaagcataatggcaatgcaatggccccatagacagccctatctttcaacaactgtagccttcgttagtgcactccaatccccagtaaaaccaaagtttagtcctcaccttgaacggaaccataggataccggcatttgctctcccatacaatccacagcgggacacagagaaccccgatcactagcggtgcgatgatcttggcttgcttccactgctctgcgttgccgccagcaagggtgaagggcaccaatatcagagcaaatacggcgatcaagaggattatgccgagcacatccatgcgccagaagacgtcgagaagaaagtgcttgagtccgtgggtttcgatcaggctcggatacgccgtgatcttcttggcttttgagtggccgtatagcaggatgaggaagagggggatcgagcagactgtccaatccatggctgatcagatccccatccacataaaaaatagatagctgagaccagcttgactatcaaagttgggatggaagcgcacgtaccagggaagatgatggcaaacattccaattccccagcgccagcttgttactttgagcacagcgtctgtcacatttccaccgatccaggtgttgatctgggcatctggttagccagccgcactgaagataatcgtctaaccaggcgcaaggagtctcacaatgaacggcgtggcaggtatgtatgagaagagaagacgcgagcgggtcgatgtagtatccccaatcagaacctccaccaggaacatgatccccgtgtacccgatctatactgagtgtcagtcctcctgaatgaacccagaccaacaaacgacgacggcgaaggcgacaacgaacctgataaatcaccgcacccgcgcagaatgtctgcacattatcagcagccgtctcaatgacggtcccttacccggccaatccaggttagcgtggtcattgctaagcaggcatgttagggcaacataccgagagtatagaagaacaccgagaagaaaatcaactccacgcgaccgaacatgtcggcgatcttcgcggcggtcggctaccgttctcgtcagtctctcatatcagtttcttccaaagaagaagagtattgggttctagcgatgggtttgcgtacctgcgccgcagccgcaatcacattccgcagcacctgtaccgtcgaaagcaggctgtgagtggcatagctcgccgttgacggggatatatata

SEQ ID NO: 4629 - DNA, 9755 bp, Emericella nidulans
ttggaaatgacccgcccttctcttccaggtccggagaggttgacataaggcgaatcgttgagttttttttacgttgacagcagtaatctcacgccatgcattgaagtatttgacgccgaggatgtggcgtctagccgcagtagttttttcaagttcatctgaagccactgctgcccagtgggtgaaggcttttgtcatcaaatattacattttgagctcgcgcggaacgctccttcaggtgttgaaagaactgctccgttcgagcagcctgccgtttctcccggataatcgaattccaggtcccaaaggcttgtctaataagggtaactctgtctctattcatggcaaccatttccatattccggtgagcctgccgtgcctgcacagctttcttcatccactgcgttagaatacgtctgttaatcgcccgttgacggtacatattgaatgtcgaagcatcccgtaagagatccgacagcgaaggtcgataaagcaattcaggcggtaaatctggcttctctatacgaccgttgacgtcgtcagagaccgtcgagttgtcctcatcttcatctttctcactttcttcatctgagctcgatgagctaatagagcgctttcgcttgggtttccttggcttgcgcgctttggcccgagaagccgcggccattcttctggaacggtcctcgttaacggcggaggagaattcctttgtctgctctttggccgactgaaatgcacccatcttactaataagacggcgacctacatccatgaattgtgcaataagttgcgtcctgtccggcgactcagtcctcctgctagccgctgtatgattttgtggtgatgcctcaaactcaggtttgccagtctgcagtcgcgacaacgatgaccgcgagctaggacggttgataaagcttcgagtggtagggtcgtctccaagatcatatactgagttgaatgacgctcgccgcggtcgcggtgtctgaatgttgtctcgtgaagcaggactaggcctttctctcggcgcagcatcgacaactgagaaattatccgtgtaaccatccgtatcgttctcctcattgccaaattcaatcacaatgcccatctgctggagcaagttctcaaatttctcaaacagagtatctcctgcgacgtatcccatcttgaacagaaagcgcatacaggcatagcccggatccgcctccggcccatgctcctcaatcgccgcatcgtactctttgaacaggactctgtagggaaggcgatcggcatctggatggcgctccgcgcgagtgatgacttggaagaggaagccgacatctagtgtaaggaaactttgtcattagcttcggaaattcttggaaactcagtatagagccacaattcaattgcgcaccttcgtctgaaagggccggatcttcataggatagagctcttcgctgagcgggaacgggaggcatcgaaatatccgcggcctaacgcgtgttcttcgcagatgggtcatggagccggggaaccaaatagaccattgcgagcactgaaggacgatagaacgcaaaatctcgccgtcctcaaattttcgacgcttaatagcatcgataagacttttaaaaaaaaaaaagaaaccttaagggaggtaatgccggggccaatttctcgcttgttgtcgtcttactgcaaccaatgttccggtcgcgtacccaaacatgcaagttgtcacgtgctgaagatatcgtgattatgtaatagctagttgatatcccgctctggatgctatcatatccaggattaaccataaagagaggaaaagatgccatcaacacggacacggccaattgaaaagtttgcaaaggccacttccaagtgtgccacggaggtaatgtccgcctttcccggcatcttggtgatagaatctaattcgatcaatgcaggcagctgcgtatggcaagtgcattgtcgcagactaccaaggagtgcacaaggacatgtgtgtaaaagagtttatgaagcttaaagattgcttcttggtataatatccggctcttctagtgaaatatggctgactatcagaaggcggcgtccaagaaagcttgaatgagaggagatatgttaaaagattacgtataatatggcaaccgatggctttgtgcctcggctacgatttcatcgtctgagactccatcgtcactttggttgctgagaatattggaatgggtatagatcaactcataatatatgctattttgggaacattaagatttctaccaagtgatatctgggtctagaaagtaaattatttctgtctaccccatctacagcttcagcagccgcaataagaaagtggcgttctgtacttcctgctcctcttgcatgatcataccctcctcgtctgcgctgggcaacttgccatcagctgaatcacgtttctcaagcggccgacgcaccgccttttcaatgaccgaagcctgagtgttgaaagcctctgcaatgccgatattgtctgggtccgagagaacgacgtattccatcttgacgtcatcagtagggaccaagccagcctttttacggagacgctgaagtcggttgacgatttctcgaccaagaccctggtgagctagttcggggtacaacttgacatcgagaatagtcaagacgtcggcatcagcagcgggctctttatcctcggcggaagcgtcctgcttaagacctctcttgacaacaaggtctccttcaacgagctcaatgccgtcaacaagaatcgtcttttcggcaacaaacttcttcacatcatcgctggtcaacgagggcagagccttcttgaccttttgtgcatccttcttcaacttcttaccaagtgtcggccagtcagcggacacgctgtactgcacgttgtacttctcttcgtcggtggacagaatgagctcctggatgttgatctcctcaaggatgtagccctccagggacttcacatcgtcaaggtattgctgatcctgatggatcacaacgagggacttcaacggggtcttcagaccaagagaccgacgctcgcgcgaaacacgggccatttcaatgaccttttgcatccgtgcgactcttctctcaacaacttcatcgaacagctctcacgacttcggggaagggaaggaagtgaacgctccggctgtcctcgccgcggatggcttcaggaatgtgggggagaagacgcccatagatgttatcggtgaggaaaggtgtaaatggggcaagtcccctaaccaaggtgtaaagaacctcgaagagcgtgttcagagcatgcaaagtgtcattcacaccgttttctcccttgagacgctttcggttgaatcggatgtaccagttcgtggtgttttcaatgaggcctagaaggcgaggaacgacggtgtacagacggtatcccgccatctcctggttaacgaacttgagcagactctggcagctggctaagatccaacggtccatgacgttggtgttggtagcttcgactttagggtcccacatgaaatcaattcccgcggtcttcttgagaagagctgcctgaccctcaaagaacttgtaactgttccatagaggaaggagaaccttggcaacaatctccttgacaccagactccttgaagcgcagaggctccgctcgaacaacaggagagttgatgaggtagagccggagggcatccgaaccataccggtccatgataagcgacgggtcgggatagttcttcaaccgcttggacatcttctttccatcttctgcaagcacgataccgttcactacacagttcttaaagggcagcttaccgaatagatgggtgccaaggacggtcaaggtgtagaaccagccacgagtttggtccagaccctcggcaatgaagtcaccggggaagctcttctcgaattgctccttgttttcaaacggatagtgttgctgagcgtacggcatcgaacctgattcaaaccaacagtcgaacacttcactgacgcgacgaagaacaccattccccttcttgctcgggattgtaatcttatccaccttgtcgcgatgaatgtcagtgatctccccttcgtagccactgagctctttaagctcctgaatgctgccaacagcgacaacttcgctgaagtcctcgttggcccaaagaggcagcggagtaccccagaatcgattacgagagatgttccagtcacgagcgttctgaatccagctagcaaatctcttatccttgacggcgctgggaacccagtgcgagtcttcgataccctcgagcatcttggggataatgggttggatcttgacaaaccatgaaggaaccgcccggtagatcagcggagtgtccgaacgccaacaaaacgggtaactgtgagtaatctggctgtcgacaagcagacgtccagtgcccttaagatgcttgatgatagctttgtcggcagccttgacatgttggccctggaactcgggaacctcggatgtgaagcagcccatgtcgtcgaccgggttaggcggagggcgggtctcgtcaataacacctccttccacaccgaccttgtaatcatcctcaccgtacgaaggagcctggtggacaataccagtaccgtcatcggcagtgacatatgtggcgttcaggacgcggtacccgtggtccttgaaggtctcgtaaaagtagttgaaaagaggctggtacttccaatctttcatctctgatcccttgaatttcgagacaattttgaatttggctttcttggggtccttatagatagttcgaagcagagactcgagcaagatgtagtgctttccggaagcttcatcaaagattttgatatattcgaaatccgggtgtaccgcgaggccagtgttggagggcagggtccagggcgtggttgtccacgcgagaagacatgtctctggatcatccaggaggggaaatgtgaccacaatggcgggatcctgaacatccttgtaattttgctgagcttcgaagttggaaagcggggtgtttagcgcagtcgagtagggcatgacacggaagcccttgtaaacaagtcctttgtcgaacagctgcttgaaaacccaccacacggattccataaacgaggtgttcatagtctgggcggcaaaagtcaggtcagttctcgcgcacgaaccccctctaccctggaaagactaaccttgtagtcattgtcgaagtcaatccagcggccaagccgctcaatggtttctcgccattcagacgcaaacctcatgacaatggccctacactcttcgttgtacttttcaatgccaagtttctcgacggcttccaacccagacatgcccagtttcttgtcgatttcgtactcgatgggcacaccgtgtgtatcccaaccgaatcgtcgctcgacatagtgacccttcattgaccagtatcggggaataatgtctttgatggtggaagccaacaaatggccataatgggggagaccggtagcgaacgggggaccatcgtagaaggtgtacggttttcgaccctttgagagttcaacctgcctctggaaggcattaatctctttccatcgcttgaggatagtctcctcctccttgggaaagtcgatggacatggtggaatcgcagcgtggtagttgtcgtagcgcacagcggtggccgcggggtaggagcgctttttgaagaaaaagtagtgagtcaccccgcgccctgccgacttaccgtatgccaagacccacccaatcgcttgagcacgcctagtctctataggtttcttggtatacagagtacaaggtactgctatatcatatgtcggagaattatgttacattgcctccagcatatagaacgcggtatatgtatctagaaagtcattcaatcacccatgctcctcgtcaccctcgtcgtcaccctcatcatcctcatcttcggatacttcctcacccaactccttcagccgtttctgaagcaaaaattagaattagtattccgaccaacctagctatccatgcatttctgactcaccttgtcctcgttcctcttagcttcaagatcgccgaatacaatcaggaggtcctcaagctcggattgtactgactggcgggcttcttctttctccttggtctcctggagcgccttctcgagcgccttttgtgcttcttcaagcgcgtgtgcagccttccgtgcctctgcttctagcctttcgacttcactttcagcttgttgcgctctattctcaagcgcggagcacttcgaagagtaatcctccctcacggcttcaaggtcttgtgtagattgttccttcactgtgttgagttctgcccgtaccgtctcgttggcggactcaagcttaacaacttcggattcatgttgtttccttgcactatccagttctgattgaaggccctgaatttttttatgcaagtcggagacttcattggcacgctgctcttttgtggattccacttctgatctcaatgtctcgagttccgattcaagcttgacgacttcagatctatattgttcagccttttcagccttcttctcagcatcttgaacagcacagttgagaccggcgatctcagcggcatgccttttactagattgatcggcctccgaattcagattcttgagttttgagtgaagctcagcgatttctgactcgtactgttcggctttgtcggcctttgactgcacatcttgaacagcgttgttgagattagcgacctcggctgcgtgctgttcccttgatcgatccgcctcagacttcaaagcgtcgatccttgctgtcagttcgcgggtttcattagtatacagttctctgacatgcgctaattctgactccaataattggattctcctttgaaggctagccacttcactctcgtgcctttctttgaatttagcattttttctttcattttcataagatgtctctcgcagttgagcatcgatggctcggagttgctctccatgtagctttaataactcgttcttcgcttgtttgtgctgctcatccaaagactttaattcctgctcatggtgtttctgaagtgcgtcgtaactctgttttagtttcgcaacctctaagctacttgagtctctggactttcgatgctcggccagctcaagatcgagcttatgccttagagagacaagctccgactcaagtttttgaacgagttggtttctttcttcaacctcagatttgagagagtcgaccagttcacgcgaaacaccacgttcaatcccgtttgtaatcacggaaatttcgatttctggctcacaatcaatcgcccgcgtcaagcgactgaagttatctttaagaaattcaacaaataccctgtcaaagaagatatcgggaagtcctccctcatagtttgctcctatagtttgcggcaagacctcgaaatctcgaaccaaaggagactccctaagtcgtgtaattttgtcgatgtactgctctcgccctagctgttccagcaatagcttgtgcaaagtcttgcgtggaataggcgagtctttagaagagaactcgtagatgatccccagtaaaatggtgcaaagaccaggcacgagcacgttggcggcccccctgtgtttggtctcttgcaacagggtttggatactgctaccctccccgagaaagtcattcacggcgtcaggatcttcgaacagccagccgcaaagcagcatcaaatagcctagggatatcctctcgtcgtctccacgctgtatacccgtgatgaggtttccggcaattgtttggatgcaagttatgacctcttcgccattttcagcgtcgccttctgtcactcccatagcgaccgactttgcttcactgttttcaaacagcaagtgaaacatcaaaacggatgccatccaggtttgataggggtcagcgttccctcgtagttctgggggcgtaagcagcacagtcagtatgttaggtatctcgtcttgaccgctaacatgcccgtttattgccctccctagtacatgaacgcgaatgcctgtatggttggtgaaaaaagccttaacacaatcacaagctgcaaggcgcgcatcaagaagctggattggggcaggttcgagtgaaagtttaagcaatgcttcgataacgttgattcgaggaagtggctttgcagcattgttgccgttcacaccatcacttgcttgcccggcaccccagaagacttcaacgtctccaaagcgctcttgcagtggttggttgccgcgaattaaatcggcacaggttgataaggcctagaaggttagaaataaatcttgacctgtaacaactgttcactaaccttagctgtgacattaacactaaatttctggccaaaagccgtgctcaagacctgttcaaccacaccgctattccaaaaagccatctggttagcaggggtattgacaccacctttcaccaagaaaagctggattatcaccagtagaccccagacgttcttgtcccgttgggcaagcgcccactgtggtataggctcatctgcatcctgctcccggttaacatcagcaagcagcttggccagtctctgtatacaacccgtttcccgaaagtacgactgattaggaatgttgagccttagcaggttggcgagtagtgagaggcagtcgccaatgacctctgacccgtgtaccaaaccaccttctgattctatcagcgagcatatagtttcaaaggcaccttcgaaagcgactaatttctgtaattcttccgacgtaggtgtcaaggcgatgaggagcagcagtgcttctgcaagacgtaaagcgccggtcagctggacgttcaccgttttccccactcaataaaccgaatatgcgtaccatttcgtaccggctcccgcgcatctcccaatgtgctcactagcctaggaatgcccaatggcgctgttaggatacattcctgcgttctctcgggtcgggcgctcgaaatctggaacataagttgtaacgaatatagacgggaatagaagtcccttgtatctagtaggtctaagagtgccgtgatattgtcttgccgctttgattcattagcgaatttagtatagcaacccgcggccgtccatacctgggtgaattcatcagataaccaaagagctatctcgtcagaagcctcaggctagaaagagaagtcagtgagtccagtgatttgacggttgagacaaacaaacactgctttcatcgggcgagaacagcatcaacaaggtctccaggacgaccttgatagtgtcgacatcctcccggtcatttcggaggctgctaataagcggtcggagagcacccgacgcgacagacgcaggatatatcttcgcaaagctccttagtccttgtatagctgctctccggtcctctagtaacgtggcgctctgcagcctattcgttaagatgttgatcgtgtccgtcgccgtttgtttggcgggtgcctgtgattcgaggattcgaaacatcgcaacgggtcattcgatatttcatggtcaccggtggccggaggagtagcaatcgatatacatcgaacaattgggaagggatcgagcgaacggtgaacggcaagttgttgtctcggcgttagctacattacaagtccacaagcgcaccgacaagtgaccgctaccatagagccagtcgaaaccgcgacaaaggaagtgccgacagccaacaacattcggcgcggcgactctcgctctgtcgacattcgcagagtctttattgttacctcttctctttaatctaaccacggcctg

SEQ ID NO: 4630 - DNA, 2021 bp, Emericella nidulans
ttttgatcggatgagcagtagtaaacggcgccggctaaaggtacaatggcgacctcacagcgaagcctgcccgttccagagatctgctgtccctaactccaacataaatgcatcctgccatacaacttccacttcatcttcctattccttacaacgcaactttcataatacccctgcaacctcattctcttttcaaatccaacttcgaccttcgtttctcctgccggcccgttctgtcggtcgctctactccagtttcgcacctgcgcatttcgctttctgcgtcccgccaccgcattccctctaccgcaatcaaggatgcagcatacttactttcgtcccctctcgccttagatttcgtttcttgaattctgttcttcaacttatgccggctttcccctcatccgttcgatctgccccgtggatgcagtccaactttgctctgtcgctatggcacattccttcaacttgcctcaaacctccatgacaggttacatccaagagccgccgccgccactctctgcatactcaatcctgggtcagaaccagtatccggagagcgttgcgctctggcacagtccgtctgcacagcagccgcagcaatcccagtcacagtcgcagatacccgcggtcccattaacgccggccacttccagaacaccatctctactccaaccgctgccagatcagaaaaagcacaaacgcactaggagcgggtgcttcacatgtcggtcccgtcggatcaagtgcgacgaaactcgtccggtctgtgaacgatgtcgaaagggtaaccgggaatgcgtctatcctagttcaacaacaggtccagcgtcaaagcccgcgcctcgttctgtggccaaggctaaagcttctcggccgcaatcccgcggaagtgattcatcgggtcctgtcagtgtcgatgcggaggaagctcgcaacttcgatctaacgccaattgcggatgaggaagacgaaggaagccccggctcaagtacccagcaatcaccaaagactaccgagaccaccgctccagttgcatcgaagcccccgctggctaaaaagaagagtgcccagtcgttatcccgacgtaaggtggtgaagcaacagaccgtcacggccacagagtccttgcccggtcggagggaggacagcagctcaccttccactgaggcatcgtccaggttcggatcgttgagcacacgttcggacagtattggaattcactttgttgataatgctggagacccgagcacgggccacttacctgaggatcttcggttctatatctcatatcaccgagattccataaaccaccgacactacttcatgcatccccgcagcactaaattcgtaaaccaaactatcatcgaatatgctttgcagtatgaacctctgctgttacgccgtcgttgggttctatgtctatcatcactgtgtgcaaaccggtggagggaagtcatactccaattctacaggcgagttcttgtcggagacactggtgcaggggaatttagggttctttagagttattctctagagatttgcccttgtccattggctggtgattatttgatatagtaagcactcacgcaacaacttgatccagggtgtaaacttgttttagttagtgccctcttaaccagggatatttatactaagtatagtttcataagtggattgtacctggttgggtccctcttaaaattgtttaaccctttcggcaagcgtttcaagcacactctttgcttttctaaatcccccagcccctttaaaagtctttgtttgacgttttgaaagggctaggatcttactatgaggttaaattggcccaagtcaaaagcttagctcaatattggttctgggcctttatttggtcaattttttaaaccttcttgcatcggtaaggttatctgaagccccttaagtctttttgttttcaacttgtacttggtggaatttaaattggagtcttctactgtggtgtgttttatattgtagtaatttccgatgtattttcttgtt

SEQ ID NO: 4631 - DNA, 3901 bp, Emericella nidulans
gccaaccgttagtggagatgggccagctgggccgctccaagaagatcttcttgcacaccgatgccgtttttttcgcgggcaagattccgcgcgatgtgagggagatgtacatcgctctccggtccgactctagccacaagattgacggcccgaagggaattggcgcttggtacgttcgcagactacccagggtgcgtctagaaccgaccatctgcggcggtggacaggaacgaggacagctcagagcaactctggctccctacctggaagccggggtcggggaggcttgtcgtgtggccgctcaggatatggaggtaagctgccctgagcgatagttgcatttgacgatgattatttgcttttgattttggtctcaagaagtcatgggggtagctacacgctccgcgtgtcccttgacggatgaagaatacagcaggggtgatgagtcgtatttttgcggattttgattacacatttgatttgagcgtggctgacgagacgtttagtatgactccaagtacatttcgcggctatccaagcgcctgacagacggtctcttggccatggagcacacctctctcaacggtgaccccgaacgccgctaccccggatgtgtcaacgtctcgtttgcctacgttgagggagagtccctgctgatggccctgaaagacattgcactgtcctccggtagcgcatgtacctcagcgtccttagagcctagctacgtccttcgggcgcttggcagcagcgacgagagcgcccacagcagtatccgattcggaatcgggcggttcacgacagaggctgagatcgactatgtgctgaaggcggtgcaggagcgggtgcacttcttgcgggaattgagtccgttgtgggagctggtgcaagaggggattgatctgaacacaattgagtggagtggacattgatatcaaaaccagccggttgtcttttagtatatggcgttggatgtaacatattgtacagaatgattccaatgatacgatcattaatccgtttgaaattaggctgtctgatcgcttaactgctttaccggttgttagtccatgacttgtgaatccatccatgtccacttgggtagattccagactcccttagccacctcgtcacgtgaacggccgtagatcaggaactccggatttccactgcagacccgatccaaccatggctagtgtgaggcgacctccacctggccgagctcaccgcaggccgcaacggggtggcgtgggtggcagcgagacgggctagcgctcgcttaaggctcggtagacgaattctgcacccacagcgcgccttccggttcattctctagcacttacgctaccactcaatctaagttgacccctttcgcttccacccaacgccttgctggtgcctcatgcatcttgacggactatatctataacgggctctggagaagcttcgtctggagtagctatacaactatacaactgggaaccagcaaacttgacttccatcttccaattcatcaacaacttgcttctgatttccattctcgcccaccttccagacgctcttaccctggacaaggcattccgttcagtagccgtcacccctctaaaactactctgtaccatggaggcaaatataatgatcccgtgctcgccttcctacttggcccacatggttctcgcaactgttccgacctgaaccattccctcagctattaaccgcacttattaatcacttctgatctttctgatgccgctcttttatcccgggacgcccgaggtttctttttctgtactcatcttcactctttctcctgggttctgggactcccttctcttcctctcagccaggagctcgcagcgttgacttaaccttgagcttatcatcgtgcatcgctccgtctttctaggaacagcctcttgtcgtactctgtcctaccttgttctgcatctgcatcggggatatttccacgtccccgaggtccccctcagtctggcggatctacccccgttgacacccgggcttgacaaatcaggccatacgcgtcatattccctccagtctggactggcaggattcttgatttaacctccggccactcgctactgtggtcgtctttgcatcgcttggctctcttcattgtcttacctccagctgccagactccttccgatgagccgtttatggtaattttggtagctttgacctgctgagactattgtctacgacttgtgttcatgagttcctggcccaatttgtctactgcaagttgaggtctcaccttcaacgaacacgtgaactttctgtcctctgtccatatttataccccgattgctcgcttccacccactcaaactccgcatccactacttttcgccatgcttcctccgattcccatcccggcagagtatggtatctcgccagacaccggcttccttccttcggagccccctctggagcatttacctgatccatattacgccaaatgggaatggattgtggcaaacattcaggccctcctgctcagcaggagaatgaggagagtagttgacaacatgccaattctatcaacctcatatcttcaagctgagcccgaatggaggagggcctattcgattttagggtttatccttcatggctatgtatgggggggatctacgccggcggaagtaagtggcccaaccccgatgatgatccatgcttggcattggcagtccctgcttgacggtccgtgctaaccataccagaggataccacctcagttgactgttcctctcttcgaagtatgcgaccatcttgacctacctccagtcgccacttacgctggcttggttctttggaactttaagccgattttttctgacgagcctatggatgacctggataacctcgcctgtatcaacaccataaccgggaccctggacgaacaatggttctacctcgtgtccgtcgccatcgaagcccgcggtggcccggcgatatcactcgtactccaagccattgctgcgcgggtcggaaacaccgccgtcgttatagaatacttgcaagctcttgcagagatgattgatgagatcggagccgtactggaaaggatgtatgagcataacgacccttacgttttctacaataagatcaggccttacttggcaggaagtaagaacatggccgatgcgggcttgccgaatggcctactctatgatgatggcaagaagccggagtaccgtcagtacggaggagggagtaatgctcagagttcgttgattcagttcctcgacattgctctaggaatcgaacatcgacccactggagagactcgccctagctcgtcagagaatggtggcgtcgctgcaggcccacgtcacggtttcatccaggagatgcgttcctacatgccaggtcctcatcggaagttcctagaacacatgggcgcggtcgccaacatccgagagtacgtggaggcccggcgctccaataaacctctcagccttgcctacgacgcatgtttgtcaatgctgcaatcaatgcggactaagcacatccaaatggtgtcgcgatacatcatcactccgtcgcaaaaggcacgcgagaagccctcgcgcccggcgagcttgaatcttgccaccgctcgccacagcgagaagcccgatggcagcaaactacggggcacaggcggcactgcattgatcccgttcctcaagcaggctcgaaacgagacgggcgagccgatgattgactcctgggcacgacgtctgctgacaaccggctccgtggaacccagctgggcctcgctgagcaaacttggtgagcaacctgatggagacctgaaagtagtgggcctggctggtacatggactgcggctgacagtgaaggggggatttgccattggtagacttagactcaacgataccc

SEQ ID NO: 4632 - DNA, 2383 bp, Emericella nidulans
tagtagtaacggccgccatgcttgaaagacgcttgcacttccttctcttcaggtgctttttctttctcatccatttccttttcgcgctgaagccactctttctctgtccagcaaccttgccagcaattcttccagtcgcataccagaaattgaaaacagaatgcatctattttcatgcagggttggaagcaaatgcaaaggttgcggtaatccattttgttttggtcgacgtatgagtggagaaggttgaggtggcaggttatagcgaagagaaggtagtaatgataagggggcaatttggagagttcatccttgagcatttgcggacgggtggtagcaccctcgcatttttcagcgatcatggcttgagtctctttcgggaatagttcatcgggtaattcacgaagccaggctttgaagagcgagccaatggtgttgatgtcatacaaatctggttcatcaaaaaggcttatgtcgagttctgcgggtttggtgagcacatggccggattaggataggaacgtggcactcacctgtatcaaagcgtctctgccagtgcttcacttctttgccactccccggcacacgatagaggccttcctcctcgcaacccttgaaattgaggtaactggtctcaagtcagtaataagagcttcatcgcatcttctagactcactctatgcaacggtacggcagggcaggcatccagaactcagtcttatccctgcagtcttcaaagtcgcttgacaatgcgtgtccgacgtgcttgctcgatcagcggcagatttatcacagagcaacggtaattatcatctgccactagctcacgctcattagtacttccacttctcgtgatcttaccaaagaacccttttccagcctttcctaatcgatccgctgctccgctggaagattgcttaagattgttaaatatggcagctgaagcacctgacacttggctcagtgatgccgacggtaccagtgtccccttccgtaccgtcgagctgttgccaaattccgtaggccgttcggcagcgggagtccggattgtaccgtttgcggtgcctttcacaccacgctcctgacggagtttcgcggattcttgcgtatctggcttgcaattttcttcgagtttcagaaggctggtggacggacgcctattcggtgctcggcccatggcagagtcgtccaacctgatcgaccgggagcgcgatagaagattggcgaaacgcggcttcgtcttcttaagcgtgttgaacccttccaactccgtacccacctttttgagctctgtcgcctgagtctgagaagtcttttcgtcggaagggttgccgtcttggcaaggattagctctgaacaatttcagacacccaaggctcaactgggacttacctttttcttgttgggcgatcgttgccgggagatcgggagacgattcgtaaagcttcgacgttatctttgtcctgcgatccctggagctgccacggcttttcggtttctctgcataattctccgaactgtccgacctctgtgcatgatgcgagtattttggtgccttaagactggcgaagaaagaccgcgaggggtcgcgagagtgcttgggggactctctaggtgatggcgggtactgtggtatagccgtgaagcctggggttggtggttccgtggccgcacccggggaggtagggaaggcagggctatcggaggtctggtttgagtcttgcgtgacgggtcgtattgtggcccctctgaagaactgtgaactggaggaagacttgggagagtgcggcgtcaaggggctgagaccatcggagctctgggcaccaggtgatagtggtgagttcttcgcacccgcctgcaaggtggatggactcagatccaaattcggaatgattgagtgtctcgaaggcattttagcgatcgctagtgtggaagtattggtcggtggcagacagttcgaattgatcgcggatatccagtgcgaataaagggatcaacttcagaggaatggttaaacaagatcagcctattcaaaaaaacagtcagcaggagatgagttgccggtatgagagcaggaaaccgaccatcaacattccgctagttccagaactcttcttcggtttccagtataatctccaatatctccaacgctccaaaacgcagaggaagcccgatgtccgattaatcagtcgttcaaggtcacggccaggatggactgggccagaaccagccttgccgataataaggtacagatgagtaatggtgggatgctgtttgagttctctcggttcgtatgaatctgcagtcaattgcatcatatgtgttagtgacttctcgcgcagacttgattcaaagtgcagtagcggttgcttcaagatcaaca

SEQ ID NO: 4633 - DNA, 1577 bp, Emericella nidulans
aagtaattccaacaatctttggcgttttttggaatagtcgaatgcgtggcactttggcagtgatgtttgcagggccaatgcgatgctgctttagcttgccagtgagaaaggaaggctttaggctcacgagccgcttcgatggccaagggggcgaatttttccagaaactccccaccccaccttagagctgtaatgcgtattcgatggtggtcgcgccataagaattaacgttagaacgccccgctattacaggactgctataactgggcaggagtcccaaggctgacatgtcagaaataaacacagccatgactcgccgcgacatttggtaaatgtccgtcagggctaattaccatccagaaaactaggagcagaaaactaggagccttcggaccgtatagcttggtttatgagctcatccttggagcaaagagtatgtaaagttgcgactatgcgagatcttcgacgcagctggccgatagaagcaggagaagagttcaggcctcgggacaatggttctggggaggccgctagagtggcttcgcaaaggcaagtctcacggtacgtatatttcgcgaggaatgtggcttgcgtttcacccgatcggttcatagtctgagggtttgagttgctccgtccctctgaagccaaaggttctttctcaacgcgcaagatacaagcgctggagaggccacaggcatggaaagggcaagaatgcagacctaaacccttaacgtggttggtaagcgagctgcgcatgtaagcgagctgcgcacccaaccacttttttacatgctgacgcggtcatctatcttccaacagccaccatgccccgagttcgcgttagttcaagccaaaattgccatgagaaggaaggtcggctcctactggctgtacaggctattaaaaaaaaggagattacatcaatacgcgaggcagcacgtcgcttcaatgtgcctgaatctacactacgtacgcgactacgcgggactacaaatcgcgccgaatctcgcgcaaatggccataaattgactgagattgaagaggaagtgcttaagcagtggattctctctttagatctacgcggagcagctcctacaaaagctcatgtacgagaaatggctaatattctgcttgcaaagcgtggttccaccccaatccagactgtcgggcagaaatgggtatttaattatactcaacgccacccgagcttgagtctcgcttggaaggcaatccaactgccacgagccaagcagagacccaaggtatttatgctggttaacactccagcacatcgacaaacggatctaccggcatacacacttgagagacggttgcagggctttggccctaaaggtcccagtagatatgtgcgaacagttaagccgaacggagtgtacgaatggaatcggtttggggcctcccaacttttaggcagcgtaccactgtaagcttccccgggctaattcatgggcactagaagcttggttaaaataccacatttccgaatcttttttgggggcttcacttgaataaaattctttgcatcccttaccttgttttttctcctgtaaagg

SEQ ID NO: 4634 - DNA, 3151 bp, Emericella nidulans
cctccccccacctcctttaataaaaccaaacacatgtttattcacaaaattggctcagcatggtttaccaaacattacaggttaggaggttcaagaggaattgctaatctttgccgcagacttccaaaaagtgaagtagcggcctccaaattcggtaatggcataactcttacaggtatttttgaagcaagaattgcttcgtgttgatttctccctgtctaaagaagtgtacggtggtggtgtttcccatggtgcaccagcgagatgtgtttaaaaatgaatatgcagaaacaaagccagttagagattgactgagtaagggtgggtgtgattatactaaatgaagtattaaatgagcaatgcacggaggcggatgatgggcagagatcaagttctccgttgagactgagtgttgttactgtatatcgcgtggcttactgggctccggcaatgtaatcaaggctctgtggccttatcatccaataatgggcccacaacatacgtggctgttgtggctgagaatggtctctgctacacgtcgccaccaaaccctaatgaaggctaagcatggctgtccacggccggaatcattagaccgacggcacgatcttggctctatagggctgaacgggccattgacaggctcctaagacactgtccaggctagtttcacttcgagcaacccaccaagattaaaacttttacgcacaactgtcgtaagagcaccaagaaactatatcaatggccttactaggcagcagtagagtagcagatgtcgcactattgcctgatccctaatcaatcctttggtttgtccactttctaagtggggacagcccgttggattctttctagtagatccaggatctggggctcagcctcttcgctagagaacccgctagaagttagtcatcacacagtacatgaacaagggcgggaactttaggagttcacatcatcttcttctcagagattgtgattcccttggaaatccaacataaggacgtttgcagccaaagacactacggacatcaaaatggcgaaatcctcgctggatgcgcatacggacgctacaaactacccagtagcaccacgtacaagccctacagcgagcggaaaggctataagatacctccgtactatcggggcaggctctatgctgtaagctatccagtctagcgttctagaccgtttcctctgttttagaccgcctggaaaattattgtacttggctgattcgttacgctagcgtggcgcttttaaaccaaggcgcatccttcgcggagaacctgtgtaagaggtatgatgcaccggactacgccaagtacatcagctacctccagcatcttgtcaaccttgttgtgctcttgttcgccacgacgcggtggatattgaggaagaactcgcagcgcgggcatgagaagcttgggcaggacccataaccctgtgattctgtctgtccagcgcattccagggcgaacagaggcttacgtcagcgatatacatgaaggaatgatggctcctgctcctgttgtggatactcacacgggagagggcagaaggaagctgtatcaactacacgaacgtaacctactaaggatcggatgacatatgacgattgattctctatcttgatgacgatagttgtcccttcttcttcaatgttcaactcctcgagggatcaggccaggggccagagatcatgccatacagattgtcggagcatactgccttctggtaccgcctgccctaggggtcgacctcgcttagtcattatatcccttttagctgagccttcgggcatctacgaatggataagcatcttggtttccacacagatcacgtggcacgtgacatgaggctcaacatgatatatgtcggagcatgggttcctcccctgtccttggggtgcccggtctgcacagtcttagtcagcatctcattagtatttagcctagcttccttgtgcatccgcacccctgaataccagactccttcatgcttccacatagaaattagagcacgtgatgtcttatgcaggcgcgtcatagcttggcagacagtttccccacttctgtctgcatcctccatcgatcaatatcgaccgagcaaccatggtttccttcgaccaagtaaaacaaaccaactcaagtctaaagtcctatggggccgggcttgtgggtgtatttggtatcctatcctcgaggacttcatcaccaacctcagctaacagatccagtcggcggcacaagcggcatcggcgaagccacagcccgctccttcgtacgcaatgccaccgctccacaggtatatctgatcggacggaatgagtctcaggcatcaaaaataatccaggagctgaatgctctcaacccagagagtaaaaatacctttctaaaatgcgacgtttcgctcctcaagaaagtcgatgaagtctgcaaagaaatccaagaaaaggaggagaaggtgaacgtgcttgttctgaccacgggaatgatgacgtacaaagggcgcgatggcacgttatgttccatgtccggttacgtgtagtggacaagattgtgctaactaaagtgtagaaacaaacgaagggcttgataaaaagttgtcattgcattattacacccggatgaggttcattgcaaacctcctaccacaacttaatgccgctgcgaactctcccccatccacctctactggagctgcagaggaattcaacccacacggccttgcatctgtggtatccgtcctcgaagcgggcggcgagggccagttgatcaaagacgatctgtccttaaaatcgaactatagccttgccaacgctcgcactcacgccattacaatgacctcactgtccgtgaccgagctagctcaatccaatccgtccatctccttcacccactcgtttcctggtgtcgtcaagacgggcgtgattcgggaactgggtcttcttgggcggacgatagcccgggccggctgggcccttgcacggccgtggatggtgccgatcgaggagagtggtgagaggcatttatttgctgcggtggaccagagaggcgaagccgggcaaccccacttggtgggctctgatagcgagccgagggggaattggaacttattagaggagttcaaggcaaagaaggtcggcgag

SEQ ID NO: 4635 - DNA, 5890 bp, Emericella nidulans
ctagtattggccgccagtgtgagcttcaattgcgaaaggtgtcaatgggaaaccggccagggtgtgcttcttgaccgaacaaacatctcaccatccaccagtgtccgcattctacattgattgtccagacacgggagtatctgctcgtggattcgatcagatcagtgccaaatttaccgggacaagcattcgtgttgcccctggtcagcataatctcggaatcttcatcaacattagcaagagggacgacgaagaatatcagttgacgcatcccgctgctcatctcggtggcctgttgaggggagctttgtcaataagtgtggctgacacatgttacattgtctgcccaaaaacaaggattaaggttattttgcagtacttagaggatggctggatcagccgagctcagaataaggttgagggagtcattttccagtacgatccagaaaaggataccattaccaggataaaagacgtccaagaaggtgacatccttgccaaaatatcaggatcgtggcacggcgaaatgtactacactctagcaggaacgagtgagcctcgccttctgattgacatcgggcctctttttcctgtcgcgaagactttgccgccggtggatactcagctttccaacgaatctcgaaagttctggtcaggtgtgaccgaggcaatattggacaagagatatagccaagccaccaagctgaaaatggaaatcgaggaccgacaacggcagaaggctgcggaacgtcaagaaaagaacgaggagtggaagccgcgcttcttcaccgggtccgtcacacctttgggcaaaccggccttgagcgaggaaggcgtgaaggccctcgagggtattcgaactcaacagtaccatctagatgaaagcgagatcaaaggcgcctagtccggattttcattggagtatattactaagtccctcatatgggcccgatctttgtgcactatgaggagtgccatgatgatcggtgtggttttgacttccaccgcttacattctcaccttctttggcattgccttttctcgggaccgtacgcagcaggctcatgctgtatctatatgttgcctaaagccattcctaatatcttagatttcgagctattgtcacaagtggcaggtcctcttctgtactcaaatccaccttggctatgtttccgccgatactgtcgaaccctgcaatgtacgaactataatcatgatggaggattcatcttacctgacgcgcagcgtcttttaagtgctgcgctgcaaataccaactagagaaacacgaacgagaaatggttgaaataaagaatcaccacaatgctatagccctatacccgattacaaactccaacacatgctgcgccaccatcatcctgaatataaacaaaccaaatgtccaaagggtaaaaaaaacgagtcatttgcattccatcgtgccgtcagagaagagcctaggcagttgccatgttgataactttgttgaacccaccagccacaattttagctatctcctcattcttatgcggaagaagagacagtgtgtatgcaacatcgttccactgccgttccgtttcgcatcttggtaaccgggcagctagtttctccgctaactggcgggcatgtttttcctgtagagcaatgtatgttagtttcatgttcctgcttggaaaagctttatgttctcaagaacagaaataaacttaccttttcaataaaaccgatcaggaacttgacaatgcgcctaagtgctccttcttctagattgcgctctgcacttagaagactaaacatatcaacgaagtggttataaacagcattgtccttgccggccaattctgtgaagaacatgcgggacaaatcggctattctcttgtcatcgtcttccaagcatttcgccatttcacccaactgtcccttgaccttgacttgaccagctaggatgaggaacgtgagagtcatcaggcaagtacgcttgacggaagcgtcgtcgtcgttgagacgccggtagaggaaatccgtgttttcgtcaatcaaatgattgaagcacacggccatgtcaccaagagcaataactgcattactccgtacaatggggtcttcggagcgctccatgatggtgatcaagagaggaaggttcttttcgcagtattcagcggagacacacatcagcttcgccatgcatatggttgcggcagcttgaaggttacggtcagagtaagtgttgttgttggcgcagatctctgcaaccaatggtccaaaatttgacagcagggagtttgcaccatacaggagttcccgttcacgaatatgtgctattgcttccgtgaaatcatcttcagtcgtgccgccaatgaggtctaattcatcattctcaccaggctcgtcatttttttgaactgccatattgagtggcttgttcttctcttgctctgccttgcgacgtttgaagtcaagctcacacaactctaaatggacgatctgtttgatcgcaatatgacccacaataaataaaagttgagacaaggcagctgacgaagtcttctgccctgagacagatttttcagttgaagctgtgccagggcgctggccgtcttcattatcagggcttcttgaagatggcggccgtgtttgtggctggaatacggaccttgttttccgcttaacaatatctgaacaaaggacatctggatgtttagacagagcatagatggcgctgatagcctgttctgctactccgtaccactccttactatccgagacagtttcaaccatggccgcaagcttagtcagaactgggtggtcgttcgtgagcttggagattccagactcctttgacttagcctggcggccaggaaccattcgcctgagtgcaatgcatgtatattttgcgaggatcagatccgatctgccaaggcttccaaggccgatcctgagcattatctcaatttctttaatgacaatttctggatcggctagagcaatcatgcctagaacgatgatggcccctcggcgctgggtcctggagatctctttcttctgcacgccgtaaacttgccaaagtttagcaatcacagcatcggatatatggcccgccctcatcatagtgctgagtagttgttcaagacatgtgagttcagcgggagtcgcgccaaatgtgagactaagcatattcctggcaatataattcgcagcgtcattaggactaaacgtgtctggcgcttcaaagaagagtcctttatagcaatcgatcaagtgagtttggacgccttttccttcgtcactgttgcctttggtccaaatgagcctcagcattcgccgaataccagtgcgagcagtctccactttgtaagcgtccaacatgacaaaaaaatccattgcctcaatagcctcacttttattctttgaagaaaggagctgagtcacaatattagatgccgcgtggagaacctcaataaagcgtattgcttcgttgtaatactttctagtcagttgcaatcgtgtaagcaactccgacgtagcggcttgttcagcggctttcttcatcgctatcgtcttttcctcttctgacatgcgtggcgcctttgacggtgagtcgtccggtaactgcgtggcatcgtccagcagttcactgtcgatatgcgaagcgtccccagaatcgaatcccggcgtctctggaggtctcagcgcattgagttcagcatcgacggcatcaaggcgctctgtccattcctttaaggaaagctgcccgccatgcatgacgctaaaagggtgtgttgagactaatttagcgattaacttgatcgcattccgccgtacattgctactcttgtcctccaaacttctggccgccaactctgcagctgcttgccgacgtttcgggaacttctgttctagatcacaaatcctcatgtagacttggatagctcggcaacggcagtacgggttgatatcgagaaagcgctcctcaagaacatcgaagaacgcgttgatttgtgatttgtagttgtcagttcgctcttcctgtttgctgaggtctgctataaggtttccgcaaacttctatcacggcgcaccgcagagtatatgactagagggaagagttagataactcttcgacctaagtatgtaacgggacaggtatattacctcactgtcgagctgtttcgctaaaagcgtcatttgctttataattagcctgggagccagttctgaaagctttatgatgaaggcggagactgattttggccctctggtgtcgttcgagttgaattctttgtttccgagttccctggtgatccattagtgaatgaaaatagcagagattgagtacggctgaagtactttaaaatctcatcggataactgcgggtaatcatattgctccgcaaggatatgcagaaactctgccatgggctctgagaggtgttcgaagtatgtcaagctttgcacaattgatgtctgagcgcctggatggagagttaggtttgaagtcccaagacctttcccgccaaagacttaccaaaaccatgaccgtgatgcttcaccgcaatacaaaggactttgaacgcgtgcatccgaatcgccatactcttcactctctgttcgctctctaaaatgaggtaacttgaacgggtaaacaggttgataaaagtgtcacggtccgacgtagtcaaaaagattttgctgagtttcaacttcatgactttgcacatagtttccattgcaacctgaatctgggctgttccatcccagttgctatccttggtagttctaggtctccctgacttacccgttccccgccgggcgggcaaggcttctgctggcttttcggctgccttcaactcgacagcggacagcgcccattgaaggataaaaccatacatctccagaagttccttatggggttgaatactatcttgctcatcggattcgagatctccatgaataatatccgcttcaaccgataatccagaaactatcaggtcgagaagtttactcagagactttgtcggcaggaagttggaatatctgtaatgattcaaaagttcagaattgggaccaaatgggccaacaaggggctcggggttaggggcgaagcgcactttagaagaaactgcaacgagtcaaacgaagatgctctggctagcgcctctgggttctcagccacagcatccacgatggagttcaagacattgtcgatgactgtgctgggcagctgctcaggctcggtttcgaaaccgagcagctccgtgtcggcttcaggagttgggacggagtttgggtcgctcaaataatacttgagagattcattgatatcgaaccgaatcctctcctccatattggagagggcgagggaggacctcgaaggactatctgcgaggggtgctgcttcacggcgacgagccgtgggatcagagtcgagggcgggaaagtcgatgttggtggtgggtgggctgtcgggtcgatttgtttgtatctttccgatttaggcgccgttttcccgccgaccagattcgccgctgtaagtcatgtgaacaaaaacatagtaacgactggtttttcccccaaatggaggcttccctgcgtttaatcttatcattgttgtcaatataggagatttgtcttctttggtggaaccaaaacccttacaatcattcgtccatttatcctcccttctgccatttacagccgaagagcttctcaccgcgcgcccatttgcgaaatacacttgtatttcagtgattgctgtaaccaaacttgcttatcgggataaataatcaacagtaacctatactgtctttagacattttacacgctgctatcaagaatattgtcaagataccgcgctccccagtcattctgcgaggaaatctccaacgaaccctcc

SEQ ID NO: 4636 - DNA, 1263 bp, Emericella nidulans
agtggatggccacatggacccggatagtgacggtgagtgggatgttgagggtgccgccgaagtcgacgggtgcaagtaacctttactgtgccaaaggagaaactaagggtagtgaatgcctcggctggcgatatggatgacctgtccgtgaattcagtcagccgaaataacagtttgtcataggctggcacttgaaatcgtcgtacttcttaccctctgttcttctccagtcatttagctcgctgtcgatacttggatgaaaatacacgacagcgctttgtcctgttttcagcgttaagtttctggtttggaatccggaatcccgcgttggccaagttagggcggaatttttcttttttctctcttttttgtcttctagcagtgttgtgactgttgtgtttcgcattgacgttggctagcgataagatatgctactcgagaatgactgtacgaatgggaatgattgatgagatgaaaatatacctttcccttgctatccagctattagctggcgtaattaaatcatgctcgtccacttctgacgctgatttgtaaagctttactcaaattcattctacgactctacaagagaaaatgagaaatacctggttgaaaggccggggtacggcatgtgatgaaattttgaactgattcgaaaaaaaaaaaatagacgtagtcatagatgcataaccgttgatttatcttgatttcatattcacgcagccagagccctaattcgaccccgtggtagggcgagtagggatcgtctttggtaatggcgggagcaaagtctttgcgctctcgcgcgcatactgagccaacagggagtccatgacgacgagggcagacatggcctcgacgatagggacggcccggggcacaacgcaggggtcgtggcgccccttggcttccaaaacgccttcgccaaagtcataggtagccgtctgctgcgcttgcccgattgtagcagggggcttgaatgcaacacggaagtagatggacgcaccgttggagataccaccctggataccgccggagttgttggtcttggtgaccaggcgttgcttagttgtattttgggagccaagctgcgtctgcacctcggaggccacgaagggatcgttgtgaatagatccgggtacctcgcagccgccgaagccggagccaatctcgaaaccctttgttgcggggatgctgagcatcgcgtgggcaagctgggcctcgagcttgtcaaagcagggctctcccaggccacgggacgtt

SEQ ID NO: 4637 - DNA, 4726 bp, Emericella nidulans
ctttacttctcatgtaaggttatgaatatattcatatccatgtttaggtggtcggggtacaaatggattcctatacgtcaccatctgaaaaaaaaatgagtatgatcaatattggaccaacctctatttaccgagagaataatcatgcaacactcaagcttatagtttctgtaggcatccaggagcagataagcatccttattctccagaagctttcccatacaacgctgcttatagtccagcttcaagccatgcaatccttgcatttctcaattctaaggtaagctgtattcgtctgcgctccacgatttcagggactgaggcttcccgtgaaagcctcacagaagctcgtctctgatttgcgctgctcataagcttcgtgacagttttccccgcttactctgccctgggcaagttcgcaagtcggtctcagttttacagtgaagtctgtcggaagtggttgctagatcgcatctagatagctccttagcaaagaagaaaagggagctggacttaaactgacatttgagacgtcgtcaatcaagtagtcctgttgactttgcaagtaggacgtgcaggagcgccgcattcctaccttggaatgaatagatataatagcaatcagctttgattgatgcagttatgagattcccactgaggtaacctagtaagtgcaaaagtcagcactgcgatatcttgtattagaaatcgaggccaggattttccgggaccagtatgctactgactcgggcgctgtggccgataggtcaaataaccagtaaatcagacacgactgagaaccctaaaccatagacatataggcagaaagcagtagtagactagggtcaactagtctactgctgcttgttcatctgccccctcaaccggtccctctcggactttgccagcttcagctgtgttctcagcaccttgatctggtactccattctcccaaactcccgctcatactgcgcaattgccttccgcgaagcctggctctgttcatacgaccggctcaactgcactttatacatctcacattcatcctcaagatcgcttagtcacgccgcgaagcctcagcctctcgatcttttcttgcgactgtatttaggagcctgcgaataacctcgccgtccgaactggcttttagaacgcgttgcaactccttgatcacctctttgcatgcgttcggttgggtctcgcgcggttgagctggctcgcgaggtagggtactggggagctagagccgcttcctcgcatgatgttgggagcaggagcggtagatgcgcataaggatcctttcgtagcaatgttaccgctgacttgaacattctgcggcgggatatagatgtcgtatggtacccaagcactggtctggatctgtctgctggctttcttatttggagggttagggccattaggaggggctctggccaatgtggtaggcaactgcgagggcctagcatctacattgtctatagcgacggggctgttcatacttcccttcagctgttctccaatgtcaaactcagcatcgttggcgtagaaagcgctccgggtcaatccttccacggccttatcgtcgggccagtcaaccaatgcggccaggtccagaccgcagctcattggatcggtggaaattctattcaccttggacatattgggagtttcgaaagtgcggtcgacttcttgcgcatggtgacttgggagacaggcatcggctagggcagctctgcactgcacacacgggaggttcgcagtttgactcatacttgtggaggttgagactgaggaagagtttgtcttgttattggttgccgtgtcttgatggataaattctccttgtacgatgcttaggttgaatgctgatctggagagagactcgatttatttatgtcctccaattgcactcatagcttgtgaatgcaggttcttacatttatgagaaagaaggctttgattgtcttagttctttgagctaacctgagaccatctgcatgacttcatttttatcttcattttcagagcattaataggatatctaagcccttgcgacatgcatcactctgcgtttcgtgtgccagggtgttctataacgccagaataaagcctgatctcatcgttatgtcatcccaagctggattatctttaccatacgctgtcgatcggagtaattccactgtttttttgagctggatctaccagtcagtttgaccgctactcagacgaagaaaaaaaaaaggaaacggtcattgttgtaaaccatccggcctcgctgggcgtagtaatgtgttcagtgccatgccacattccacgattaccgtattctgtcctcttctgacctatatcttcccgcatctcgccgtcttccccgttgcgctgggctttatgcagagagctaatacgacttgtcaccgatgttactagacactaatggctaaatgaaagagtgcaaccactttctcaatcgcccatttcaccaaagacttcatgccggcatgttgccaatgacaagcgtggttccttcaaagtttcagggcgtttgaaggccgaactcgtgcggctgagacgaaaaccgttttactatgtagcggaaaaggcctttctgctaggggtcacatttcggtatgatgagatacggtgtacgactacactgttacaacaaaaccaaaccatcgaaattgattcaactagagaaagctatggacaaacctcatcgtctgacagaatcagaaaaaaaagtcgccgcatattcaagcacccgaatgcgttccctcaatctcgcaaaaccctctcgatcatgccttaaaagctcagtaagagagctgacatccctctttgcatccacaaggctattttgatacttcaccaactcagccctaagatgccggatctcgcggtgcgcaatctgcagctcacgaagtaggtcctcttcacgcgtgctgtaagacggcggacctgcacggggtggcggggatagaggtaggtgcgggtatctggatggggatggccgggtatgaggggtcgtcgagggtggcggttgctgcatggggccacagtctgtccaggcagggatggcgatgcttagatacggttttgcgtcttcttttcctctggggtttggtgtagcctgggtgcgttcttggtcactggactgagtgtctggtgagctgcggcttggagatgtagtcggtagctctttgttagctggcgaagaagttgtctcgggcgatgttgaagatcctgccctggattggcatgtcttctctatggcctggtcagctacggtgtaaaactctggtatctctataggtgcgttcctccatggtctggcatcgcagggggctgttggctcgcgctccgggctcgcgatgccaggggaggggaaggaagtgctggagaagaagggatcgtcaaggacattgtcagggaatttatctctaaagaccaggacgttgccattagagcttggagttggcgatccttggggagaggtagaagatgtatggttcgacatttggtatggttttgtgttgatgacggccagagtagtgttgtagggatgtttgggatgattagatctttcggtcccatgatcgggggatgggtcgtttaaatctcgatttttagctaggcagttggcttcgacgcagagacagagccatgttagggtctcttgtctacaaaggttgccctaacaaggctggataatgaaacgagggcaaaggctgctgtcaaagacttgtgtccttcaatcccattttaaccaataaacgggggtcccagaaacaacgaaaaagcgctttatgctgcacaaaccaggtatgaaatatcttgtatgcatgcccttgtctctgttgagttggctgactcacacttttacttcctttgttccctctacttctctgtcttctgtcttgagtcattcccataatccatctatcttgttctctttcttcattctatctaactcctcctctttctcttctagctctcctgacttgaagctctccattcttctccctctctccacctctttgcttactcatcccttactccatatttctacctctcacttttctctcacctctcctcttctccctcacctatctttttctccacattcctctttctcctctcctcactcaccttcttcactttcccgccctcctcccattatctcttctcctcctattggtcccttcctctctcacatctacttctcctttgaaacctcttccccacgattttctttcccttcatctcattcatctttttcttccttacatccaatcttttctacttccacttaatcttacctcccattcttctctttctctttactacatccccacctccctctcttatatcatctttctctctccttatctacttcttcctctctatttcctaattgttcctcatttctcttttctcctcttcttatattctcctattagtatcttgttccttccctatctccttcttccaactttcctattcgctatcactaacacattctatcactttcttctttccatcttctcctctccccttgctctttacttcacttcctctccttctctatattctttcttcacctcttcctttcactctctactcttcccctacttccactttctttctctatcccactctcattcattatctcctctctcttccaatacctcctcttatttcctcttttctttcaccccacctcttt

SEQ ID NO: 4638 - DNA, 4995 bp, Emericella nidulans
tattaaaagcactccttggcgccgtagccacgtattaaaccgatggggggtgtctatctaaagagtcagggcggtaagggccaatacattcctccgttttcctcagaacatcccaatcatgcggttctcggctcactatccctagcctcttggagatactgcgaaagagcttccgccgagctgctagcatgcttgtcaacatcataaagtccacctcgtcggcggatccattgatcacctaatctctcttgaaagcattgacgccgggagttcaccgtacctcactgctgttcaagatttcaagatttttgagatggcctgttgactcatcatgcgtagccccggatgagtatgagttgataatggagggctacgagtccagcctcgttattcttagaggagaatagttgatggctgcgatttattagtttaggatgctaggtgatagtattatgcttttccactcatatataatagacacaaagaggtatgtaggacttatgacggaaccaatggcctatttcagcatcgtcgctttgctactctgacttggttaatgcttgggtcatactaaaatacataatagatatagcgtcctcaacaccatatgacgaatgctcctaacgcaactatccgacgtcaagccaaatggataataaatcagaagcggaacgtaggtgctcatattcgtactcgtgcagtgctcattgggtatcgtgacacataagatcaggaagaagtagtttaggttggtgggctggtatttgcccggaccgtcccgctcaaaggagatgtgggtcgtaaattatgtatagatagtgaatctattggatggacgtaaaacggaataccgagtgtgaagggtctgtgctgaaaatatcaagttcgtctcgaccgtcgctccatgtagcgtggacgccgcccatgctcatcagtgggctcgtcagagcgcgttggatgtctggttcgagttgcaaaggttgccaactcctcggctgccgattcagtgggtttgctatgaggttcttttgcagcaagagtgacattatcgtgagtcgcgaggcgcgacgtggcgcggacagtcatgcttgcggaagcaggtgctgttgatactgttgggggtgccgtaatctgagtctccggtttgttggaggttgttgaggtttggatttgcggtgatacatccgacttcttgagcgaggagcccaacccagcgctggcacccttcatccaaccgaagatgccaagtgagccgcggcgtttgtgatggtctttgccgccattggaggttggtggtctggttgatgaaggggacggcgagttgatgtttgcttccgtaaaggaacgggacatgccgtcttcgacatatgatgggccggaagaagcagaaaattcgcttgcttgtccgactccagacagtgggcggtgggttctggatggcgggttccgcgtcttgcggatgaccggcgatggggcgccgtcatctttgtcggcagggtctggaataggggagggttggagtcgccgagcattggcagagcgggtgaagaaaggtggaataaggctaattctacggcgtgcctcgggctcaggccctgctgttaggggcggtgcgtcaccgtcgttaagagcgcgcgggttaatagtttggattatgggtagtgtgggctcacgaaccgcggagtcgatgctgtgccgacgacctaggaatgaagactggctgggcgcatgtgcacctacgactcgggaggacacagggacacgacctgtgccagggcgggctgcctcgatccagtcctcggcggtcatggatagcggcgaagagcctagactcgttaattcgtcgcgagtggttggcctagacgaacaatagtagtctttgttcattcgggcgaggaccctatcaaaatctccggcgaagatcccatgattggcggagggatcgtaacggggctgctggatgctactcagtgggaagattgcagggtcttcgtccctgtcgtctagactagcccgtgggaatgtgaccttgctcacgttcgagtccatgctttctctgggttccatggttattgagcctcgcctcgctgtaagctcatcggcagaccgtgttcgggtcaggcatcgtcgcaggtcggactggctcttgtcggcgatggtgctgctggatgagctattggcccaggctggataggctgtagtcattgtgtctggtgttgggggaagccgtgcgcttccaaaaatgctttccaacttagatttgcggctagagctactcggacttgatgcctgtgactctttaaaaacgtccctttgccgggtagtcccgtctttagaggtatcatccatttcttcgggaacccactggtctacacaaccgggtcaagatcggacatgcgtagggtgacggacgagaggttcgtggcctgagtgcttgtttcctgccgccgtaccggaatatcgatctggtcaaacccgtttcccgagaccaaagtatcgtcaatattcagttcgctacactcgcttagagcacttagtcttggtgattctggctcagctgtctcagccatagagttcatgctctcggattttgtgattggtgtcggtacagagataggggtatcatctgtttccgcataaagacttcgaagcgccgccgtgctcttgctatcttcgagcaggaaggacggcgctcgctgaagactacgggaaccggatgagactcggcgacgttctgcatgcctgataccgcgccttgaggatgttctctcggggatatcgggcgtggacgtattcctgggcgtagcaactccagattcaacgtagggatgatgggtcgtcgacgaccgaggattctccttctcaagttcctccaccctagcctctagttgacagataagttccacggcttcggtaacggcttgatcccgtttgtcaatttcctgacgcagctgctcgttggactctcgtagtctttggttgtcctcctcagcggccctaagctcttgcacctcatcctccaagccacgcatacgttcgagttcatcctctagttcttgcatccgttccagtttcttctccaatactgatagctgctgcacacgatgaaagatctccagcttgaggtcgaagttttgtttgctgattttcgagatatacttatactcggtcagccaggcatacaagaagtacggcaccacaacacctacctgatccgtttcccggactcccatttccggcggacgcctcacactgccattcgatgacagctttgcggtttgctgtttttcggaacccggttcatcctgggaattagtgagggattggctatgacaccactccggcgtacgctgtggactctcctccaactcttctagcccaccagtccgggcacctcgtgacgcacgttgctccttcagcaggtcttgcagtagggcggaagacgggttcactattgacgaggagttgggatcgggtgtgtctgtacaaataatcagaatcagctcacccgcctctttgtgttcttcgtctttgtttgagaaagaagcgcaggcgcatcacgtacgggatcttgatctctgaggtgttcgcggggtcttgaccatgggggtcgcatcttgtaaccacgacatgtctaaagatggatcaatagcaagtcctatgtgacgcactgggtaggtataagttcgcaccattgcccatccgtattggagtctccatattgattctgcccttgattcgcgcaagcgcaggaggtttcagggtttcagattgttctgcaggtagggtaactaggttagctcaatctactttttcgctaggggtgacgttcacagggtgaaacaaactttttggcttaggactgtgcggttgactcccattctcgctcgtcgcggccggcaagggatataagcagtgtcgtaaggaagatggggtggtggtggttgtgtgtcctgagctgaagctccggcgctgtggattgccttccattctgtgacactgtttggtgtcacttgcaaggcacagtgttgctgattgagtgcagctggatggagaggacgtatccaccagctgcaagcctcataggtagggattggaaaggccagacgatgggatcgtgcaagggcaaaagaccatgaatcgtcccgttgatgaaaaagctatgacgcgagggatttgctaacccagatctcaaagatgaggcgcgcgtttgtttgactgctagctttttatgtggcggagaaatggttgaagggactgctgaagggagaaaccagcctcaaaagagagggggtggccgggcgcgccctgaaagatgagaagagaggaggaaagatgcgattagaagcgcaagttcgatattaattgtgattcgtgaccagtcaacatggatcctggtgggcggccaagggggaagacatcacaggcttaatccccacactgcacgaggagctccccagccattgatgtttaccaaaagtccctgagtgtcaattacaaacagtgttccatgtcactaatgcgaggatgccatgaatgcagactgttgcagttctgttgcgtcatggtcaacgcgacattccagcctccattcacactttcagcgcccagcattagtgttgagcaaaggatccagaccaacttggaggggaggtgatgcgcaagaccgccagtgccgtcgttccaggggcgttttgtcgaccaacaagcgtgcaagctgccgaaggctaaaggccactaaagtcaggtactctccgccgtctcctcctgagagtcttaggccttcttagctgagcatcatttggcaagcatagtccgtaggttccgcacaggagattccttatttgccaatttgattggtcagattcttccagaatcagcccaatcaggcgcaccgtgggcattcttggacggtttcatgagtatctcccttgccaacgggagctgcagatagagacgatctcagcgaggtcccctgctacactataaatgatc

SEQ ID NO: 4639 - DNA, 1011 bp, Emericella nidulans
aaaccaacagggagctaagaaggagctatgcactcgtaataatcggccgaaactttgccggctagggtgcgcccgtcatagctgtcatagaaactcaactcctgcagagtctagccagggcgcagagctagttgtgatctgcgaacttgcgatccaaccccacagtgcgtgcaggtggcacagtccgtcgaggtcctagtgatcctatggagtcgatggatcgactcgcataagctagcctcttcaccctgtcctcccagactgtttatcccagactgttgaggcatagtgatgttgttgacttgttgatcaactcgaaacagtggaggcgactcacgtggcaggcctctcattgcccggcgattacggccgagcgattgagttcacttttcttcttcttcttcttcttctttctcttcttcttcttatttttcctttcttttggtgtgtatgtgctactgccaagtgcctagtcgaggggcatccagtggtattgcccttttttcaaagtacattccgttgcggccacggtctgtcacttgcctggtcataggcgtgtatattaaccatgaaagaacgaacagcgctgctctagacgtttggaggacttgcggacattcagggtaagcctgaaagcggcaagcaatccaaatatccttgatatcgttcgagtcctgagcagagtaaggtgcttacttggggcaaactggcgcataccctatccaactctaatatctcaaaaatgggccgtctctgtttgtgcttaggggcagatgttaggtgccttgcccagaaaaaggattttaaagaatcccgcccaattgaggtgacgtatctgcgctttattcctcatagcattggtcttacagcacgtaggttatttgattagccgcggacagtgcttggtatttccggacttgatgtgctttttacattagtttggtggaccttacaacaatgtttataggcaagggtgggcatcactcccaacggggaattttgacctaaaaa

SEQ ID NO: 4640 - DNA, 1110 bp, Emericella nidulans
gcagcgcagagaatagacgcacacgactcgagaaagccacgcgaggccgcagactctgggcaaacgcatctctcagcgaaccagcggcaaatacagatccgttgccgcctgtgatttgccgatagcgaatgtgggtccggcggagtgccaagagaagcgcgggagccttggtgctcggcacgtgctgggccagcctgggagatttcaacgcctaggattggtgctctcgggacgcaccttggctgcctgcagccttgaggggctggaaattgagtggcaagtctaaattcagccgattgcccttcataacggcgctgcatcccagctagaaccacttgtgaatggacatcacccccactatagggaactcaggcgtctcacatcatcagtttccaaatctcgacccgttagatgcgaatgcaaacccagtgctattctagccggttcagccgattacctcccccacgttgcattgcgccgtcttattggatatgctgctttgctagtttcagtcgttttcgtatctcgcacgcccggtggctccgaactagatagggcaggctcgcacgcaacaaagacataactcactatggcaggcagcccgacgagcaggaatttgatcgccgtcataattggagccgtgctgctgtttggcgccattagcgtacttccaatgtacgtttgtttccatatcactccctatctcacactaatggttccgtctgctcctccccctcccctccttccacccttctggccctgatacggcgataccaccccggccgcatcacggaatattccatggatttctactcccaggccaagtccaatccatcggaagcagatcacacccatccctcattaccccaacccatacccctgttcctgactggagcacgcgacacagacacggacacccactaaccggatcaaatatccatgcagcgtcattatgcgccggcatcgtcgcagggcaacagaaagacatacaaacgagctccgtgctctccaggccaacgcgtgcatgcgccaggtcaccgtgcaaagatggctggaccagcaacgcccacccccaatatcatcgagcaatatgcaggcgaatcatggtaa

SEQ ID NO: 4641 - DNA, 6453 bp, Emericella nidulans
caacgtttacgctaaacatttgcttccaaatgtcgctattagaccagcgcgtcccttttgaagacctaacgatgggcactcccggtggccttctggggctcacttctacacacatcccagcatcatctcggatgcccaaggcattaacgtactagtaggcagcggtccatggtgcaagcttaggcccaatatataacaacaacttagatgagctctatctaaacctctggcttgtagccagaaagtctggaggaagtattaatctactttatcagcagaaagctaaaaggcgcaaaatcatgctgcttaagaattcccagctacaccttgtctggctctataataaagtctatattaaactgctcccagaatatctgcttaaccattatttctggatgacttgcctatctccagatttgaaaatccttctaatacagatttaagtcccaacaagcaactaactgcattaggatttgtccagtcttatatgcatcttattaaatattgctctgattttgcacttgtacaggaactctatcttattcctgacagcattgaataggctgcatggtgctggtttatttaatacttctggaattataataataaccaagtcaccaaacactactactatagttagttgcatcttttgcaattaaactgggctgtaagactgttccaaccaccaagcactaatatagtttagttctatcaggtactatactagtctatatagacatttctatgatatatcacagctctactaatatttaggtttactattatattagttgttctgtcttcaatacaagttctcctatcagccttaacttgtcagctatggcctggatcttggttgtcggccatgccctcaacctggttctaaataaggtttctgcaacatcagtgtacagcttcggaaattgcggcctcgaagcttaggaaaggagatccgtcctcataactttggaaaagggatccgtcggcatacaggtccgggaagtcagaaaggttgataaagggaggaggaagatatctgcgtttctatcttttgtttctttctctaagcttgtgatactcgtttatacaggacagccagttgaaaataatactgcctacacccgttacaggacacttgaagcgttcgggaattacaattagtcggctccagtctttgcagcctcgagggcctttgtacgggcgtgggcaaggttagcggctttgtctgcgcctattaggggtgcactcggtgcgggttgggtacaacctgcagggttagacatctgcccgcgtgggtttgcgggttctagataagtaacccgcactgcactgcaacctgtactactagatctgcgggccactgcacaggttaaaaatacatagaagtacataattttcacaactttcacaatattatacatatctatgatattttatgcagttttgtgaatttttgtgaatttttatgtattttttctacccgcgcggttggcccgcaaacccgcacgcgttcccctattaaaacccacaacccgcgcggactgccaattttgcgaccctcaccgcgccgctgcgggttgacaaccctagcgcctatagactcgcgttggttagcccgcaattgctagtaagtatacggagcagaacgaacctgatgccagctgcaccagggtaagtttcaaaggctttctcagaagggtagccatatcagatagtgagtgttatatgacaatttgggtgtttttgctcaaatgaagcgatgcggggctgagttggagatgatgccaccagtgatccttaccactttagtatcctgcttatctccggcgttatcgcgtggagatagttctgacttaatcatttgccttacaagctttcttattggcggatgcgtagtagcagaaagagatctcgtggcatagttatgcttgctgacctcggacaggcatctagatttcttccggcttctgttcgcatcattcttgccagagctgcttttgatagtatcatgcggcaattaactgaaatatttttacgcacagtgattgcaattgtcccactcgcgtcctgggtcgcgggcgaacctgtccagtactgccggttcggccatgaagataaacccgatgctaccgtcgatttttgcttgggcattaccacgtactacaatgcctcttcagaaagccacgatatgtataggtgtatgcgggttacgagaagctcagtgctcgggtggaccgcagtcggcaccggctcagtgatggcgggctccttgatgttcataatctacggcgatcctttttcttcagagcatgcagcaccgaccgtgagccttcggacaatcgatggtcaccaccagcccaagctcgtctctcaagccgatatggagggggcagatcttcgcctcttgcaacccgattgggtttccgtcaactccaccgagactgacgacgaaagacttgactccaaacgagactcggtttctgtcgcgaaggtagccattatgtgttattcgtgcgggaaatggcatggtgccccaatatctgcagatgctgcagcccaaccctggatctgggcgtggaacaatttccaagaatttgacagttactgttgcaattctgcgaagttcaattgggttatgaagtatgattgattgttgtgttgttttgaagctcgctagtgatatcatttgtcattctgcccgacgaccgaccgcctgggtcacgggctatcatccaggccatgattgggatgtggcaacagttacaccgaagatgtacacctgaaaatgcacgagcatcatgcagaggatggtggctggggacgattctacgtcgatatggcacgctctaccagcaaagacaactccgcgccttcaattcccccgattcggcccggtatcacagcactcggtgtctcggatatacctggcggatggtcatggttgaacccgacggtacacatccacggcttcctcatgagtgctgctttcctgattctctacccagccggtttagttgcaatgtggtcagggtcatccatgtctttcaagtaccattggataatacagcttcttgcttcattatttgtcttgattggtggggctatagggctcattcgggcacataagatcgattcctttcatcatttcattggccttacgggggttgtttgcagtaacattcaaattgctctcggctggcgtcaccacgtcgtctttgtacgaatacagcgacgtcaatgggcttctcacgttggcttgggcgcatatttcttctgctcggctggacgaacgtcattaccggactgcttcttaccggtcacggctggtccctcgtccccttggctgcaagcttcatctccgtaatagcacttgccttggtcgcctgggtctggtatgccacgcatcagtgtaagcagcgtgagattcgccccgactgggaaggagaggatagccctttctccttgcagcctacaagggacgattactttgccgtggctgcggatgatgacgatgagcatgatttacggtttagcagcgaccactcgactcccgtcaagataaggaaggaagacgcagatctaagataagcacaagtaaaatgcaagtcatgatcaatttcggtatctctcgattccgttcacatgaggcgccactcaatccgactcttggctcagcgccaatgctctagaacatgatcacacttcccgactaaaaattacgctcgtacttaatccggaagaaaattcgttataaatgcaacttgcacagtagcaaatctaccgacagacgaagtcagtttgagaacaacaacggaggacccggggctcacctacgccgtcgaagccgcaaacacctcgacccgccgcgccttcgccaggagccctagtataacagagaaggcgatgttataaatgatgataataatcagccgtgtaatcatattcttgatcagataaagtgcaatcatcgaactcgctggtataaccgacgacgtaatcgtgctcgcgatccttgtcgcgcgcttaaccttcttatcgtcatacgtaacgattcccatctctatatccctgtcgttctatatttatataatcaattagttctaaatcagacagagcaatcatcacaatcccaagacatagatagagacgaaacataccgtccgcctccatcccacccactcatggaaagccggaatgacactctgaatcacccacttcgtaaagtgatctacattctcatacctccccaacagcgtaaccagatcgtcggcattctcatcgcgctcgccaaaccactggtcgaactcggcgccggtcttgcagaacgcccactctcggagccacgagcgcagtaactcccggtcgttctcgtgcggtgctgccagctgcaggattgaggcatattggagaactgcggcgtctaagtatcataagtcagaagatgtatactaaatcggtgcccccacggacctaggtaggtagccccggctgccaggctgggaaaggagagcctggatgtgagcggaccagagcgtaggtacctactaactaccctagataggtggtgtaaggtacctagcttatactagatatctagataggtacttactatacgcctccaacaaacctctcaactcaataaattttttccactgctcggacggcggaaactggctgtccttgaggtacctcactgaggacgcgaacttctcgcggtctgtatcgcccgaggtggcgtcgtcttcaataatctcttgcaactcggcttcagcgtttacgatctcggcttggtagtagaggaggttctttgcattcaggtgtcggaaggaccggaatatcgagaggcctttatctttgtacattaggcttgctaggtcagagtagccggggtttcttggttttgatgatggggatggagatggggattctgtggggaggtccggggcgggcatggggatgggcatgcaggttgatttggcagggatctgcttgagggggtaagagtatggggatgttgtgttatctactgtgtgaatttgggccattttgatgagtagaatggtacgttgatgcatggtaggtagattgggcaggaattcgatcgactcttatatggtctactctcgtgctggacgaatgggacaggaacagtggggggaatgtactatgatcttgagatgcagctccaaggcttacttcccgcacatgctgcagaatatgcctggtcttctagccttgacagctggcatggctccatgcagtagtttagcctctagggcttgctctcgtctaccgtaattcggtggggtaggtgcaccaattttctggcctgaagccttttctcgagcctggctatgctctgttcatgcttgggctcaacctgatggtcatactcttgtcccctttttcgagccttagcctggtagcctactagagcataatgcgtatagcggatactctctaggcggaattgaatagacaaaaggaaaatccttccaaaattttcgcactctcctaggagggcacatcttcgtatagacatctcaaaccgtgcgagttcaataacaaacgaaagcggtacaataggcaaatccaagtataagcacccttaacgtcgtaatcgtagcctttcacggatatccttatcctccttccagaattcgtatcccttgatggtcattcttccgagtagcatatcaaactggctatcctttatgaccacaaattgcgtccggtagggcctcactcccttgtatatctgccaagtcacgtcaacaatcccaagcggcatcacaacatccccgttcggtatctccaccttcgacccgaaatagggttccatggtgaggtccaggtcttgctggatcgcatctgagattgcgtcgatgtttctcttggggttgaagtcgagtagaacgcgcctgtagagcttcctctctcgcgcctggtcgtagactatagtatggtaggagaatatgcgctccggaatgggtgttgtggggctagtattgaactcaagaattgcgcatgcgttgagatctctcgggatagaaccatggctatcgggagatgaatatatatatgggacacagaggtcgtgagtgtctatcccatgggattccctaaccctctggtggccacgctcattatatgcatgcgcgtaatctgacctttcgaaataattgtgattgggatagtcatcatcactctttttgttgtggcgacaccaaggcacgaaaacccaagcgagattcttgcataatcgtagtagaggcatctaaagaagtttgcgcaaaaaaaacaataaattagcaaagtgccttttcacagaaatggtgagaagaacgatgaaatagaagcagaagcgtcaaagggttgagtaccactattttgataaacttccgtacgtatagagataattactggattgtcagttagtcagttcgtatctcg

SEQ ID NO: 4642 - DNA, 3043 bp, Emericella nidulans
catctgcagcgttgtcattgtcagatccgatataaggcagcggccaacaaccagtctggccagaagctgcaacagccatggtctcgttttggtctttaagctcagctctttcactctcaatccgtccaatggaggtccatctcacggcgcaggcgttcctggtaggcggcgcggtggctccgagctcagccttctcccaccggcactgcagcgtcgctactatcaagtctttccttcccaacgacaggcgcgtgttctatgcgaaccactatgcggccaatgacagcttcacgctgaacgctggattatggcgctctctccacaccgcacgcaacatcgaccctcactatgccgaaacaaccgtcaacaagctgcacagcgactggtacacggtcaacgataccttcgtcttcgagggctacgcaaagggcaccgaagcatcctggacttccaatgggccggacgcagactttgtcacgtatattcagtacatgatgcaactcgtcagcggctggacatgggaggattggaacgacgggctgatcgtcctctcggacgcgctcaacccgggcaacgcgacagctggggactttgacatctcttctttctatagaaaagggcggcaggcttattcagtaccacaacttcacggacccgtccattgctatgggttcttcgatatatttctatgagcacgttgcccaagctcttgagccaaaagggatcaaactagacgatttctaccgcttctttctagtccccggcatgcagcactgtgggctgatcccctctaacatgaacgctccctggtacttcaacggcgacgggaaaaatacggcgctgaatacgacgacggaagttcgcggtgtaccagggtaccaggatacgcgacatgatgtgctgcgagcaatcatggcctgggtagaagatgggacttcgcccggcagtcttgtggcgacgtattatgtgaatgataatccggcggacggggtacagcgcgcgcccgctatgcccgtatcctgacatggctatctatgatggtttctgggaatgttgatgacacagacagttggaagtgtgcgggattatattagggttgcgcgcacatatatccaacttagccacggtggaaggcgggtaaaagatgaaacagtgaaggttatctaggtttatacgcgggctgtttcttgcatttcaatagcatgagcaataattagatgtcttacacatctccattgacttttatcgtgcccagaaaataagaacttcctataagctccaaaatacgccaaaggaatcagcgtccatggtgtaggtgtagccctgagtgagacttgcttcaacccaactcggtgcgcacgcttctagagccaaaacagccaatgtcaagctgttcgctaaataagacgagtgcccggcaatgtgaaagggttatagtgacgttttccgtgcataatcgtcgtcgaggactagtaatatacattcactagctgtacgctgcttcgaaacggcaggctaggactcggtaaggtgcacctcatgaatgtatcagagtctttactcatgagactagctgtacgagaatctcaggcatccacgtatgccaggtgaactttctccatgaattttcgtcatgtttgtaagctttggctagcacaacggtcgtttgctgggcacctgcgaaggcgccttttccttgtccgtctaataggggcttaaaaggggagcgattagtaaatatgactgagttgttattcttacttattctatgacatatatttgaatttttttatcgattatatccgtgatgctgtcctaagccactatagtctttattatagatgggatgggttccatcgtcgaagtaggttagagaatattgcaccaacgtaactgggcgtcttgaatagtctaagataacatggtgcccgattttggtagctacttctgggtttttggcagagaatatctctgcgcagtcttcgagacgtacgggaaagaaactggctcagtgggcgcgaatatggatggactctattcatatcatcatacttaattacagcatcgtcctctatttaaatcatcgacacgtatatcccccgtcaacgacaatatcagcccccgtcgtatatgtgcttgcatcgctcgccaggtacagatacacccccttgagctctcgtggatccgcatccctcttcaacggcgtaagtccataccacgcctctttcatctcaaacggacagtctccactaatggccgtgtcgatatacccaggactgacgctgttgacccgggcaaagtcggcccattcgacggcgagcgatttggcgaggtggataatgcccgctttgcaggcgttgtagcaggcctaacagaaattgtgagcatctcaaaagttctggccaggatgagacgaagaggatacatacctgctgctgcggcacgttgacagcatgcccgctcatgcttgctgtgaagatgagattgccatgcccctgcttcctgaagatctcgcccgcaacacgcgcacagtagtacgcgcccgagaagtccacatccacgacccggtgccagtcctcgagtctgtcgtcgagtccacctgccttggacggaatgcccgcattcgcaatcataacgtccagcccgccgaagtcggccacaacggcatttatggcggcctggacctgctcaaacacctgcacggccactttatacgccttggcccggaccccaaaatccttcaccagtgtctctgctaacttctcggccggggaagagttgtaccagagggcgatgtcggcgccagcttcggcaagggcgcgcgcaacttcatacccgattccgccggaaccaccagtgataatagcgactctgcctttcatggagaacatggcgaatacgctgtcagggaggggagggttaggcctcttgatgctttggttcgtcatattgatgtggtttctggagttcaaaaaagatattgtggagagagcagcctatggtgtagggtgtgtctgaagagaggcagcagaagacgtaagag

SEQ ID NO: 4643 - DNA, 4656 bp, Emericella nidulans
  unsure (1)..(4656): unsure at all n locations
gaggcaatcgcgtttgttgcctttattgctgttcgcgcaggagctagatacgctctggacgatgtcgagcgagttggaggacggtttctttgccgagaccagtgttacctgttgccaacgattaggacgccagtgcagagaagattcaggttcacaactgacctccggtaacgaaaatgacctttcctgagagcccaggaaggtcccgctctggctcaaaagaggagctcagcaggcctccgctgagttcgctgagcgtgggaccgacgctgtagtggaagtccagggggtggcggattgcgtgagagatgaggccgctgaacccgatgaggtcctggacggatctcacggggtgatcgtggtacatactcgacatcccaagtggtaagaattgagtctagattggagtttgacctgttcaacctggatcaggtagaacctaggtgatggaagaggccattgtgggggaaagtcaagatcggagtcgcgttttcaccacttaatttctctgtgttctgtcaatcttgccgaccattaaacctcaaaaaaagctacacatatcccgaccgagcgcttgatccatcgtttatgtgatacaggagctacatgactgcggtcttccgcaaaccgtgatctcgtatacaataaccaccgctgcatcaaatgccgtccgatatcatgccgtctcagctaacgctcgcataggaattccatcccttgattgccttctccacgagaaagcctcttttcgttaactgcaagctgttccactacctctccagcttagtcccgaagcgcgacaagctctgttaccggcgtctgtcgcgaaccgccattgctggcaactttcgtgaggtccctatcgcggttcaaagagaacatatcgcagttcgaccgctcgtgcgtctcgaagatagctagtgcgcttactacagtgggcgctcgagcctgcgggttcgcgaaaggtggaagacacaacttctgctcaaaccattgccgctgaacaaaagttgcacgccaaaataaggcgagcttctcgtttctcatcggtcgcgtgtcctggtattatccgccttgaggttttctttgatatctaaatcaagtgtctctgcaagccaactcccagtgcgcattgttatagcctcggacagatattcgcgctgctcaggagcgctggtcgcggcatcagatgtagaggtatcagagctagaaacaccgacagaagagagagtaaccctcttctcaccgaaaccactttccttcccaaagaaacaagcacggcgcattacgtccaccatttccgtagcttggtgagagagtacagtgtcatttcgcgtccgtctgcgtctagtcggcgctttctgtccttgtgtttcgtctacctcgcttacttgcgatgttggagttgatgctttcggagacttaattgcgctcgggcttgtgctctccttagactggtgatcggcgaaggtaaagatacgaacccagggaagggtgacattgagtcgcttaacaggctggcggctgtacctttcgggtgggccggaattaccatagtccaagccatatggaggccatcgggagagggccttgcgacggcgggcgggcggttgagcttcttggcccgaataatcgacagccgagctcttactgttcgaaaggtctatctcatcgtatagctcgtaagggtcccatagatcaggctcctcttcagggtcatcttctccaaccacacgcacaggaatcgggtattcgggaccggttcgataccgcggaaacacccngggtgtatccctccccggagacctcaggaacaggatcggcgaagcacatgaatcaaagtaccgctcatggctcgcaaagaatctttcgcgagcttctagaagcggaactaaatccactggggcatgtcttctcctacggctagtggcgggagaattagttgaagtgcagtactcatccagggcggtccagtcacagacaggctctattgcagcgactgcatgtatagaacgtggttcggtgagagctagcatgagggctagagagccgccaatgtgtgtgccgacgacgcctagccgcgtgggctggaggtttcccaagacccagtcgagtccggccagggtgtcgtggactggagttgggtagcggtagtaaaggggttggggttcggcttcaccacgctgtatttgcaaccttgagtgcagcggaatttggttctcatcgaatggcatctcacccaaacggtagttgattgtaaccacagtcgaagaggttttatccgctagcgcctggtcagagaccgcgtcgtctggacgacgactagggttagtctcggatccgttactctgaggcttatctgtaacatgtacagcgtggaagagtggccctctgggaaggttgataatcacatttgcagtggcccgatctgcaatttttggttgaaccacactaacactcagttagacacatcatctgtaatacagaccctatttccagagtaggtaccttaggtgaacgaatccattacctccaacaggaacatcgtagacccaataaatgcttgtggacgcggatcttgcggacctgaaaagagggcgatggtgaagactcaggctatgtaaaatattccggcttctcgaccctgagactccacaaatgtgcaatcgaggcagcgagacgggtaccgaataaccgaagcaccgcatgtcaccttaagatcatcgtgatgagcataacttcaggccgcaggggcgcgaacttcgaagcggaagatacgaccaccgcactaaacctttttcggtactgagtagccatatttcttaggcagcacggccctctactcctactagattacttggagtgtgtggaagatgagtataattaacaggaatatatttcacactaaagttacttttgcacgccagaacgcaagacgaagggagatctctatccggaattgatacatcaaacagcctaagctgaggtattagtagaccattaagaaagccgcaacgatcattcaaactgcatagcgaacaatcgcgaacccttttcggatgtcgcgctgagagccgggtcatcgatgtcgagcgcagcctcggtctcatgctcaggaacaggacgaacgacctcaagagaaagcatctcgtccttggagtacactcgcagcccgaccacacacactgcattccatggatcggtcgtgctatcgtgcccgtcgctgagtgacgtctgcatgctgggtgctctaattgtgagaggctcctctggaggcatatcaatatccgagtcgaactcaaatccttccagtaagtcttggtcgcggttgtgtgtacggcggcgatggcggctaatggagtttgttgagcggtggcggcaggaccgcatcgagtatgtatcatgtgaagactggggcgtaagtaccatatgagtttcgtcgaatctgatgctcggcactgaaccgttctcgaccggcacgtcagtgccatctacatggccgttcatgtcagacggcgattcaacggggctgtcggacagaactcgctcagacccagcatttcggtcgctgatttgaagtttggcggctttcgttgcgagtctttcttcagcccttgccctgcgcgccacaagcttctggttgcggatccactcgcgttggagcctcttcttcgtttcttctcgcagcttcttccgctctgcagccttgcgacggtattcgcgctcctctcgttcttgcttttcagcttcagtttcgtggacaatgcccttggcatgtgcgagatcgtatgagaggccaatctgaacaagcttttcgcgtcgggtcgacgcaagacgtctgaccgtctcctcggtggactcagagccacaccggtaggctgtgatcttcatgaggatgtggtaggatccaggttcaaggtcaacctccgcgttagtagaacgggagataagggagttgttgacgctccgcacgatgtaatcttcctcgccctctttctcaagacggaattttagaacaaagtcatattcgccaataagacctttgaagtagcgggtatccaactgttctatgtcaatgagtgttcgttgtgtaccgttggaggactgacctgagataaaacaaggacaactggcccagccttggtaacgttcagcctgaacttggtagtatggtagtccgcagaccaagggacgttcaagctcgtccactgttgggtaatcgtccattccggtccgaacaatctggtgcggtcgaaatgttggtactttttcagtagatcctcgtacgagatccagaagaactgcaggcatgttagtacctgctggtctgctggagtatggaaacgtacgccatcattgccaaatttatggttcagcttctccatccactgaggtgtccattgctcagacccatcactccaggcaccgttccattctttcttcccccaaggattcctgattctgttagctaagttgcgccaccgctaacgactatgcataccttaactttaccaagcgtactccatcaatctctttaacatccatgatggaataggaatggttctcggaaataccctttctgtctcgtggtggtccgcgatggtttggtgtgagccagttcgagtacagaccagtgccacagccaaataagaattc

SEQ ID NO: 4644 - DNA, 5225 bp, Emericella nidulans
ttattctttataatacagctccattctttagccctggcagctatacttaagagccagtctattatttttaatagactgtctcttatatatctctatctatctttccagcactttctagtatataggtagaagaagaagtatactagggtcttggtcctactacaagagcagctttctaggtagtctaagtagttaaagtactagtagtatgctataaagtctctgtagcctgtatagatagtaataagttagctaagtacctactagggcagcttgtgcttgcaggagtagcttttttttatataaggtctgatatttagggctttgtaggttttaggtaccttattagtatatactatatatatctctatacagagccactgttttgcctcctattataggtatactaggaaggggggatatcagggctgtatatagaagaccctagcttagcaagcttatctgctagcttattcctagtaattccagagtagcctggaatctagtagacctaaaggggcttctattacatagttaggattaaaagactttctatctactaggcagctagttggctaaaggtctctaataaattatatctataagaggttagtctatagcttgctagcagggaggctgcagctaggttatctaggaagataactagctaggtagagtagctaatatatagttatcctagggctgtatataggccttttacagtatttataatttctatattatagacttctattctggggcccgcagggccatgtcccttagatataaagatagggctaaaatagattatatagctataccctgcctcctagctggtctataagctatctaagtatactaaaatctataaaagggcagggctgtagcctttgttgtttattaggagtatatataataaaaggagaggcagctctattatagcatgctctggtagagggctaaggaggagctgtaggatctttttaagtctagttttaggcctgcctatagtagtctctgcagctatttaagtaattaagtatttagtattaaggcttatatatcttactactgctctctagaggatgctgttaagtagagcttctaggtctagtaggtctactttatagaggagtaaaatagtaggggtagtcttgtaggctaggataatagccagggctgctgtgcggaagagagaaagcagggagttaactacccctttttgttgtttgcctgtatagaagacttctgccccgtacagagctgttggaagaacacgctgtataactgctgcccgcatggaggccactgggcagccgcgctgggtattgctaagtctctttaggtgctgggcgagtcgtttcccgcggctaaagaccaaattaatgtgggctttaaaagtaagctttgtatccagaagaactcctaaccaacgtgtatatagggatggtataatcccccctataccaggtagagtgactgtggggagatgctgctgctgctttctagagaagtgttgtatctctgttttctctattgagaaaggaaggcctgtctctgtccctagggcagtaatttgcttataggcctctaccagttgttgtgagctctcttccagggtattcccagttaataatatgcccatatcatctgcatagcagaaggagccctctaaggtagagactattcttgctgcatatagcaggaagagtattggggataggggggatccctgggggagtccgcctttaattggtgctgtggcagtgccttctttgatatgaacagatacagagcggccagtaagccagtccttaagtagctggagtaagcctttatgccatccttgcaggcataagtaagaaaggagccgttggtgtattacagcgtcaaatgcccctttcacatctagtaggagtagtaaagcatcttttccctgttgaaaggcctcctctaccctgtgaacaagaacctggaccaggtcaatggcagagcatcctggcagggccccgaagtggcagggggctagcacatctgcctgaattgctcttacagctatctgctgtgctaggaggcgctctaggcctttacctagggtagagaggaggctaattggccgccaggcattgagttgggtatagtccctctttcctggtttcggtaacattattacctttgctgacttcaggctcagtggaaagcagccttcctccatacacctgtagtacagttgtgtgattgtatcccctagtacaggccagagctccctccaagcagtggtggcaagtccgtcctccccgggggcagacaggggtggggcacagagagcagcccagcagtgctcttttgttggcaggtgtagtgagccgaggggcttgtttgggggtccctcttctgtctaatttggaagcagggcccccttttctaagaggtaattaaggaaggcgtctgccttgccctgtggggtagtaacctgtgccccttgtatattcaggggaggagcagcgagctggtctggatattgtatctatttagcaagtttgaatgcatctataggtgctgtggcttattcaattcgctgcttccagtattcagcctttgcccgtacaatggccttccggagctgtttatagtcggggttttgttgctgtcttgtttggtgtagtatgtctgttagttctggagtccaccatggggtcctggggagtctgcgagtattgtatcttgatacgccttgtattgcaagctgggatatctggaccagttgttcggctagtaggtcaattggtagggttgggtcaggcaggcttgccagggctctggctttctcccagttggtgggtccaagcttgtatataggcgagggctcttcttgttccagtattattctaattgttgcatggtcacttggagtctttagatggtcttctactagggcccttagtggtaggttagagaagacaaggtctagggtgtttggtccacgggtgggggtgcctggctcgaggcgaagttccagcttatgggcatcaagccagtctaataatcctgttgcgccaggtgtgacagcatgagactcagtatctggctgccagaatgggtgccgggtattgaagtctcctgctaggatggtgttctctgggggtgcatatcctaggagtatggaaagtatagagggtgttgagccagcaccagcaggggcaactgggttattaggggggcggtagacattgataatagtaaggcctgccgtgtagattgtggtgatgtctggtgagattggttccgggagggaatgggctgggagatcccttcgtacatatgttagagtcctgggtctggcagtccatcaggtcgggggactgaacagctgatatcgtgggtgggtcttggttaggtgctttgctgtatttgtccaaggttcttggacaagaataatatctgcttcaaaggagagtagcaggtcatatacagcgcccccccttcctatattagcttatagtattttcatagttcaggggaggtcagggtttggtttaagagctcctgggtgagctgtcttgtaggctggtttgtagtataggtattatctgtttgttgtttagagctttcttctactttcttctgctcctgttggaaggcaagctggcctgccttgcagatagcagctagagcatcttttaagaggcgggtgacagtattcctctggacatggggtctggctgggcatttttggaagtctgctgcatgcaggctgcagcagttaatacactgtacacggcagttgtgttcctgttttgaggatccgcaggagatacagcgttcgctggagcggcaggctcgtgtatcatggaagcggtggcatcgggtgcattgcaaaggcctttgcttggggcgggtgggccttgataggccggacaggccaaagagttgcaaggggtgttgtagcctttttggaaaggctatgactgctgtgatagagtccctctctactgggtgctttgagagtttggccatgagtggtttaataccagtaatgcgctctgcttcattgctgatatctgtaattgtagtatctatccatccatccagggaccagagttgtttcgggatccgggggacaataacctggtgatactctgttggtatttcaaagtatccatccccagctaggcttgcagccttctctgacagtaagaagaccttgccttgttcagttgtagtgattgcgtatcctgttgatattacttgcacctgtgcaatcccgtccggaactttccctgcaagggtgacccggatgccatgtggtccaatagcccggaggctagaggaggccgggaggcggaggaagatgcggtggtcagtcttgtttggctgcttcagctttcgttgtgctggttgcttggcttgcgtacggtgttctggggcaatagtttgccagttcccctgaccagctcttggggctgtcagggatgcccaggttgtaggctgcgaggttcgcctcttcagggggccttcgcaagcttcaggagtgggaggttggtttggctgttccatctgcctggatggctgtgggggtgcagctgctgtcatcagaggaatctgctgaggggagtcctgttttgctagggaaacaaatctggctgcaagcccccgggccaggtctcttgggcggccctgtagagaggagacagttagatctagagctttagcaagagaggtcattgctagtttccaatcattaagaaggactagctggtcgtctgctaccatgctgacctgctcgcagatcgatggggcttgcggcaaatgggatacagggaccggagctgcagtgggagtcttctgtggggagaataaggcccttctcttcagggagttccggggtaggggggtcggggtggtaggtcctgaggggggttcagagttttcacccaggagcggagtccccggacgggctccgcctgggggggagtcatccacctccatggggtggagggaatgatcgatgagcaaagcgtaagagatcagttattggagcagtagggggccctgttctcccctcgtcgtggtctgtgaagccagctgtcggctttcgaggtggttgctagtatcgattttgatcatgtgattgatatcggtaatgagcaactgcattgaaggtcttgagggtcctaatcttctaactacaatctgtataggctatttatgccttttcaaaggct

SEQ ID NO: 4645 - DNA, 2948 bp, Emericella nidulans
atgggctggggtaacaacctggaagatcctggttgctcgtctagtcaatgtttgctacgggggcagctttggggtctatgcaacacatttctccgaagaagatgcatgctttttttatgtggtgtaaggatatgtaaccctgttgtcggagcttcgtgcttctaacgagtatttccggatcctggaaagctcgttttcatggtcccagcatcaataaacctatgtcgaacgtttcgcaactcggaaaaaatgcggcatctatgtacacgaggtgcgcgtatgtcgtactagcatagagccggcttccttattttacatcgatccatactttgcaattactttcttcataagccatcgtattcagctagaactgaccatccctgagggtaagagacgatggtattgagctggagcgcggtgccagattccacatttcatattctcacaacgtcggcttgtcaatccagcgttgggctcgaggtcgagcgtaaccaatgccgggtttcaccgtaacctatagagcttcgtactctggactcgtcctgcggagtcgtactgttggaacattggaacattggaacatttgatccgtctcgagtctgttctagcacgcaaaaagtggtgtacaccgtgatacctgttttgtgtcgaaataggctctttcttctcacaatgtttctccattgagcctccgtgcatagcttcaactgttcgcacatgagaatcaactctaggtaaacagagccttaagagcgttcgacctggattgggggagtcaagttaactatcaagaaagacgcgaagtgactaaagcacaacggcagggacgatatacattgtcttgacaggaggaacatcgcaggagtatctggggtgtgctcagaatccagacttgagcctgtgagttttcgtgagatacctttatcacaaattcttcatcgtcatccatttcaaggagactatcgccgtacctcttttcttgccgagccacggctctgtggcaaagtgaggatgaatctgctgactgtgtcaagatgcgcctctgacctttgagacatggccagagaaactggtttggatggagcatcagagctgtgggctgacctatccaacgtcgaacgtctgcagaagaaatgagacgtccaaattgagctgcgaaccatcgctagcgtctgcagagactttccactatcgatctcggctgactctcgcttgacaagcttgctatttttctgtatccttttttttttggttcttactgacactgattagaagacagctgttcggcgttgcagcaacaaccaatattcctatcttcggacttacgaacagatgtaccggacgtcagatgtctcagaatatccccgatatagaatcttgttctcagactctaaagcgaaaaggatggctggctaggtgaaatcatattgtatagaccggagcccctcgcatgaaaggaactctttgaggtgccgatgcggtgaagatatccttctatataagactgttgattccacttgaaaaagccgaggagctttctatcttttatattgcttcgtcgattatccatttcttgtactaacgagctccccaaccctcagaatgcatcttatcagctccctctctctcttcctcgcctttgcactatctgcattgggttcgttgatagtcccaaagagaacctattccagctttgcatctttactaacttctaaaagccatgaccataacctctcccaagtcaactaaccagaaagtcgacttcagcaagccgttcacaatccgctggactacggttccgtaagttcctgtccatcagcatatgagaactccaaacacaactaactgtacaatgaaatacagctccgaccccaagcagttcaccatcacgctggtcaatatggacgggcacaacgtggatcaggatctcgctgttgacgttgatgcatctgaggaggagtacaccattgataaaatcgaggatattcctatcgcgtatgtctcctagcaccttttcctcgtcctctgcgtaccattcagtcaaaagcaatccttcgaagagaagaaggattcatgcttatactaaactttgcaccagaaacaactaccaaatcaacttccgctccaccgagaagaacaacatgggtattttggctcaaagccccaggttcaacgtgactaaggtcgcggaggatgaggagaccggttagtatcgaatccttcctgtctacgttatttagctgttcgagtaccaacgacataccaaaacagccgagcccactgccaacgccaccagaacacaatctaacatggccccgacagagacagacgcgaatggagctggacgtgcgatgggcgtcttttccggatctgttgccatggcgggtgtaatggcgttggctgttttcgccttgtgaagcagcgcatggagttagggttcaaaaagggtagcctagatcggggagcagggtaggggacaatgctagggtctcttaatctgactgagagtctgatgggacgcgcccaaatggaaaaacactcttggataatccgtcctgtgtctaggcttgtgccatgcttggatgattcccggtctgcgcagggtttcgttaggccctgtaccgtacggaaggtaattctctgttctttatgtcttgatgctatctctaaatgggctttataaacggtatcaatgatccgcctttgggcagattgcctcttttgtacgttccacttcatcccgtgttgaacacggttttttcttcagggtgccccataagccccaatttcttgtcattgccgcacttttggaaatagcattaaaaattcttacgtgcaatcgtatatttcattgaaatgatcataccctttttactaaaaaatccttcttttgttttctcttcatttcaattcctctctcgtcattttttttttatttttccggcccc

SEQ ID NO: 4646 - DNA, 1860 bp, Emericella nidulans
aacctccgctaaggagaggccagagaaatgggactcggggtaccaacatacggcatactttctggcgtggctggaggatttccggattgggaggggagcgataggcttgttaaacgatcggctttgccgtgttggttatgttggagaaggtaggcccggcgtggacattaaagatgacgaacaagagagcttctggaaggctctgtacggcgctgagatcgatgaactatgggatgagtatggtagctggttggatacctcaggcggccaagagtcctgggaagacgagatcgtcactctagtcgatacttagagctactatgtatattcaatatatacttcctacactaatctttcttcaggataccattgaaatcatgaactagatgtctgactccgggattcactctacgtaagaagacgaccatgatgcgattgctgtgaggacggtacaattcccagtggatacgttgctacgctgataatcgtgtccgagaagcggaagcagttattagcaagcgtcgacttgattcatctatgtacggtatgtctaaaaacacagctccggaaagcctcgtccgaaggactaccttcacctgcagaagcagaagggaaataaaaaaacaccacaagaatagagtaaattgcccatactgtacaagatccgatcttcacaaacattgataaaacataatataccggtggtttttgtcaacttcttgtcgacatttaccgtgtagaagagaacagtgcaccacttagcatctatgcaaccacctcacccagatccacgtaaactggcttccaaggagcagcgccttcctcctccatagaactgggtacgcggacttctaacgggctgtaaagataccatcctttgagagcggcaacggcagcccttgatcgagcctcaggaagactggcgcctgcgccctcgcccaatttatcctgaccagagaatattccaacaacgaagacagggtgtctgctacggcgaccggtttcactgatgattttggcaactggaggctcatagttttcacgcgcacagagttgggccaaatcacgggtgggcaaagagaagttgaacaggctagagatatcaaggtgtcgcgagaggatgtgctgttcgaaaaatcgcttggctgctgctcggccggcgtgaaggtatatctttcccattatagcccgcacaaaagccgcactagcttgttcaaccgttacgggcttgacatcctgtagagcttcgggctgtgattcggagggtggtacgcctgctaaatctggatccccgaactcgttgtcgtacacgacgctagaggaaatcgatttccgccaatgtttctggtcttcattcggccttgtagtgcctttgagaggctctgcatttatatcggtcccgggctcgactctcttaaattgaaggaggccggggtctacctcgccgccaggaagagcagcatgttcaacaccccattctctggccattgcggtgagtgttttaggcccgacataagcatacagtgccgcaaaaatgaccgtcaaaggcagtcgaggatatgtgcaaataaggtgttcggatgcgtagttggtcaggaggtcatggcctagtacggaaaatggcgcattattgaattggggatttgggtcagctgaggcgtcaactaagcaccgtgctaatgtttcaagcggtaatcgcgaggggagatagagtcgtgcatgaagcgcggcgagttttgcagactcgcgtgcggcctggactggtggtgaagggagattgtattttgagacttttggtaaacgacgagtaggagtaggacgcgggaattgctctgcattatttgatcactcccaggctgc

SEQ ID NO: 4647 - DNA, 1737 bp, Emericella nidulans
gaataagcccatcagcagaagacgaaatttgaaggccattaaccagacgaagggcgccacgtcagagagtctccgagctctagtgcagctgcatgggttcgacgaaggtctaccgtgccacaggctgtatcaacaatggccgaagcgcaagagggcatcctatcatcttggacgagaggcgtatggaaccgaactgaaccctgcacctgagcgggggtggatgcaggattacttgtctgcagatgaaggagatcagctgaatcaatcggtcctccgtggaatccgagctcatcttaccaattcaaggaatggcggactccaaggctgctagcaagagatgcaacggacaccaatcgacgaatgctagtgacgcatagtttgccacgaagggcagaaaatttttgggcaaccatgtcctgacgggagcacgcggagatgagaccattagcgatggcaaggttccattcacatcccttagccgatgaggaacggacgggatgaatgaaccaaagcccgaaaacatgtcaaggtccgggagagacaaacgctattacccactccaatcacggtaggacgtgctggatgagcagaacaaggccataagctctcccccagtcaagctgaccgtatcaggactggcaacaagggcaagcatatctgaaccaattggctgtgattgcggatttagataacctggcaggggtgatgatgcactgaaaggttgggccggcataacagactgatcacgatcgagccgatgcaataaacgactcttcgaaatcgtttattgcttttgggatttcacattgtttgccgaaccccgctccctaatgattggacacttgggctttgctcttgacatccattttctagtttcgttttgtttcgattcctcgtttccaattgaatgcaaagttaacttcgaactgggagcaaaggctcccagtgtaagacagcttgacagctggcaaaagggcacagcctaatcatgcaggagctttgatccagcaagtgtgaaggatgtctggttctcgaaaactggtctcatgcggaacgcagatgcatggacgaaacggtgatgatcgaaggaaaaatccatggccaccgttccaagtaaccggcccggaacgagaataattgattcgaaactgagggatttttcaaatttgcaagctagcttgaaaggagccatgctggcacgacagcaggatgcatgcatttgtgaaagcgtccgctgattacgaccgccccggaaaaggaacattgtggatatttcgtgtctccactagtcgaccaggagaaacattcggcggacgcgatgtgaatgtgatgagaggacatgccctaggcgataagccgtcgcatgctgaggggctcaatcgacggcgaatggtggtagaacgaagaagcagtgaatcgtcacataggagctcctcacgagacataaatagggccgtccgttcccatagattgatgagatggatcattcaacgtttcagaccacacttctccgtacggaataacaagcgataactgcctgccttttcatataagttgtttcaacattgaaccttccacaatcttcaatagacattgtgcaagcccagcctatcaaattcccttgggcggcaggaagatcaacgtcagccagtcatatttcaggaaaaggtgaaacgacgaactgtaccaatcagtgagtctaaaccgcgagctagcatgatccctttagtagggtta

SEQ ID NO: 4648 - DNA, 3594 bp, Emericella nidulans
tagaataaggaattagggatagctaaagaagattgatagagggaaagagtaagagatgatattgaaagagtagaagaaaagtaagtaataaaaaaatgaggatgaggaaatgaaacttgtataagcgaccaaaccaaaggtctgagatgataggataaagaataaaagaagaaatacaagagtagggggggattaagagaaaaaggagtgaggacttcaagaacaaagttgaaggagtggtcaaggagataattattagaggagggaaaggggctaccagagttttgagaccaaaaaaatttagagaaattagtctgttggggtcgaaaagaacaagggagaataataggcccaagacaatgaaagtgcgaccatgttggatgaagcccgcaaaagcagggagagtcttttctctagcagcagtatttctagagattctgatagcctatggcacacgggatgcgctccactctttccggacgcgtcaagcacatgcgcagatcggcagcgaaccccaagcccagagcatcacgagcattagcagcaagacagagaagaagagccagagcctgcatctttcgtattccgccggagcaaccgcaatactcgccctccgcatagcccgcggaacggtcatcggaaccgcctcgcccctctccggcgagttcaattcagtcttagacctttgcgaggagatgatgaacccgaatcctcattctcgcccatcagccgcagacttaggctggtgctggtcgtacgggcatttcctgccggcttcctcatgcggcatcacgcattacccgcgttatgaacttccgaagaccttagctgagccggtgcgctgggacgaggattgagacgggcaccgcaggcattctggaaaaagcactggaggggcatgagtgggcgaaagcaaaggcggtggtttggttgaataaagtaccgctctacgatgcaggattatattgcagatggcgagggaaaggggcgacaaggaggtattgggctttctggagaggaatttgataaataatttttgagagatgggactacgcatactagatgctttccaactcgtatgtcattgtggcgttacagcgaggaaaggagatagtatcgagattattagcagtcctattcatgtacaagcgactattgttcatgtacacgcttgcaggtttaaatcgtcggcgttggagtttccgtggacaacaagcgccgtctcgcctttgtggttgaggaatgacaatggcactagtaatgccacatcatgatgtcgaatgaccacagcacgctctctgggtgcttcgagcttcaacaagagaagctcaaacgtgcagttatgcggacagttgccgacagatcataacttcctactggatatcaagatcataatattgggggctgaaggacaacatccagggttgaagaaacttggcattaatcccacgagatatagtcaaagccaaagtagtcagtaatatctctgatcgttctgctgttgagttgttgaaagagaaagggaggggcggttgccagagggctttcgcaagaaagtgtggagggtttgggtatgtagataaggcccggccggattcagtgaccacacaccatcaggaggcggtagaaacgattgagtagaggtggagtattcaagtccacctaactagcttcgctcatactagtgtactgtgaatcaaacagtaccgctggcaaccatttcctgacagcccggaaacagggccgattgtgcatatatcttgcaaagctcagcgcagcctcaaacgaaagttcactacacttgatacctaaccacctgtctccatttagactagacttttggctagtgttatatgctgtggcgtaaggctggggttcgattgagagttcaacattcatccgctgtagggcctggaaagcagcccagttggaatcgaacgcaccctcgcggtgcggccacgataggaggaggccaatcgcacgacgtagaacactatagtcgcagcaccacatgaccgcatcgtataacggggaaagaataccatcttccaggactacactcgggcgtatcgggtatctattcaagagctccccgaccatggttacatgggtctcgtactccggattgtagtactccaggacagcctcattccggacgagagcggttttgacttggagaacgaggctacagtagagcatacgcaagacatctgcggctcttcgctcctctaacgttaggttgctgaaggagtggaatgggtcaaaccggtggctgaatatgctgagctgagataaagtctgcaattgcttgtgatggagaaaagcatagtctgagcgtatctcattttctgacaggtctttgcacagcaatataaaacgaaacgcagtgctcgtcaaatagtcaaaagcttgacgtgtctcgttaagactgctgaacgctccgaagtcattgaaaattcctggataagcgctttcgctattggtgggttccccgcggactccgtactgtagcgactgcgcttcgaggttggcaaaggcagcgactatgcatggctcgatgggcgtctcagaagaactcgaagccttcgcctcattcagaattctgaggccactccgaaggtgcagaaaagcgtcatcatactggccgcgcacagctgtggtcataacaaacaacagacaacacaaaagcatgacctcccgaaatcgcggatcctgcgacgattgacgccgactcagtaaagcgaaggatcgaccgcattgctcaagcgcaaacagatgccattcatttcgcagatcttgtccaggtaaaggcatgccgtaggtctctaagtcttggtgaacggcactaaaagcaatgacagcgtggtaaaccgcgggttctgacttgctcatgctaaggaggtgagcctgccagagacgggagtcgaacgagtccgagagtactaaaactgtgcgatgctggaagtatgagtagcaacgccgctcgtctgtggttatcgcccaccgaaagccgtcttttatcgtcagcctcggatcttccagctgtctcttgtcctttcggatggcaagtctggagcgagggagtcgttggagatcatagtcacaggcgcgtcctgtgcgcgaacaatttttgcagacgacaggagtttcatcacacttgatatggcgcagtcttcagattcaatcatttaggagctcctgagcccgacggattatagtgtactcaccggcaagtccgacagcctgcccgggatttcttagtgccgtccctttgccgtttgggttccagaagcccccgtgtgtgtgccattgagtttcaacgcaagtgaacacaggaaggcaaagataagagctcagtattccacggccagatttaaggtattcgagaaagcaaaggctcagctgaagggtccgagtggaagtcgactggccagcctagtgcactgggtggcgtggcccgttattagcaccgccaaagcatactgtgtaggctggcctgcgttggtaacatccaatagatattccagtatctcagggctaatcctttaccggctaggtccagcgaacgaagcaataacctatcaacaagccgtt

SEQ ID NO: 4649 - DNA, 2911 bp, Emericella nidulans
atcaccacaatctacacagcaggccttactattatcaatatctactacccccctaataacctagttgcccctgctggtgctggctcaataccctctatactttctatacttctagaatatacacccccagagaatactatcctagcaggagacttcaatacccggcacctattctggcagccagatactgagtcttatgctgtcatacctggcgcaacaggattattagactggcttaatgcctataagctggaactttgcctcaagccaggcacccccacccatggaccaaacaccctagaccttgtcttctctaacctaccactaagggccctagtagaagaccatctaaagactccaagtaaccatgcaacaattggaataatactagaataagaagagcccccgcctatatacaagcttagatctaccaactaggagaaagccagagccctggcaagcccgcctgacctaaccctactaattaacctactagccaaacaactggtccagacatcccagcttgtaatataaggcatatcaagatataatacttacagactccctaggaccccatggtggactccagaactaacagacatactacaccaaacaagacagcaacaaaaccctgactataaacagctctggaaggctattatataggcaaaggctgaatactggaagcagtaaattgaacaagccacagcacctatagatatattcaaacttgctaaatagatacaacatccagactagcttgctgctcctcccctgaatatacaaggggcacaggttactaccctacagggcaaggcagacgccttccttaatcacctcttagagaagggggccctgcttccaaatcagacagaagagggacccccaaacaagcccctgggctcactacacctgccaacaaaagagcactgctgggctgctctctgtgccccacccctgtctgcccctagggaggacagacttgccaccactgcttggagggagctctggcccatactaggggatacaatcacacaactgtactacaggtatatggaggaaggctgctttccactgagcctgaagtcagcaaaggtaataatattaccaaaactaggaaagaggggctatacccaactcaatacctggcagccaattagcctcctctctaccctaggtaaaggcctagagcgcctcctagtatagcagatagctgtaagagcaattcaggcagatgtgctagccccctgccacttcagggccctgccaggatactctgctattaacctggtccaggttcttgtttacagggcccaagaggccttttaacagggaaaagatgcttcactactcctactagatgtaaaaggggcatttgacgctgtaatacaccaacagctcctttctcacttacgcctgcaaggatggcataaaggcttactccagctacttaaggactggcttactggccgctctgtatctgttcatatcaaagaaggcagtgccacagcaccaattaaaggcagactcccccagggatcccccctatccccaatactcttcctgctatatgcagcaagaatagtctctaccttagagggctccttctgctatgcagatgatatgggcatattattaactgggaataccctggaagagagctcacaacaactggtagaggcctacaagcaaattactgctctagggacagagacaggcctccctttctcaatagagaaaacagagatacaatacttctctagaaagcagcagcagcatctccccacagttactctacctggtataggggagattacactatccctatatacacagtagttaggagttcttctggatacaaagcttacttttaaagcctatattaatttggtctttagccgcgggaaacgactcgcccagcacctaaagagacttagcaatacccagcacagctgcccagtggcctccatgcaggcagcagttatacagtatattcttccaacagctctgtacagggcagaagtcttctatacaggcaaatgacaaaaaggggtagttaactccctgctttctctcttctacacagcagccctggctattatcccagcctacaagaccacccctactgcagcactcctccgcgaagcagacctaccagacccagaagctctactcaacagcatcctccagagggcagcagtgagatatatgagccttgatactaaacacccaattgcctaaatagccgcagagactaccgcgggcaggcccaaaaccaggcttaaaaggatcctacagctcctcctcagccccctgccagagcgcgctataatagagctgcctctccctccattatgcatgctcccaacagacaacaaaggctacagccctgcccctttacagatttcagtgtacttagatggctcacggaccagccagggggcagggtatggctatgcaatctactttggccctatcctcgtgtccaagggacatggtcccgcgggccccaggacagaagtctatgatgcagaaatcatgggtgctgtggaaggcctacgcgcagccctgggacaaccatgcgttggctactccacccagctagttatcctccgatcatagaatcgggtagcggccgatggggcctgaggtaacagaaatgaatgagaggttttcatagcgtgataagttccagaatgtcgtcccctgataccaaggtcgcttaggagtgacgactggatgccggctacagacatgactgacaggtcccgtgacttcaggcacccacggaagccacttgaaccacggaggaattcccttattgaggccgaggacctcaataatctttcataaatcctcatattcctccatattccctcatcaaccaagtacggtaccgaggcctcacaga

SEQ ID NO: 4650 - DNA, 2660 bp, Emericella nidulans
cgcaactaaactagccgctgatgaaggcaagaaccttgtgatcagttcgctgatacagcagcggaactctttgctcagtatgacgcccattactcatggagtttttgcaaaccagcacctcgtattcattcgacgtagcggtgacaatttgcgagcaataccgcttcacaccagaactcatctacctgctatccaagatggggcaaacaaagcgcgctttaaatttgatcctctccgacttgaaagatgtgtcacaggctattgcgtttgcgaagtctcaagatgacccagatctctgggaggaccttgttgactactccatggacaagccccgttttatacatggcctacttgttgaagcagggacgtccattgatcctattaagcttgtccgacgtatccccagtggattggaaatagagggcctcagggagggtctcactggcttgctaagggaacacgacctccaggcgagcattagccaaggcgcggccaaggttctacaaagcgaagtagcagtcgggatgaataccttgcgtgatggccagcgtcgtggaattaagttcaacattatccaagaatcttccaaatccgaccaggtgaacgatgaggcaaaggctgagactgattctgagaagactccaacgccatcgcgaggttcatttacgcagcaagccggaagatgcgcgggttgtcatcgacctttccacgcgaacggtaagcaaaatcataatcgattgtctttgttcccacacctaacgctacaaaccttcagagaaagagatactcgtcgcttttgcttgcgccatgccttccacctgtcccatgtccaccaatccgagccttcgtcgccagcacatactcccgggcttgaatcaggcgtccagaccccccggccgtacccaccacgtaccccgaacctcgaggagccttcaacaacgtcgcggaccgttggtccaaaggttacaacagcccgacttctacgggacaggattggtgacggatgccggatatgtgccctggctaaagagttggaggcagtcggagactcagaggcgtaaaattggtctgatggcgcaattccccgttgcccaatacagattcccaagttcagccttgcttccgcacatcttcgtgccgtctgcttccttggtgactggaggcgttgcacatagactaaggatttgaagctctaccagaatactggagatggagatgtataatatgaagatacccatgacgttattagcaacatgaagttctcgcttaatggaaatctctaccagagaatgctcctgatcacccttggattacgccagcaaacttaatgtagagttcctatgattcaccaccagcaatggcatcctgatagcggtgctactaaacaactgtcccaattccatccctatccccgggacactatccccgggacatgggtcccttacgttccgtgactttcaaaagataaattgcgcagccatggttggtcaatgaggctggtacgcaaggttgtgcctaggatcattatgatgttgactgaggagcggaaactgatgcaacctaggttcatagttccggctccaatcaaataccaacaattgagaacgcgggtgatataaaggatgaggcggctagtaacactatcactgctgtactttttacactaggtatacgtctagatatataggtactatagatccatcgagagactagacgaggctgccagtcggtatctagtactggatagaccattaccgagtgtcagatagattgaactattgagcaaaagcggcagtttgaacgacgattatattcctccacgcctttacgaactttacgaactttgcggattgtgtcggctccttgctgccgaagttcagctgctcaatgctcaagattgctggaaagtcagcccttcgagattttgaagtctacaagtatgtttcactccaccacacttcagttccacccttagcttccacacttcagctagtggcaaatatgttgtcagtacggagcaaaaggtacctacggggatttctaggccagtcagattccctcactggctcgcttgatgttgctgtcaccactaagactggatcccatgaatcaggatcattattggtgttgatcctcgaagcttttctgttactccgcaaggtttatcggtgtagactatcactcaatcgacattattgctgactcatcctggcttgatttgatttgatttgacttgacctgacataactgccggaatcacaacccgtactcatcatctcgacgatcgcggacacttctcgagcccaaactccgagacagagcgtagcaagccactttctgatctgaaattctgtgctgatctgacatatattccgtaggggctgccaattcatttggccacagcatgcaacggcgtccattcttctccatctttcggcataatagaggataagaaacgcccaggagttgcacaagggatggatgttcgtatgactcgggccagagaggacaaggctttgatccggtcgacccgtgatcgaatgattgctgtttgttaacccgcacgctgaagtctgtgatccttggggagagggggcgtggcgagagtggcgttcttctccatagatttcatcacaccatcgcatcgccaatctacggta

SEQ ID NO: 4651 - DNA, 3471 bp, Emericella nidulans
aatttaatatagagagaaaaaacacccacaaatactaataaatagaatataatagggaaataagagaactaggggaagaacgccgggtttaaccccacccctgggggttttcccaaacccttggcaaaaagttattgtggatttccggtgcaatcaaaaaacaataaattctaaaatctaccaaggcatgatgtagcttggtgaaactggaactggaactttaagaaagaacccgctccccaataacggggccagcctctccgtaaattcagctaggcggccatcattgccgatttggatagaagttctatgcaaagttgaaagcttcaaaggcattcgaagtaattggaaccaatttctggcttaatagagccagttcgttcagcactaacatggtatcaagatcagataagtccgtcctatgcaaaaacaagctcccggaagtcttccaggaagtccccaacgacacccttcaactgctccacctcctctacgccagttcccaagatcaggctgatcattccccgacgagcgatccagaacccgcgctcgatcaggtagaaccagaggaggtctcgcagggcttcctctacgctgcctgagttgacctctagatcgcttgttctcgcaacgactctcgatccgctcgcccgaacaaagtggatattcatcactgcacccaacccggttacaaccattttcgtgccctttgctagctcctgcaagccactgcggagttcgtcgccaaggttgttcaggctagtacatgcttcgggggtgtacaccgagggtcagacccttgcacccaacgttcatagcaagtgtgctgttattgaatgtcccggaatggtggatgatcgatgtgcgcggatcataaaccgacatcaggtctcgtcgcccaccgaacgcaccgatactcaggcccccgccaatccatttcccaaaagtggtcaaatctggtttgaggggggtgccgtggtccggatgcagcaggatagattgtagtccgcccggcgccaaacgcgaagtcatgacctcgtcaagtatgaagataatgccattctctcttgcagcatcttgtatagcatggaggaaaccggcagatcccggtatacacccgccagcgccttgcaccccctcaaccacaaccgcggcggcaatgtccttgttttcggtaatcaattgcactgccccatcgatgtcattgtattgcccaagaatccagtcgtccttgtccacattattcggcgcaatgccgtgggaaaatgacaatacaccgccgtgatatgcaccttcaaaaacaataactttcgtacggttggtggattgccgtgctacgctcaaagcgtagagattagcttccgtacccgaggtacagaagcgaatgtggtcaatggaggcgaatcggtcgcatagtgcttcggcgaaatgagcctctgctgaagttgaagaaccgaggttcatcccaatacttttcatggtcgaatccacagtctccataatcaccgggtgggaatggccatagaggcaggcggtcatatcgcccatacagtcgatgtacctggcctgacttagcagagttggactggaggcggtcgagaaatcacttactcatatccgtccacatcaaccaatcgattacctttgccagcttgcatgcatagtgggaaaggcgttgcgtgcagcaccgatcgggtatttccacccgggaggtgcgatgtagcgcgctgatgctgggccttcgaccttgggcgactagtttcgtaccgctgctgcgcaaagcggagatagtcgtctgctttttgggtcagtgaagtcattgttattgggaaacgaccttaaactgaagggggacgatagagaacgaaagtctgtggagtgtgagaccaaggaggggcacagttggaggcaagagcggggcaacttgcgaaggcgagataggctacatgtgagcccaacagccttatctagacctgctctggcgtcggtcagggagtacacgccgtggtcgatgcgcatcatattccctgcccggatacggctcggtacgttgatcaggaacgggtgccacctgccacccctaacggacctgccagcccggggttaagagtgtggcgggtttccagtattcttcgccaccaaggtgggatcttcactcgggtatcttgtctgttgccttccaaatgctcatcataccgatgtttttcgaaactccaccatagcgcccatcccgccagcgtcagggcagtgagaggggctgcaactgtccaataaatccagaactggggtgaaatggtagaaccacccgagcctgggccctcagaaccggatgctccgatttcgtttttgaacatgttcatcgagaatagcgactgcagggaatcagtatagagacagtggagtgaattggggacgtaccgcaacgtaagaaccaggaaggaatatcgtcgtgataaaagccagtatcttcattgaagtgctatcccgccctgctgtcgcagcaaggcgcgcgctcagccgattgtccgtctgggcgacgaaactatacagctgcaacaggtcagttatgcacttgatatatcattaaacaacctaccacattcagctgcagttccaatcgtttctgaagccccaaaacattgtcctcaagtgacttggccaaagtgatgttgtgatccagtacacccagaatttcctcattcgcttctggtcttagtgctggtgtgtaggctgctaactcggtcacgatcttctcaagcaacgccgacgcctcatagttccattttggattacgcgcagtgaaacccactctggtgagctgcgtattgatagtcacagtgagatgttcagattgaactctcgcgactggcccatcttttatcgcgtttatactgcgaggcctagcgtcgaaatttcttcggcctactcgtgtcactccaagttgggcctcgatacccatgacaattggggttaggtccctgttgcaatgatgttgcaatctcctgaggtgatggctaagcacaatgcatggcagcatgaggggatgatcccacagcgttggcgatgacataagatactcgcgaacaacgtcacagggcgacaatggtgctaaaggcagcgaagacctattgaagatagtacttgccgtgtcaacaatagactcgccagctagtagagctgtggtccaatgtgaactcatatcgtacgttagcgacagcatgtaattaccaatctcatacttttgcggagccttcaaaataattgcttaattcattagtggccgagtcttaaagtgggaaaaaaatgacaaacatattctcttccctccatgtcttccactattaaaatgtctagagaacagtcccgtggcgacttccaaggcgggcaatgtggccgggtgaagatggagtctggattctaccaggctgaaagtctcaggggacatgcctacgctgatctttggaaatagat

SEQ ID NO: 4652 - DNA, 4156 bp, Emericella nidulans
gtggtcgcggtggccaccgtggtcagtaccatgcgcaggcttatttgaaggtcgaagttccccagacggattatgactttgagacagcaaatgccaagttcaacaagcaagatctggttaaggaggctattgcctctggctccccccttgaggaggctgaatctcctgcgcagattgctacagctgctgagcctcctacgacgacccaaagcgcgactgtttacaataagtcgacatcattctttgacaacatctctagcgaggctcgcgatcgagaggaaggctccaatgttcggcctggtggccgtgaatggcgcggcgaggaggagaagcgaaatattgagacgtttggccagggtagtgttgacggctaccgcagcagctaccggggccgcggcagaggtcgtggctatggtcgaggccgaggtggctacggccgtggctacggctcccgaggacgcggcggccgcaacatgtcgcagtcaactggcgttcccaccgcaaactaattaggtgctttttgttataccgttagcttggaaactgtttgatggcgtatttagcggtggacatgatctttcatctacgatcttttctctctccgacttggaagtgacgaataccttccagagtctacgttttgctgatatttccggcgtcagggcggtgcattcctccaagagctcgagttgacctgagtacacgcgcgtcaagactcgcagatctgcatgtgttcgcatgagtttacaatgggtggcttggtcagctatacagtactggctggctttggtttcgcatggtatccgtacacggcgtttgtcttctttgcatggattattggtcgtgggcctccgttgcatcactcaagacgttcggataatggctaccggtcttttgttgttcgccggctgtctcatcagcgacggtgcttctgtatcatacatagtggacaaaagacaaaaagatagtctccaagaaaaatgctaaatggggcgactagttgtcgttccctacaagctgcattcctttctttgtgccggcttagcatggacttgactcacaatcggtcatacaaccctgtctaaaaggatagcctacgtagcttgacgataggtaacccctcactctgaagcttctcttcccctctccgcactatgccaccacacttcctcggcccagagctttcgtaaccgattgtcaataaaccccttaactttaaaaagtcatggttcaccagtcatccccgtactcttcatgctccccattatcttttccacccccccaaccggaccgcagaagaaaccatcacgacaacacaatcctcaagatgagcccaaccgaacgcctctcaaaggtcgtcgacgccgtcacaggtcgcggagcagtccaggaacccaataatcttcctgggaccccaattcttcgcggttcccctcccgcagagaactgccgaagattcctggagccccagacgatgcggcctgggtatgggggaaggatgaccaggtactgttctgaatcctacaagggcctgagcctgttgttcctgacaattgccttgtttccagattggccgattgaatctcctcacaccggccagggttaaggccgcagccgcagaaatcaagactggggagatggttcggttggagtatgcatatcccccgtgttctctctttccctacgttggtctttgcccatatccaggtgatgtgcaaaagatgtgctaataataagaaaaaagcctccctctcgacgtgcccaagaccccttcgttcggccgtgaggtcttccagcacaagatcaagccgctaggcagcggtgtcgggtatgatgatttgtatactatgaacacgcagagcggaacacaatgggatgggtttcggcacgtatgtcaagctcccatgtcccaagaatatggtaagtagatagatgctaagtatagtcctaagttcgcccacctgggctcgaaatgcttctacaacggggttcgtgtcgctctgcctcaccataccgggcttcggtcacccggtcaccctcactgaaggataagactgacaatacaaaggcaacatccgccgacatcgaaggtcctaatcccacaacccgctgcagcatccaccactggtcaacgcactgcatcgcgtcgcgcgcagttctactagactacaaatcctacgccgaagctcataacgtaaattacgatccctacacctcgcacgccatctcctatgcggacctagtcgcctgcggcagataccaaaatctcgacatccgacccgagtctgccggcggagacttgaaacccggcgatatcctactcgtgcgctcgggcttcgtccagcgatacaatgaactcacaccttcgcaacgagaaagcgcagctcaacgtactggcgccgacattgcttgggctggactgaagcaggaagaggagattttggactggctgcatgatagctactttgcggctgtggctggggatagtccgacgttcgagtgttggcctgttagcgctaccgaggggggaaggggatctattgggtttatgcatcaaaatattttggcgctatgggggatgcccttgggggaaatgtgggatctcgagagggttgcggaggtctgtaagaaggagaggaggtggacgttcttcttgaccagtgcgccggcgaatgttgttggtgagtgcctttctccgcccagatggatctggtcagagctgggctaatgagtatacgcaggtggcgtgagttcgcatcctaatgccacagccatcttctagtttgaacaatgcaggacaatttgttggagaactggtgttcaagggtagtcgcgtggaaaacgaaaaacatgttcaaattcagttcataactcgtgtacattcgtgatttgacaaatcatcagtatcttgtcgtttcgcccattccagaaatcgagcctaacccagttcctttcaactggaaggcaagcctaaatcgtatattggaaaaacaacaagctattccatagatagtcagaaaaactcctcaggccactgaaacccgtcagtaccctttttaacagtctttccatctctctccatctgttcctttctcttccccatttctctggctaaacgacgatcaaccttcgccgctgtcgcagccaagtctttgggtagcggaggcactggcgggatatactcgtaccgcgcttttctcctggtagacattggggcggagcttggcgttgcagattcgtcatgttgaccagttttgatgtcttgctgctgtggctgctgtcctagtttcttaacgataccgttggggtgctcgttgacccctagcccatcacaatgttgattctcttgtcgtcgccaaaactaggtccaggactacggccactgccatgcccgtgcgccggcgatgtcgtggagcgtagatctccacgacctcgtttcatacgtagaactggagtgacggagcgattgcgtgtcgtagatcgcagtggtcgacttaccgatgccggcggagacgctcgatctgcagtctgggatgtgctgggattgttctaggccgctgggctttgtctcttgttctgtttctgctccacggacccagggctatatcttgtgggcatttttagggagttttgttttttctagaaggggttttttattcgtgactctttctccatacgtttctgatgttgatcctatcttcttatttgtcttgttgtatatatatttttttattatcccttctactgggtaccattatatttcttttatactatttacttttattttatctttatatcctattcttttccttttagtcttttttctcttttatttatcatttaggttaattcaaaaatatttttttcttataatacttaatatatttacttccatcattttgatatctgcccattttctttacgtcaaattgttcttcattcttattctaatttcttttatctcatatttttatcctgatctctttatacgttttatttctttatcatatactttatatctatttttttcttatttaattttttattacttcttctctcatcctcactacttttaatccttattcattctcaattcactatcatctctatcataatattccacttttctttttgttatactatttcttacacttta

SEQ ID NO: 4653 - DNA, 2319 bp, Emericella nidulans
caccctggcaaagctgctctaaggatggcctccttccaaaaatgcaaggataatgcatactgagatgacaggccaatgtgcaggttacactgggtgggttcctcaataatccattgttaaccacagctttctatgcccgtaactaaagcacatgcaattgtccaactcttgaggatctaacttttgatttcatggaagatctatcaaagttgcagaaagatagtgttgaacattataaggacattcaacctttatgggttatgtccatgtagttgatacagctgtattccgccgagcatacattcagattcgacaactctttcctcaccatgactatcatgcatcatacgccgccaaaggaattgaataatataaaccagatccaagattgtagggggctcgaggaggtgtaagtgaaaacagtcaatctgtgggcagttcaaacaaacgggaatggttctacataggggacatcatccccaccaccaccagtctgtttctttgctcagttcgcataaaactatgcctgatccaggagagtccccaccgtcttaaaagaacatccctaaccaatgtctgaatagccaatattcaaattgcgcaccaggttcgtccatttccgatctgtcttctagtcccagacaatcgagatttgtatttctaatatgcctggtttatctattcgtgtatttgattcagcttccttttgccccttccctcattgagcattcacaacaggtgcaattacagtgtctacactataaaagaccatcagggtccttatctgaatgtgatactgacataagctcttggctacgtggcgcttttctgctatagccagttcgctcagaatggctcaacatcaggaccctttagctcaatgcaacaaaataacagtattcttcttattctagaactatactctgctgctggtacttttgtggtcctttccatgtcacacggctctagtttaatcacttctatctaaaccggaccttacctagtcaatttgcagagtcatataagctagataaagcactttggcacagtctatatagctctcaagttatgggaccctggtttcaggtaaaaggtgttaaggtgtgtaatttccaagatataggaattaagtactactcaatagagactatgtctatattacctagacagataggctcctgggtctcctaattatagaggcagtttattagacttagtctgagtagtatattataattctctttttcattactctagcatagaacaaaccccaagctagtaagctgcaaggctctacctttacaatgtattattatacagctgtaatccctgccactcatcttcttagagctttgattatactaagagctttgctggtcaggttttagtattcctattacaatgcttaattctagcatatcacggtactaggagtttatggcactactaacaaatagaaaccttagtatattatgcttggctacatccgccacttctctagaaggaggctctataagaaatctgaactagcagtaaactggctctgacctggctctgacctggctctgaactggttcgcaactaattcttgatgagcacggtcttaatgcagggatgctggtcaactggttccaaactagttagttataactagcttcaaatacataatcagctgggcctcactgatttaaaactgaccaagtactgctgcctaaccggggctgggctggcagggaactagtgataaataaatttagaaataattcctgactggcttgagttggtagctgcctctgtttactgcatgggttctgccattaccataatatggcactgttgtcacgttggtgccctggctagcaaaagtatggcagggtggccggtactgatcaatgttggaggatatcattgttcggccgatcacactacaacaacttgccagctggcaacaaatggtcacctacctctctatggcagcacgactctgttttcattaatatgattcctgattttgtgtcgaagtctgctgacgacggcgtacagtattcatgatgatcaaagtatggctttactaacctgggaatactgggtggtgacgcgcatatccttatgcagcatgcatcctagctgactggaggctggatataattgtacagtgtcatgacccatctgcaacagcatcttgaccggcgctgtgccagggaggtccagccatatactagagatgacgactgcagctgacgcttaaatatatattatatataccaccctagctgcctgcaatggcagctcgtacagtagcatggatttattattggg

SEQ ID NO: 4654 - DNA, 10651 bp, Emericella nidulans
aatttgtcatgtcccgtttcaaataggtgcaggtacgtattttaaagcctggttcctagtttctgcttcagacagcacgaaatcaagcgcccacttccagttcctcaaaactagtgctattggcgcattcaagtaacgtaagtacaccgcctctgtgttgactatagtgcgactcctgacttctctttagtatgacatgctcactactccaattacaaccccacacttccagtcgcgtgtgctcagtcttctttcttcacacttatcgaatatacaggctgtgtctcatagtgattctgggactctgatgaccactgagaacatacgacctctcgttatgccgcagctaggaccggcagatactcatttgaccccgaatgaggcaatgtcgcagttggtgggagtaacgagttcatggatcgacctgtgttctcccgacccactaatcgcagacctgtcacgccaagtttttatgctcgaagtagcctatgccgccttctgtggcattggctatcttttgattccaggaccaaagttgcatcataaaggaatgcattcggatggagtgatgtactatgcacgggcgattcaagatgcacttagtctcggcccatacatccagtttcatatctggttagacatggtcgacatcaggatctcgaattagacgagatgggtgatcttgcacctcttgctcgggaggaattttttgacaccgaaatagagcagccaaagatagacctttttggtacttgggatgcctgggatgctattagaagaacttgtaaataccactccaggcttttcgtaggtaagaaaataatatctgacctttcttcgattctgataatcgtggctaagatacctgctagctctctctttaccgaagcaccttccaccgatggctgttcagtcaagatggcattctgagccagtccacttgtttaccatcgactcgaacacgttcatcaaaaatcagaaaggatatccagtcctaagtaaagctcaccaggcactgatttccaggttcatgcgtctccgcaccgctccatggatcttgctttgcgatgttggacctataccaggtgtagagacggacaatgcgtccagtctccctggctctgaataccctagtcttgcacaggctgcggcttcaatcaaaaagcatcatgaccctactccgcatctgtcatacatgagaaatcttcaatcacgtcagcctccccgaactgccattgagagattcggcactggctaccaagactacctgcaagcgccactgcagcccttaactgtcaatctggaaagtatcacatacgaagtctttgagaaggaccctatcaaatacgaatggtatgagcgcgcgatcgcgaaggctttaagcgattgggtagaacaaaaaaagcccacgtcaaacccggatggccgtgtggtcgttgcagtagttggtgccggaagaggtcctttggtgactagggctctcaaagcaagcgctcagtcgggtgttgagattgacttgtgggttgtggagaagaacccaaatgcatttgtccttctccagcgtcacaacgagaatctatggggcggaaaggccagccttgtgcactccgatatgcgtgcttggaaaggaccgcgcgtacggaaaagcaccaccttgtcgacagaacccgtcggacagtctctgggtattgaaggccaatttctctacactcctgaccctaaccaaaaaactgcagattcccctagcctggacgctattgagtttgaggactccaaaatcgatattgttgtttctgagcttctaggttctttcggggacaatgaactctcgcccgaatgtctagacggcgtcaaccatctgctgaatccagtacacggcatctcaatcccagcatcttacacggcacatctcacgcctatctcagcgccaaaactccatgcggatgtcacgaaccagtcaatcacaaaccctgcagcacctgaaacgccttatgtggtcatgttacatgctatagactacctttctactaaccaatccgacgccagcgcaggtaaccccgctaggtcttcagttgcgacagttccatatgaaccaactacaccatttgtccaaacagcctggtctttctcccatcctaatcgagatatacctcctcagccggcttcaacgtcgatgatatccaatgcacacaatgtgcgccggactcgtttaacgttcccggtcccaaatcgtggagtttgccacggccttgcaggctacttcgaaacagtcctgtaccgcgatgtggaactgtccaccaacccggtcactatggacagcaagagcgcgaacatgatcagttggttcccgatctactttccgctcaaggtaaggcgccctggatgaggctgaaaaggtgtcgatatctaactagtgcctagacacctctaaatgtccccgacaatggcgaaattgtcgcgacaatgtaccgacagaccgatgaccgaaaagtgtggtacgagtggatggtggaagttttcgctttggagggtggctcagaaccagcatcagcatcagcgccagcgtcagaacgcatcgcccctgtgatgagcggggccaggactatttccgctagcgcggatagcgctcacaacaaggacatcacagcggatagctacagtaggttggcacagaagaaagcacgcggcccaagacgagtgagggtggggatgagtgatctacactcaagcattaaggatgggtgtcttatgtagcggagaaagtctgctttaactcgttccggaacccggagcggtacgtaaatggctgctgtgagtgaggctgcaaggattcggatttgcggggggggaggctggtggtgacaacaattccttggcgaacaaaaggctagccgccaagcgagtttgtgatatcaagaatgataacgcagccttggcaatttgtggtcgtcagtagtcataacatagaacctgcttgtttcaggcctcagggctcaagagcgaaaaaaaaaaatcatgcagctgggttggactatggtagcccatgcacatgcgggtataacgcacattcctgcctaagtggggggagaaggaccggtgttctagcagtttctggtgtctgggaatctggagtaaagactatacgagtcttctatcagcgggatgctattgtgcaacaaggaggtcaggtgacgtgacagagcggacttccagccggctgccgttccgtatgcaatctagcagtcttgcaatctcatctagtgtcctccatggcggtcggcatcctccgtgcaatcctccgtgcaaaaagtccttgtcaccgctgaatctgtcccctgccgacgattgatcgctcgagccttgaataaggggtcgccgagtgtagaactgggccctccttgcagatcattagagccgaaactgcgagaacggggcgtgatagtgcgacttgaccctcagactatgaagcatcaagagtcttggaatcttgggtctcttgcaaagtgacttcaaccggcagcactggaaaagcaacgtgatacgggaccctgctgtggttggtttagctgcaggctgaggggccctcgctatcggtgccaggactgtggcgactgcccggaatgggtttcgccagcataatgggatagcataacctgtgaatgataaatatcaggcacagtttcaggtatcggttggaatttactggacagggtaacccagaccgatgcactacgctgcgcgtgattcgattcgatctgtaaaaatcgtatctgatggaaacctggagctaacgaccgaagacactaagacactggagtcactagaagtgccggtctacggagggcaaagaaagccacacgattcggtcatcgtatggagtacagggctatcttaaccctgtttgccgctcggtcaatttgtccgcaaaggactttattactttattactggagttgaagcccgtgtttgaaggaaaataagatgagatctgggtttagctgtatcctctgaagatcgattagatttgggtgactgcagaaagaagaagaataaaaaaaaaaaaaataaaagtacccgcggcggttccagacgaagaccacggacggacagcatctacgcagcatctctcagtcccctcttcccagataataatcaatcatcctcccttgttggcgctgctctgccttcaagtcagcttacttgcagcaagatcttcgtctttctctccatgactgctgtcttccgttatttatccactgtctcggagtgcgtgggttaatctatcttcttccacccctcccctccgcgaccatccacattcgcctcccaacgagaacctcaacaacatccaactgtacgaatctttcgacttaacggagtgcctatccctggacaccgagtttcaaccaggtacctacgcgtttcgcccgctctcgtgctgaaatggtccacgccacaggcgaggaacgcgccgtacacctttcacgagaggctgtcgagttgagagattccgggcaccatgaggtacgcgacaagttcacatttgcatccctgcctgggtggctcaacggggctgatgctgggtgcccttgatatgtcccgtgcgtggtggctgacgcattccgtgatgtaatataggccgctgtccgaaatctccgagaagccctcgcgctcgcgcccgataatgctactgtcaaggaagctttcctgaagattcagaatgaagacggaaacagccatcacttactcgaactgtgccgcagttatgctatccagaaaaacgaaaaagctggaaaagacgccgcccgctatcttcggaccgacggtcttgtcccgccggagaatgtagcgctggagtgtgtgaaactgctgctttcataccaggcgcaggcgttgtctccgctccaggatgatattatcgcgggtctcgttcgccagaatgccagtgttcgccagtatttctccagccagcttcaagtgtcggtcaccacatttttcgatgacctttacgaccggggcgatggagccgcggtgtgtcttgatactgtagttttggatcatgcagtctggccttcggaggaagcacgcctgcattgtgagcgagagctcttccagctctttatcgccaagcttatggaatcgggccatgatctggacgggcgatcgctcaagggtattgctcgtcttttggctgttgaggctgaccagttgcgagatctaatggatgatgagagccttgatgtggttataacgtccttggatcaccgacttcccctggagtggagaagccaggctactttggccaccgtcaagtacctggagtctgccaaggaatttggacagaagcagttttcgcaaatcatttcagccaagctaaggaagaaccgtgttgacgaccttaccgttgcgttttccgccacagccgtcatcttccccattgcccccgatgttgcggccgagctctttctctctgaagccttcatggcctctttgaaacccctcactgcgagggatgcgaaaagccgcaggatggaaaaagcgattctagagctcctcaatgctgcatgtatcagcagcaccagtcgcgacgccatttctaagagtctctctgactggctttctcatattctcacgaacggcagtgacgagagctccgagctggcggcagtcatcctggcaaagctgcgagcttctgcgaaggacagcaatggtacagcttctaatggtaaggctcagagccacgacggcaatgtttctgagcttgttgaccgattcaagggattgatgtctcgacaagagactgagcatatctcgaacgcgatcgaaggcttagcttactcttcggtcaaaccggaggttaaggaacaactcgcagcagatcagagttttttgcgaggattgatcaaagtcctacaggagaagtctaacgagacatcgattctttacgggggtctgatgattatcttgaatcttacgcagttccttcccaacttatctgaggagcaaaagaaaatgtctcagctcaaatcttacgctgaagcaaacgccaaagccgcgcagaatggtccgagtgtcctcgaggatgacaagcatgtcatagctcgttgtgccgctgtagttgatgcaggagtggttcctctcttggtggcctgcggcaggaataccgcccgctcaaatcatgagcttatcagccgtatacttctctctctctcgcgtaatcccaagtcacgcggtaccctagcacagcaaggtgcggccaagctattactcggtcttgccgtcaactctaactcaagcaacaccaacatcctgaacgcgtcgcacgcgctcgcacgtattcttatctccgtcaacccctcgcatgtctttccgctctcgggctatccccatgttacttcggctatacgacccttggtcgcgcttctcgcttctcccgaagtcaccagtgtaacagcagaacagccactggacatgttgccggtgtttgaaagcctccttgcactcacgaatctagcttctcatcctgattcagcggctgcagaggctatcgtccgtcatgcttggccgcaagtggaagaattactcctttccaagaaccctttaattcagcgagccgcttgcgagttggtttgtaacctgatggcctgcgaatccggggtcatcaaaatggccgacggcaccaagcgagctgcccaacgtctacatatcttgctcgctctcacagataccgatgaccttaccacgcgacaggctgctggcggtgctttagctatgctgacagagtttgatcctgtcattgctggggtactcaatcgaccgcgcggtgttgagctcttgctcaacctttgccaggaagaagacgatggccttatccaccgcggaatcacctgcgtacgcaatctgacttgtgccgcctctggcgacaataggcgtcgcgccatagaagccgtgaaacaagccaaaggcgtcgagattctaagcaacatgctgaagaagacgcggaaccagttgatcctccagattggcgttgaggcattaaagcccctggtggagtgataggcggcggcagcatttaacactcgagtttaagcctttcttgatgtcgtgatgaacccagtaccgtattttacctttcatagacctcttacttttcacttctctgttgcttttgctttgttttcctcaccttaattttcggagtcattgatacagcagtggattgtttatggttgtgttgctacggcgcgtttggcacgggtttgttgaaggcgttcttgagcttacatcatctcttataattcttacatatgattactcaatgttgactagacgcccaaattgttagagcggttcgccggttacaactccagatcaatgtctcttccacatacgagcggcttaaggttacatggcgtagcggttgcccaacacaggtgccaatatgggaatgaccatttcatattatggaatgcgaagtctgaaggacagatatcccacgcgcgcctgggattgaaccctgtcgcttgcgtcgacaccttctggtctagagactgcatattaacatcattatcagcctcgcctgtacactaagctgtacattcattgttcctttagacattgggccatacacatgtgcgaataccatctacctctacttcatagttcactgacagagtgccttccttactatatccgcaaggtcaaactgcctcttctgctgcaattacgcacaaagtaagttctatccttaaggataactgacctattaatcgaatctacgacagggacccgagtataagcgggctaccaatgctactggtgcagctgaagtgttcattcccagtggatcatggccgtaattaagttatcattggtatgaaagtggtcgattaggtaccggtaatgtgccttagaatgcgaactatgtttatttttttttttttttcctttttttttgaatgcctcgtgccagctttggtttggctttgaataagggatagcaggtagaatggagtctgtaagggggcaatatactaaagatacgttcagggccatgaagcgcaaaatgcgctccgtctggtggatctagtgttattgcatttcttgcgcagaaactatattgactgctcaagggtcaaggggctgcatctgttcgcaatggaataatatatctatgcctggcgctggtcacggatgatctggcctgcctgagatcgaatgcataggagggttcccagttcgatatatagtccactaacttgtcttgaagtctatgttctgttctggggttgcaaagaccagagaccagtgccaggacttgcccggcatattctcttagagaatatgcgtggcaccgttgcttcgttgaggtcaaattcaaatctcttggggacggggttccgtcttactccccatactacccaagaagctaaagtgtagcgttctcgctgcgcatggtgtacctatcactgtaaggctggaggcggggacgtggcatgactcgtcgcttcttcacaagcaagccaggcgcttccatactcgaactggaattcggtgtaaagcgcatccccctcatgacaaaggaacgattcgcagggtgtcactgaaattgttggataaagaacaaggcgcaccgttgcgcaagtggctgactctggagagcagtgcagtcacatcggtcttattgaggagggtggttatctctcatgttctttttcgctggttgggggaaggcgtgtgtacctaagctttttcctcctgatagagatatcagtagcaactctacttggacattgctatactgatcacctcccgcatttatgaaaattcccgccaacatttctgcgtagcgcagagatccgctatcgctgaggatacattctccttcagcacaaacggcatgtttggtgcagtgttcgacatcacacctccacctagccgtgggactcattcttccggctagtacagagttggtaaagggagctgcaactatctgaggtcattcccggtagctttctccacggcagttcccaatcgttgagctttctcccccacgtttggacctggtccaggtcatctgagctcatagcgtctccacgaggggcgattggcagttgggacgcggccagagcgatgacgaaaaagtacgtcgagcggtctacagatatcagatagctataagaactaggagcaaggcgattcgtcctctactctcatcccttgtcctattgccgcgactttccatcagagcatctcagcgtcttatctacgatcaatttcattataattggacctacgagtcgatattttcactatttaccctggaggtagctgaaccgagactcgcagactccgagtgtctggtaaggtacgtacatattagctgtttcaagttcccagttctgtccaatttctattccgagttgtgtttcgagttttttgtttaatctgcgtaccttaagagtgcctcctaagcactccgtcctgttccgtgcatcgccctggatgtgctgggagggctgttcctgggaagccatggcaaatcaaagctggtttggcggccacgcctagcagtacagcctggggaaccgaccttcggcggccatccctggaccatggctaatcttcgaattcatccaccgttgagccccgtctcgccactcatcaaggctagtgctcagcatggcgacgcttacttgtcaaaatgcgattctagccaaattcaccgctccacaaggcgccgttgatcggtgatccggtggttctgatcctcggcgcgttgaccgcatcctttttgtcttcaaatctctgttgcttctttctctcgccagcttccacgtgctgaccattgttcatcgtcactagctgctttcttccgcccgccttgccccttgtaccgacacgttcgtttccctccgaggcttctcactctatatccgacggagggctccccaggtctcccgtctcccaacatacaatctctattctggttcttgctgggaactgacacatggcggccttgtcttcaaagctctcttttcttctctcttctacccgtcacttctctatctgttaatcctccgtcgcgtttccgttgtctgagcgagctgttgcgccgcgttgcagatttcagcgcccacaaaaaaaaaaccaaaatccccaaaaaggaaaaggcgtccgttgcccatttattttcaggagatttataggatttgtgtattttgtgccgactttctggattcactgcaggatttgaaatactcccacagccatgaaatttggacgcaatttgcccaggaacgtggtgccggaatggagctcctcttacatccggtataaggcgttgaagaaactcatcaaatccctggcggaccgtgtgagggcaggtcacgaggcagatcttgccggtgagccacctttgttgcgtcttctggaccgcccggcggccctcctaaccctcgcgctctaggcttcttctactccctcgaccggaatctcgaggacgttgaccacttttacaacaagaagtatgccgatttctctcgtcgtctgaaacttctatcggaccgctacgcacataacttggatgggagtcatctggattcggacgatgtggaggatccctttagtagggttaattgcggccggatct

SEQ ID NO: 4655 - DNA, 2332 bp, Emericella nidulans
tacagcaaatctcgtcaaattggtcggctatcttcggcgtctcgctggctacccggaggccctaacccgagggaaattggactcatgcaagatgtatcacacggagctaagctaatagcctgtccgaagctaagagcgtgtatcagagtaactcaccatgttgttggatagacccgggatgttactggtcctgtttcacacggtcagagctatatcggctagagccctaacagagaccatatgctgatggatacaaaccgtagtcggggcctctagacagggaacctagtttgattgtctgttcccagggcagtgccacgagcgccagaccaatatctactaggccgtgccatactcaggcatttgcttctttcggctagtcggcttccgcatccccaaagcagtgctttaatttgggatgtggcaggccgatatagacaaatttatactagatgaccagggttaagctgtagcgcgcgcagggcaatgttggctttactcgtggtaatcttaacaatgtcttgacggaagagatttggacctgggcactaccgagactagggacatatgtgcaggagtcctcaacgacggcatgatacttaccccccctccgcgccagaggatctatagcctttcgtggcaggactagttgcgtttttccattgtggcaagtgcaagacacttccagttctggttatgataaccacagggcagcgagagatacatatttttcacaagcatagtcatgtacaaactgctatacctggcttgcctcatgtcgaattccagcagcccgggatgtgatagcaggtcgctaacatgcagggcccattttcatcgtcggatcctgcggaagttaccctatgttgtgttccggcgccccttagtgagagttgcatcaaggctagctatattaaatgctgcaccgccctgcttggccgcggaagccggtgccgcgtctcggctctcctgtgacaagagaacagttattcgtccaggtgacgatgtatatatgagcgcctgtgtgcgcctgcggaagcatattacgcaggctgacattttcagtatatgtgatttgtagatcagctggcgatcgtcaagtcaatccatccgtcctgtcagagcctcagagggtcgccgattaggctcgggccgtcagtaccacaatttcagggtccagcgtaatctagactactggaggcgagatttaaatcccaccaacgcgaaccggtgcatgcgaaaacgatttgagatgcgttcgtcattatctccctttttccgcgcattgccggacggacgagactgctttgctttgatacctaggccttgagtaccgtagtatctcgattgccaataatatgcgctagagcaaccaaacgcgggctgcttacctcgatcctggatctgtacctgggaactactactagtacttgctgacagtcgaggtcaccacagccacacgagcggctgatttggccaacgtggccagtgccaaagtctcatggcgctccaaatcatccacctgagataagtagagtactgaccggcccccggcgatttgatctcttccgtcacctcccattcaactgcgcccttcttggcccccaactaccatttcatcatgtttcccaactggctccgcatgtaactggctccgcatgtgggttgttgctctcgcattccctacctttgtcaggtttaagtacaacagatctgacgaccggacatctgtagcttgctctcaacccctgacgttggtatccttcttcccgcaaactgcattgcatctggacacgaaagaatacctcggggatctccctcacatatctgctgtgaatgattgccgcaactgagcaattcgctttagcctttggatacgtcgtccttctcaaggatgctgatgcattcatccataagcccctctcatccggcgactggctgaatctagtccaggtatgctatttatgctgctgtttatcctatagtaagcctctgccttcgccttggcccttgtgactgtatctgtatcttccattcgcggtgagctaacacgagctgtatttgccccttccagctttagtctcggcctgtggtttccctccgacagcgaccatgtccacaagcagcttcttcttaaaatctacatcgccttctttctgctggccatcctcccgcttttcctctgcgccctcgtgcagcatctggacgtcgacaaatcctcctggcaggaactccccgtcgtcctgacaatgttcccgcacacccagtccctaacctacctcagcacggatcaatggcaattgcggcgatatacccgcaagcgcgcaatgtt

SEQ ID NO: 4656 - DNA, 2116 bp, Emericella nidulans
cactacagttccacgcttgaaacaatcatcggggcttgatgacgagaatttcagaagacatctacttaaaaatacttgatgtgccctgtaacagaagcctggggggctctccagcagctgagggcgtctgcgaaagacatcaaggactgcaagagacctacgatgtttctacatggatatgtaaggaactttgtctcgcagtggtatcgcaaaagccatattatctgaacagactcagtcgaacggtaaatagtaaatataatggtatcaacaaagtccaccctaggcctcgtctatttagataacgcagaccacaggaccgactaaacctccaacgaactatataccatacctagatagatagagacagaggtgaaaatgaagtaaacaatctatcccgtcccaaaactttaaacgtaactcatgctcacgcctgcgacgtctgctcaaacaacgcaattgttgaacaatacgtactcttgtttccctcctgcggcacgagactcgacccatcggagttggtgatcatattttctgatgcaatcgtgctgagaccgaagatatgcacgtcggagcagtctacctgcaccatattctcctggcacgagtcacccaagcactcctggccgtagttttcaaagaaactgtacaatcccgcaccgtagacatacacgctggacgagttgataacgcgcagaccccaggctttcctgcatgcatccgtcgtgcagtaggagaagtctggatcgttccaggaatcctgtggcgtgaagggtacgagcgcgttgggattcgcctggtagtatggtgtttcggtctggattaagcccatgaaaatgttcttcgcgttagagacttggtagttgtacagctggttgtgttcggcggcggtgccgtacatccagacgggaccttgggattcaacaaggatgccacggccgttgtagatgttgatttggttgtgatcatcaaggtcgagttcgtggtcggcggtccaagaccaaacgttctcgaggtaagcggttgacttttccgtcaggtgcaggagcatgaatgcgccgatgcactgggtgtttggggtagtggtagagttgggagtcttagcgcaagtgtcggactgcagctctgtatcctgcggagccgccgatgcggaagtgcacgtccatcatgccgtcagagccggcagtttcctcggaaacgttccattccattagggtcgcgacgggggcgggtcccttggtcaggttggtgagatcagagatttcgacggagccggtttcgccgggctggccaacttgcaggagggggatggggttctgctcgtcggagaacttgtcgccgtaagccatgaggacgggccagacctcgccaacgatcttgatgttggaggggaccttgacggtgtcagtgaggacgtaggcgccgtggtcgaagtagacgacctggtcagatgttgcgctgtcgaaaatcttttggatggcagccgtgtcgtccgttgagccgtcgcccttggcgccgttggccttaacgctgatgaaagaagacgaggcgtagctttcgtagaggggcttcgagcgctcgaaaatcttgccgctgctgctggagaggagggatgcaggcttggtggcgccgggaagagcagtctggatgcgggtcttggtgaccgtgcgggcggacgattggcttgagccagaaccagagcccgagccgtgaatcgcgcctgtggacgttgatgctgaggagacggttccggaaggagcatcggcaacagacgaggtgccgacctgagcggtggtttcagagcctgaagggaccactgcaacagaggtagcggtttgacccgtagcttcagtttctggtgcctgcacaacggaggtggcagtttggccagtagcttcggtgcctggagcttggacagcagacgtggtctcagtctggcccgcgttttcagagccaacagtagaagcgccagcctcagtagcagtcgatccgccaaggccagacaagagactgtcaatgactgggatcgagggcagaattgtaggcaagagcccctcagtagtctccgcagcgtttgtacgcgattccgtggctgaactcggcagtgggagggttg

SEQ ID NO: 4657 - DNA, 2186 bp, Emericella nidulans
gcatcccaaagttcttgaactttgctctccagtgcttcgcgcatatcatccgagctctttgcgtggaggatctcttcgctagcctcagctagaacatcctgatctgaatgggttaggaattgcttatttatgtcgttcaacagggatgtataggccgtcgcatctttctgaagatcttgaatcttgtcaaggtccacaaagtgctctaagcgtagaaccgaggaagcagcctctggggtagagccgaatttgctcaagagccgtggaatgatttgcgcaagactatgagcgatttcctcttgctgttctggaattctgtcggtcaacgcctttactttccggcctcgtttatcaatgtcggacttggcaacgtcgaggattcggagtttaacagcacagcataatacctacagcagaattatctcttggccttcctgcattttgtacagcttcttgaccgtcccagtagtgtcatcatcactggggtcatcaggaatttgggaatgatcaaacagaagatagccagccagagtctgccaattcgaaagttcatcgaagtgtgggtagacagcttcagtggcaagaacgaagcgcgagtccattgagacccctgagatggcgtctcgagcttttatacttggctcaggggccgattcgtcttctggagtatcataagcctgaatgatgtctgcaagacacctgaacttgatccatgaacgtttgggcgattcaaaatcttcttcatcttcatcgtccccgaacacttcaccaatctcgtctgcaagctcttccaccgtcgagtcaaaaacgtcctgtacatttgcgacaaaaaaggggcccgctgccttgcgcacacgcgcctccgaatcgaagatgagcctcccaacagtgtcaacatcagcaggttcaatcagtccggcatctcgaatcaggtcaagcagttcaatcgccatggtacgcatcctgacgtcggagtcatgggtggctatttccacaaatcgttggcgaaatcgttcagtaaaggaacgcacaccagcaatgttgtctttattcgagtatatatccaaaagttgctgcaatgctacggaccgcgtatgaacatcgctgtcggatataatccaaccacaataccgaagaaattggccctcgaaaaagtattctctgtaagtgcgcatccacgatcctagtgctgctatgcttagtgcacggattttggggtcgacgtcccggtagcgattgacgaaaatgatattcactccgtccttgagcaggtcatctataagctcgagtttagcttcgccctcttgaatagacgacttaatcgcatcaacacggcctttgttgacggtctttttcttcttctcactctccagctgcttgcgagaggttgaaactgaagtgaccacttcccgtgcaattacgcagagtgcgttcatgtttgataaagcgacggcggttgcggtatgcctgagaggtctacaggcccaagaacccagagatgacagccaagattggagattttcgtagaggaccttgtcatcgtagagtaccgaagaatggtgcagggtttgcatcaaagccacaaagaagttttccaggataggctggaagaatcggtactttcgagatttcgagatcagggggtagtcggatatgcgttcagcagcatattcctcctgaacgtccgtaacccgtcgcgatatatggtcgacatcctcgatgtcctccgttgtgatttggatttctgttcctgaagccctaagcaccaagttaaccaggtcgcgcatcgcagttgtctgcgcctcctggtattgtgtgagccattccgcagcgacagtttctgggttacgccccttgccaaagacctccgctatcgaatgcaactgttagccagaggacagacagataaatacatgacgggaaaagcgcgaactataccataaagaccagtctcgcctgcagccagactgggccgcacctgcattttcttcggccgggcggccagcattttcccgttcgcagctggtcgcaaaggcagctgatttccaattccgttttcagtgactttcggctttttcgcgctccgagacccttgagtcttgggcttgcttttcgtcccagaagaggacttcttagcggatgcttgcgagccgcgcgtctcttctcgcgcaattcctcctcatcag

SEQ ID NO: 4658 - DNA, 2893 bp, Emericella nidulans
tgattgaagtgcttcctggcaagtcgagcccggacagcccagtggtcgactatttcaccgttctatctcgcaacgtggaaaccggtgagatctcttcgaggagtgcccgcaaggtcgtgcttgccctcggtggaactgcgaagcttccagctgagctgccccaagaccccagaatcatgcactcctccaagtactgcactgccctgccaaatttgctaaaggacaacaacgagccctacaacatcgcggttctgggaagcggccagagtgctgctgagatcttccatgaccttcagaagcggtaccctaactccaggacgtcgctcattatgcgagataccgcgatgagacctagcgatgactcaccattgtaagtcatttttacctggtgcatgactgtgagctaacccagccaccagtgtgaacgaagtcttcaacccggagcgaacggacaagttctacaacctctcggccgctgagcgcgagcgttcgctcaaggcggataaggctaccaactacagtgtcgtccgactcgaactgatcgaggaaatctatcacgacatgtatctgcagagagtgaaaaaccccgacgagactcaatggcaacatcgcatcctccccagccgcaagattacacgtgtagagcactacggaccgaataagcgcatgcgggtgcatgtcagggccgtcaaggacggcaaggacagcctcattggcgacggcaaggaggtcttggaggttgacgcgctcatggtcgctacgggttacaaccgcaacgcgcatgaacagctcctcagcaaagtacagtacctgcggccggcgacgcaggatcgctggacccctagccgggattaccgcgtcgacctggaccggagcaaagtcagcgccggcgctggaatctggctgcagggcagcaacgagcaaacgcacgggctaagtgacagcctcctgtcggtcctggctacacgaggtggcgagatggtggagtcgatcttcggagagcagctcgagagcgcggcggtgccggacaccaggttccgcgctatgctgtaaaaaatttccggctcaagggcaggaacgaagagctggtgggacccgcttggctgatgtatttagtacatgaaggtgggagcagaaaagcggattcgacttggcatttattgtgtaatctggttggctatatagacctgtgaacatattatgagcggtatatttggttttttttactatgcttggagtttgtactacgtatgatgcagtagactcaccgctggttcctcagcgaaattgagagacaagtttgtttctttttgcgcccgagcattcgctttcttacttgctttgttcagagtcaagcttgcttcaagccactacagcccactgcctcttgatcacgagcaggtacgtgcttcgtacagcaatgacccacactaagccagaccaatttcacctcggtcgcgacctatacaagaaccgcacacttcggtgcattcaagtcgaaagttaagaagaatcaggagaatctacaatgtgtacgtattcccaagtcgcaactgcggacccgacctaaaacaaaaatacaattttttaagcgagccaataaaagaatccccacaagccgcagcggttgtactgtggtactgataatctgattagataaatttttttgcatttgtggcgctaaggggcgattgggccagggcctagctgttttgagcgttatcagatggcgccatgttgaagcccgactcctgccaggtgagtttccaaatctcccgctaattctgtgggcatatgagaggatactgatctctgttgttttcctcgccagattgcaaactactcgcatattatgtctgcaggtatccagcactgatggaaaagctttcaatggactcgatacagaaactcgtatttgctgggatctcacaaagtcaaattggttgataattttatcaatcatatcagattgaactcgatcagttccggccccagctcctacgtaagaagttcccgacgcccacgctctgtacccaccatcaagaaaattgcctgcggattacgactccaactagagatcaagcccgagtccgtgcctaagaccgcgcgcccagccctgctaaaccgctgaagaagcaaatctcaactgccaaaatacactactcagcttcctccagcgactcgtccagtcacaggtcttggacatttttcgacagtctgagtattatttccattgtttctccatttttcgtcggtggcttgccgatctttgtgttcataccatacaggatatcctgctccctaacacggaatatgacatcgtctgatcccatcgtgggtggttcctacgagtagttcctacgaactttcagtttaccgagtgcccagggaagcaaacgaccacttcgcggtattccttgtggcatatttctagaggcaaggtctctacggtctgaaccgacatgcatcgataattctctgtaacttcaatgcagataccaggattttgactgcgatttgcatacatacagtccttggactcggtaaagaaatcagacccttaggcccttatactaaggtaggtacgaagtcgtaccagggacctcatttctgctgagagactccgccggagccggatcttgcagattacatgtttgcattcgcagctcgccagcccagagctcttggtcggagcaagtcgggcccgcgtccggcctgctttcacgtgcatcctgcaggctggcggagcagcgaatgacacatacaggtagtccattaagtggactcgagttcgaattatgtatcgatcctttgagagcctgactctgacgggcagttcaaagaccatcgcgaggtcaggtcactgttcgactctgcaaggatggtatgatca

SEQ ID NO: 4659 - DNA, 4908 bp, Emericella nidulans
ttgtagaggacatgcacctttgatcttccatagagagggtgcttttgggctattatattatgttttgctctactgggtctgtgaccatcgagtcgtatctcgataccgctgtctcgtcagccactccgtccgaggagaccgctctgcttcgagatcgcaagcgaagacattctttccatacggcgagaaagttgtcctgcgattatgatgcggacgctatttttctaagggtacgatataagagtccttcggtgcgattttaagtgtgtcctaattgttttttggtcgaacttttccttgcggaattggagagacgccttcactggattgaacaatatcgcaagtcgcacatggtccagatcgacactagcctacgcagggtctatgctacgctggaagctgtgagagattcttgctcacacgcctcgggggagttgatgggcagcggcaagaagagggctaagatcttggtggaaaccctggaaagtcgttacaacgatgcgttggcgacaaaggaaacattggagcaaaaggcccaagccggcgtgcgtttgatggaatcttttttgacggagttggaatctcgccgtgacgccgttcgggatcgcggtgtttacggagctttggacgatggctggaaggcagtcgactcgacgctggttcaagcaagggaggtgatggacgagggtatcgaacgggctcgccaagtcaaggacgccctccgcgagaatatcgaccatgctattatgctcgccaaagagaagcgcttgatcagctactcggatctaccggcaccatggcggataaacccgcatatcctctctggatatcgattccactcgtctaaagtggagtgcctaacttcggttttcaccttctccaatgagcttgtcaacatctggtcgcacctgatcggcctcatcatcgtcctctctatcgccttctacttctatccactgaaccctaattttcacctaagcacgaattccgacacgctcgtcgctgcggttttctttttcgccgcctgcaaatgcctggtctgcagcaccttatggcacacaatgaacagcatcgccgatcaaccactgatggagcgcttcgcttgtgtggattacactggcatctccctccttgtcgccgcgtccattgtaaccaccgagtacacagcgttctactgcgaacccacatcccgctgggtctacattctccttactatgtccttaggaatcggcggcgtcatcctcccctggcacccaaccttcaatcgcgctgattgggcctgggttcgcgtcgccttctacgtcactttggcccttaccggatttgccccccttgcccaactcacctacgcgcgtggcttctcgtggtgtctgtatttctacgctcccgtcatgaagagtattctcgtctacttcgtgggtgcctgcgtctatgcctctcaaatcccggaacgctggaagccaggtctattcgattacatcggcggcagccacaacatctggcaccttgctgttcttggcggcatcctattccactaccttgccatgcaggacctcttcgccaacgctttccagcgcgcaaagggtgaatgccctaacctcacctcttgaactacctagacttgcttctgaatcaaactcatcatattcccgcacaaaacctatgcagcataagcgttacagcttctacttgaagtattgtacgcaacactgacgacgagaacgaagatgcacgacgtatatacgacattcgacttttcgtacaaacaaaagcactatagaggcagttagacatagatgcctttcttccgttggctctcaaatgatatcgcatcggtacacgagtctcacctggacacgttgttcagcgcggttacccaaaaagagctcttgaatgaccggttaaaaaagaacagttttgcatcgccggagtccgtcctattttgagcccctttcttctactctttactttacttctggtacgtatatcttatattgctagaatattcttatctttttctctaaagtacatagtttttgttattctatcaatccattgtttattctcacatattctattctccatatttatccactacgattctattttctagtatacttgggacgaggccatatcatactgatctattaaaagcaaatctatcggcttctgtccggtcaagctaaaaaacatgatggtgtttctgacggatattgtgaatatgaaggcctcggcacgcacgtagcgcattggtcgagaaaaccaggaaacagcaagtgggcgattcgaccacccaacgtaattatgggctctctcattgatgatccatttacccggagcgacgtcatcagaaattccaaatctcaaagttatcagtcgtgtagctgaagaaacaacatgcggcctggtacttagcgaatgcattgaagtagcgactcgcatgtctgtttcagcacccgtgaggccttgaagggttatgctggcgacgtcttttcgcaagcggtaccgaagtcaggtgtagtacgatgcctattatgaacctcaatccatcagaccaacttggcctcaaccgtaccttctagcgttaataaacacggatatacctctgccgtccacttccaagatttctgcatcccgtgaaaggacgatgctgtgcaaatcatccaacgttggccaaagttggctagctttatggtcaatgacactccaaatctctgctgaaagacacttcagtcaagataattggtttacatgcctggccgagcggctaagtctcaagtatttcagttttcacccccagccaatgtgcatggttcgtgggtagagactttgaagtctttagctagtcttatatggaatctacagcaaatggatctgttttctttggtttcgcgacaagctggtcttctggcccaaaagcccgtgcatagcaccaaacctacctggttgacaacaagtcactaccgcttaacggtacaatccaggctttcaccactccgtcaagagtacgtcggctaattccacatcacgcgcgatgctgcagaggcgccggatacggacaaggcgagcacgccaaaaatatgacggagcattgtcaacggacggtgggtataaaaggtacattgcattgcgcgttgtcctctgcaaccgtggaggacgaaatatgtaatatgccatccccctttcgcattcttcctgctgatctgacagtcattgatacactgttatctaggccgatacggagttttacctcaatctctagcataaaatccacgttaaagacggacatcattgtcagcagatcgggggtcaaagtgtcaggtacaaccctgcaccgagatcttgtccgtcaaccttctcgaatgcacggtctcttgcactcatcccgagatcccacatatacgtcctaggcgaaggatgcacaccgattgaggaggaaagtgtcagcggatgagcttgccagattgacctccattgttaacgggcaatagcggacatttgcagctgcttcatcgggacgactattgtcggcggcccaaatgttgaggggcttatccagctcaatgtttgaggctgcgtgtcttcgccgttcgggattgttgccagagccgctgacgagagcggccttggtcatatgagcatttggcgcaataaaaaagaacgaggacaactctcgagcagaaactgtcgtacaggaacgagtaagttgagatatgatgaatccaggaagcggtattcgattgagcgactgaggcgccgaagctgagggtgcctccataaatgaggacctcgatgcactgcgagatggaccttcccaaataggcaattccggctcacgaagcttgactctactccgtagaggccgatcacttggtccagaaactccattctccatcctgatagaggaggcagtaacacgatgctcaagcctatcgctgaagtctgccgttgagcgcaaagtttgcgttgctcaggcgatactacctacaggagaagcaccctgagccaaggcctgagatttcgactcaataaccagccctcccaacaccagttgccgggcgaacaatcggtctatgtaaggcagattacagaactttgaacaattgtctcctttcaatgccgatccacgataatctggagagatgcaaggggctcggctaccggactgcgcgcggagcccgcgcgcagtacaggccaggcctggtctctatagtagcaaagtattacagggccaagccaacctcacgagctgcagtatgccgaaacctcatacagcaagaagcacaaaatctgcacccggatcaaggatggatggatggttctcgagtggtgtggctgggctgatgtcatgttgcccagcgacgagctggagttactgagccgacggggagtctggcgaaggaccagactttggattgacccgtcgacctgggattgttatgatttttgagagctacatcgagtgagttcagggaccagacattggaaatgaaactggagaatccggaatcgaacccgatccatgggacatggatagttaaccgtgaaccgttgaaccaagttctggaaaaggggtcaataatatcgatccggtcgtcaatcaacgattcgaaagtagtagaagatatacggagtaccctatagaaagagcctagagagcggatagtcgctgattccctgcgttctgcagggttccaagactgtcgtcacttgatttgaattgagtcgttccagcctgcgagatccagcggaaattgctgcgccatctcgtgttttcccctcagtgtgctcctaaatcttggcctcgactctatcatcaccaactcctgcacttctctttcactgattactttctgctctctggtgatacttcttgcatcccctacatttcgattcggtgacagtgat

SEQ ID NO: 4660 - DNA, 2402 bp, Emericella nidulans
tgggatggactgtagacgggggacggggggttgtgtgagagaagtcgggcggttaatgtcgagtaaagagcggtgcctagttctaaagcaaggcgacaatgtcagatgaagaaggtccgccggcgcccaaaagaatgatcgcatctaagcgagaaaggagcacgagcgcgcggagtgattggagatcgtcaaggtgagacctgcggagggagttggaggctgtgcggctgctggggctttccgtggtttgtccgtgctctcctgactgaaccacggcccactgacagaaccattcttcgttggtctttctatattatggatcaataaggacttaaaaatacattgtgtaagataatagtgttatttcgatgtatctaataacggggcagccagctgtgcttaacatcgaatgtgattacagattcgtatgcttgtttatgggcatcaagcacctgatccatagcagaggaatacatgactatccagaccgcattggttataaagccggtttgtctgacacccgtggattggtttattagattaacattatgcaattatacaatttatagaaacacagagaagaaagaggtagagtctataagctaaaccggcacccagccaaacaaacaagcgactcaagacgagacaaaagatattggtaagggtatgtgtctatgcaagctatgacagaaaatagagccaactcgcagaagtgcaaggccagtaggtatggtgtattatcatgtataatactgtatgcagatatttcgtcaagcagaaagctgggtgggaggagcgacgtcgccattagtcttcgctgcgggatcatttccggtaaccttctcggaaacctcctgttccttttctgcagcgggctgtagttcttgttctgcttctgactggtttgtcgccgagacgccgtttgtctgcgcaactgtggactcaggcacaggaacagtggttgctctgctcttcccattttccttaccgaggacctcgactttgtcacccttgaagagaactgggcctttgatgaagccaggcttggtttggctcgatctgccggtgtcgtctcgagggcgccgatcagctcgcgagctggctcgtcgagattgggcatgtcaccccattgccaatcgattgttcaccaccgtattgcttgggtatgctagagggctccatgaatgatgtaagagttggaaggacttctgaggcagagaggatgaaaattttggaggtggtgacaggctcgaaccaacgcttgatccagacataaacggctgggacgaaggcgggagcaccgttgatctgatcaagcttgcactttaactgtattatacattgttgacatttggcatggatcattggaacacctacaaatatgcggtctagagtctcgggataatgggcagtagcgaggacactggcatcctgcatgtggcccttgagattccaaaactgcttcaatccaacaccactgacatccacgatattgttcgagctcacgataggagtctcaggatgcggacggggtagttctgagcagagcggcatgacaaagttgaggaggttctcataaagagcgaacagccgcaggagccgctgcgggactgcggaagacttgtgtgtttccgccgtggcctctggatcggccatagtcgcattgtaagcggccatgttcttgctattcaaatgcttgatctcaaacacgtacaccggaataccccggcggtctcgacggccagtccattgcggatactatatccataaagttaaggttagattcgacccggaactaaaaaataataggaaactcaccatcctcctagcagcctcgtaagagtccacatcaatattctcgtataaagcctcgatagcattctctttccgccaatcttccgtatccttgaactggccccaagccccattcacgtcaaatctgcgtgcgcggagaaatcgcctattaagacatgttaaccaccaactttgttaaggcgcgtatatgttagagcaaacatacagcatcgtcgcatcatcatggcttggcttctccccctcacctccaggcttatagtagccctccttctcacaaaaagccttaaactctgttaacttcgcctcctgctcctctgtcagatggttcaaatgccccacgagccaggcatcactcgcagcctgggatgccgacgcaacgggatcgttcttgggatcggcaggggtggtgtcggctttgttctgaacggaggcggaatcgctctccgcttggctgtgatgcgactttgttctccacagcggcatagtttcaatatcgttttcaggtgaacgctaggtgtatctagagcggaatccaaagaggtgaaaagagaacgttgatgcagggagcggcgttggagtgcagtggg

SEQ ID NO: 4661 - DNA, 652 bp, Emericella nidulans
cgggaatggtgacgggagatatgacatgtatttcttatcacaaaatataaatcaaaatcgtaattacgacttatgataaatttcaattctttgtataaccggagatcttatattcctgtgataggagcttcgagagtgccaaatgtgttaagaaaggtagtaagaaatgcaaaaggtttcaacatggcctgggtgcagcaacatttgaattacggtatagctagataaaacttcaatcattcccgcgcaaaatatagtccaaattagagaagcgaaaccattctccaagcccagatattcgtagtacccgccagtcataagtcatcattcattccttcgtccaatgcgacatcgacatacccttccctcgtctgcttgtccatttcacttccagcacataatgcgacgactccaataaccaataatgaacgacgggaatcaaaaggagagtgacatgaccacttatttgtttagacatagacgtattcagagacgcgcagcaaatccagaactctgtaatcggaatgagcaacgtgacagaaatgtaatggaatcagtgaaggcgatcgtggaaactaagtgtaacttcgcatagcatccatgtaacccgagccaccacgcaagtcgtggtcaaaggtttcggcaacctcga

SEQ ID NO: 4662 - DNA, 3788 bp, Emericella nidulans
cattatcttttaggaatgagtctaacaactagcaaaaaggccctagctctgatgtcttacccctccaacattcccctctccctctctgaactccacgccctctcctcagacatactccacctagctggcgactcctcggtcgacgcatcctggtacacgaaacgtctctccgtcagcgctatttacgcatccgcggaagtaataatgacccgggactcgagccccgatctctcggcaacagaggcgttcgttacgcggcgggttgaggatagcaaggccattggggacaaacttagtggtgcgaagcaatgccttggtttcatggggtcaacggctgttgggctgggaaggagttgggggttgaagatctaaaccgagatccgcggcttaaagctggcggaatccatgtatctgtgtatgtaccaccttgagtggactgagcattgaggactgtgcttgtatattatatccattttctgtcttcgcgtttaggcaatggttcgcatttctggctaacactagagctaatgcaatgcctcaattccagcactgattagcttgaacaaaaataaagtagccaaccctaattcatggtttatcgccacgtagagcagtatgatgaagggaaagaagcctctccacgcctctacatccataaacaaatcttcccacttgccgtcccaccggcaacccagttcttgcttctgtggaataccgccaccgcggggacagctgtaataccatcgcctcccagctgcgcaagttgatcgccagagccactgtaaatgtccacgaagcggttcatgttcccgatgcagaatcgctgaatggccgattgcgggttgagttgccattgcgggcggagactggattagatgttagcatgacggtggcacggtctcagtactggtgagtaaatagagagcgtacatagtaacccatcggcccgtctgacaattatgccgtacaatagtatcgggtttcatttccgattcatcaagtatgtgtcccggcttccaggacgagatacccttggagctgaaatcgtacagtttcaacgtatcatcgtaagaagacgttgcgatctgcccgacgcagttgaaggcggcatgtgaaaccgagaggcggctctggtgttcgccgacaggcgtaggatcggtatgggagagatttcggatatcccaaaggcgcatagtgcggtcgagactggccgttgcgacatagtgcgggtgtgtttgatatagggagaaaccaccgatcttcttctctgataattgccaggttgtcgcggagctctgtcgctttgtgcgcatgtcgtaccggccgaatgcgccatccaaggttgtccagtaaatcgtattggggtcaccggcggccatgtcgaggccggagatggggacgtcgtctgacgtggactcaggtgcatacttttcaactgatgatgtcttctcgaggtccagctcgcggatagaactatcatagcttgcagtgtagagatgtgtgggctttgaagggtgaacggtcatcgagctgatggtacgcgtatggggtttgagcgtaacaagtaccggatcagggtcgtcatcgtcttcatcgtcttcatcgtcttcgttcttcacggctgatgttggcttttcttgagatgcgtcgaggatccctagatggcccattttatctccagcaaatattaccggctttgcttctgacgggtgaaatgtcatagagtagattcgctcaggggtgatcttaatgcctgtattcgtccatcttcagcaattgtctaataagctggcaggaagagttcatacggttaggctcccatgcttcccaaagacttagactattcatctcttttctcagcgccttcaagtctttgtcatccgtggatttgatgtcctcctctccaaacgtccgttggtacgggaccgcgactcccttggtgactacatccacgccgattaaagcgtctccggacagtttttggcccgacacaaatatatcattgaaagagaaagagtccgacttccgaaccctcttcgctctctcctcctcttgcctgcgatcatactcctcgtccgccttgcgtttcgcaatctcgctgtccgccgcaatgcctcttaatcgcgacgatgtacgacgaggaagtagcgattcctcctttttcactttcggcgcgggcttcttcttcggcttcgactggttcgcagatgtcgtctcggcatatttgaggtaaagacacctgtcgactgcgcgtcgaggctgagcttcttgagaaacgcatcgcgctcggcgatattggcgagccgctgcttctcgaattcggaaagttcctccttaaccatggtgacagtgtagaagagtcaatcgactgcgaaaggatgtattgagtgggatgccagttgttcagtcatcggagagtcaaaatgcgaaaaacgcgtacaggcaaccacgtggtcacgtgcaaatactgaatctaaattgttcttcaggaaaaagtccatcggggtcccaactattgacaggaccgaagatgaacttacagcatcgcatagctttgacttggctggcccaggctcatgcaattcgcaattctcctgctcccttcctttaccgaacacgtactcttgctcgtccattgcgcctccgacctcagctcggctcgactattcaacctccgataaccccagctctgattctgctgaaccacacacccacgccgaaagtgataaacctccagaatccagtagcaatggcgcagacgaagaagtccggttcaccgctcccgcctctacccctgctccccggagagcttcttacggagaaaagccgaaatcatagccaagcctgctagccaggcaggacgatggagaaagaaagaacggccggataagatgggtcgaaaaccaactttaactacacacgagactcgagcgcttgccggcctcatttcaaagcttgaccctgagaagcgaccgaccccagaacagttggcgcacgaacctggatcgtcggaagagtcagcccaggcaaagccggaggaaaccaacgcggaaatctccgccatattcgccgcagtgttgagggatgtgaggaatctacaaggtccgcccgaacacagagccagtgacaaggccacgggagcggtgagggaggaaacggaaaggcgcaaagaaaggctcggaagtgaagccgaacagagtcttgatacatttgcagcgtcaagggaacaagcccgacttggggagctacctagggatgccgtgcagacccaggagagcgagcgccacttaccggataccaatgatgcgctggcggagctccttcgaacaaacgagttgaccctagccagggccattgaactagtcgctgagcgggagactgcgaagatcgactcgacccttcacgccgcggttgaaaacacgactgactaggccttttgcaaggcatgcctggcaaaagtctccttctatgtacggtaccctaacagcaaccagggcactgtaatttgcttactcaaatgtttaaatatagcaagcttttgtatttaccacatcgattgtactaccatcatacagtctcttcctgtaattgttatacaatcctctttatatattcaccatttgtatttctctattaatcttctttctaccctcattctcaataaacttctttatactatccccaaccctaacactcacttctctatactatccttctctccatcaccatcctttatccataaccttcttctacattatcatatcatatctattaattaacttatcttt

SEQ ID NO: 4663 - DNA, 3909 bp, Emericella nidulans
ccactgcaaatgcttgccctgtcacggtaaccgcccgttcggctggatccaatccatggcggatgcttccccacctgaatcttaggctgcatcttttctcctgcgctttctcgacgtacgactgtgaccaccatccccatctgcattattcgacagtccagcctcagccctgccgctcctcatttgtctacttttggcgtcaactcgtttcgccggcctgcccgtctgactcgagacagaaaaatgtcctactaccctccttattccggcgcgcccggttaccccccgcggcagcaaccgtatcctcctcaaaactaccacagttccccgcccccatatcagtaagcctagccagctcctttcaatcttgcttactctcgtgcccacttgcacatttcttgtcttccagtctctgtttccagtgcgcttttcgtttcagtcgcgtattctagaacgatactgatcgaggatccgtccccgcttcctcagacaaatgcaccaccaccatcaacagccgtcttacggcagcggctatcccgggcaggcctaccgtcagcagcagaacccttacccgcaatacggtcacccttcacctcaaccgtaccctccacagaatggttacagtgtatgttggcagaatgagatgaatccaccgtgctgttcgatgttgactttgtattatagcacccatcatcgggctatccgccttcacccgctcctccaaatggcggccagatgtaccacggacggcgtgcgtgactcttctatcgatagtcgcttgatatccatgctgattcctcccagaaccctcatacccgccaaatcaatacccgcctgcgcatgggggcccgacggctccgccaaccaacccgcaggcctttggccatggcgcacctcaaggatataacttccagtactcccgttgcacagggaaaagaaaggctctcttgattggtatcaactatttcggccaaaagggtcaattgcgtggatgcatcaacgatgtgaagaacatgtcgacataccttaaccagaactttggctacgcccgggaggacatggtgatcttgactgacgaccaacaaaaccccatgagccaaccgacgaaggctaacattctgcgcgccatgcactggctggtgaaagatgcacaacccaatgattctctcttcttccattattccggacatggtggtcaaacccccgatttggacggtgacgaagacgacggatatgacgaagttatctatcctgttgatttccgggtagcgggtcacatagtcgacgatgaaatgcatcggatcatggtgaaacctcttcagcctggtgtgcgactgacggcaatcttcgactcgtgtcattcaggttctgctctggatttgccgtacatctactccacacaaggtattctgaaggaacccaaccttgcaaaggaagctggtcaagggttactgggcgtcatatcatcgtacgcgcgcggcgatatgggaggtatgatgtcaacagccgtcgggttcctgaagaaggctgccaagggcgacgaagcctaccagcgaaccaagcagaccaagaccagcccggcagacgttatcatgtggtcaggaagcaaagatgaccaaaccagccaagatgcccaaatcgccggtcaggccactggtgcgatgtcctgggctttcatcaccgccatgcgcaaaaatccgcagcaaagctatgtgcagctgctgaatagcatccgagatgaattgtcgaccagatatacgcagaaaccgcagctgagctccagccaccccttgggtacgccccttatccctcaatgagatgtttttcgtaaaagggcttttctgacggattttttagatgtgaacctactttatgtaatgtaatggacttgtggaagaataagctcctggcgttttaatacaacaatgtcgttgactcgatctgtctttgccatgaatatcccattttgcatgtctgtctcattgttacggcgcggttaaattattggggtttaccaggggcagcaataagaatatactcagttgccatgcaataagtttgtcatatctttcacgcatgcaaaagcgttcataatatacgttcatacgatagcataacttttcctgcctgaaaaaactaccccctcttaggcgcgttcaccacagttcttgaaaacgaggcgctaaacgtgtctttcgacttgtgtcttgaggcggctataatgcccgttcgatcagtaactggcgtggcattaatgatattatcaaaagcctcgtcgtcacttccgtctgtgccggacaccgcatccgagtcctctagtggtccggtatctggtcgctcaattctttgtggttgcactttatcagggacggatgggttctggaatgattttgaattaagaatcttcgcacgaatggcggccatctggtcctcatcgtcggagtcgtcggatatagcgtagggatccttctcttcttcctcttcctcctcaccttcctcgtccttttctccatccgtctcgtcaccattgtcttcgtcttcgtccgaatctggctgtaatcttcgattcgtgtttccaacagtccacatgtcgtctgcgcctccgcttgccctactctcttcgtattctcgttcgatattcgccagccactcctcctcggtccgcttgacgtcctcttctgtctcgcatgcagcatatcgtttcaaaagttgcgagttgatttcgaggaaggcctcgccgtaccggaaatgcttaaggacctcttgagcccaatcttcgtgtccgcagatgtagaagcaagcggctagggcttcgacgcagtttaatcgccatggctttccgtagttgactgtgtttgctgcgataaggtatggtactagccaagttagcgcatacggttacatgcattcagatagctgtaagggacatacagagccgttcgcatttccctccaatccgcgaccacggaacctccttcaccctcacccaggaacactccaccacggcggcaccatattgttctagcaagtctctatccgcgggggagacgactctcttcgcattaggcctgtgtgttatcctataagttgctgaacgtaattttgttgtatgccaaacgtacgatacaacaaccccttgaaacttctgccctatagccagctctcgcatcaatccgaagtgcatcagcctcttccctgagcaccgtttcggatcgcaatgcccacggtcccagcacgcggctttaaatggtgaacaaaaggagcctgtctctttgccgtcgcggggtactggtcgtgggcgggggttggaaaatttcttgcccccgcgggaaaagttgtctttcttgtgacggaccattgtagtatgagatataacagaaggtataagcaggttgtaggcgagtatgaaagattggaggaagcttgaatgaagttgtgacttcgccaaagaaattgcggcaaacacgtggagttagagctaaaacgccgccaactgctcggccggcgacccatcggtcctcaactccaccacgtccaccacttccctgcccgttggtgtatagtgatacacccatcgcctcagctcctaagaccccgatactcctatttgtacctttgataaccctgcactctggcccccgtcgtcaccctggaggccgcttcagcacggatggcagctagggaccgctttggtggtgcctatgctgacctgggcttcacccctcttcagagagcgattcgtacgttacaatgccatggcaagcatttgtactcttcaactaactcgcttcctcatttgcaggaaatgcctgcgacttatcacactacgaacccaacctggccctaaacctggaagttgcagacctggtcaattccaagaaaggcaatgcgtgagtaccccgactcgag

SEQ ID NO: 4664 - DNA, 6777 bp, Emericella nidulans
gtttgggcaggcccctcaatgcgccgtgggcctgcaccttttgggccgcatggaatgcctattgtggcccgaaataatcatttatcagcttctgggactgagttacagcgctctcgctcctgtcgtcctaatagcgtcccagggacctctccgaacacgccgagacacgccaaatatcttgttggtctcaatacgattgtacctggaggtaagctcgcaccaaccgagctcgacagtataacagagaaacgcctctcccagcttgacgcagataaggatcgacttttcaatcaaattgcagagagccaaaagctgaagcgtgccggcttacgggactgggataagttagatagggaaagttcaatctgcgctttgaaaagcgaattggctgaaggtcatttacaatgtatcactgatgctgaaggtatatttggcagggcattgttttgatagtccgtgctagcctggctcaattgtactgtggccgttcatgagcgtccatctactgctttcatgttcttgacttggcgcagatatcatgttgattgcaagccatagtactcgaaaataacccctatcataccatcctgctacagtcctgcagcttgaagcagataacatgcgcctacgcaagagagcttgagtatagatcttgtgtataggggctatacgatccagtggtattctgtatagacgtctggctaaccaatcgtgagttcacaaatttagtagacaaatacaacttgaacaagtaatattgcatccatctagcagtgcgcttgagacgagcctcaattctgtttgtctggtgtacgtacctactccgtacagttatgtcgtaggtctcagacaagacgcgttacatcaaatgtggggcgcacccgcttgcgccgcgctcgtgtatcttccttcaggcttcgtgtcaacattttttgtaatgtcattacccattattcgctttgcgaccagatgaggacgaacttcttgttcatggaactgaatgattgattaatctcaaaagtacggaaacaagccatttagataccaccattcgactggattctgtcattcaatcgcttatatctactcttgcgcactgtatctgttatcatcaaaagtgaatcttatagcacaatgaatatcttcagactactcggtgagcgtgtgcccctgatagttcattgacaacatggcctaatcatgtaatagccgatttctcccatctcgcctcaatattcgtcctcttacacaagatgaagtcttcaagcgtgcgtccgccggcaatttgctactgatagactaactcaaggttagagctgctctgggctgtctttcaagtcacaggtcttgtatctgatagtttttgtgactcgctatcttggtaggtctcagggcatctcgtccgatgcttctcgatgccattgttactttagttgacgcgagatgacgctagatttgttctgggcgttcacggactcgttatacaatacgacctttaagattttattcatcggctcctctggttatatcatctatcttatgctccacgattatcgacctacacacgacccgaaccttgacacgttcaaagtgcagtacctacttgctgctagcgcaatactcgctcttattttccctcatgattatagcatctcggaggtcagttcatttcgtctagtaatcggccttttcttgacagactacagattctctggactttctcgatttggctcgagtctgtggctatcctacctcagctttttatgctccaacgtaccggtgaagcagataccataaccacccattatctgttcgcgttgggtctctatagggcgctctatatcccaaactggatttatcggtactttgcagaaaaccactttcaagcagttccagtcttggcagggattattcaaactcttctgtattccgatttcttttacatctattacaccaagtaagttgcccatctgtgtgtgctctagatagatcggtaacgtgtcagcagggtaatgaaaggcaagaaattctctctgcccgtctgaaccatatcttgttgccttaactggcccaagctcagccttagttcgccgagaaacattatatccgtatgctgcctagggtttcatattcgcttggcaaccatcgcagggattgaaaaccgcagtatctgcctccgaggaatatacccctggtcagttgagaacttcgctccaagttcctggttacatgtactatatgatgcaactacaatcaatctgaaatttttgactattgtcatctactgttaaactagagccaccggtacattgaagatggcatgtgagtaaatcctgcatagcacaggggacttaggttgctagaatctgaacaatgtggcacctttgctgattagtgtttcttgaagtcttgatgatactgcaaacggctagaacgatagtaggaggaataacaagagcatattatttgagaaatgtaagtcagaatccagtttcgctacgttgtttccgatcccgcaaactcagtatggaatacattccatcattgctctgactccgcgattaccctccctaattttgttgacgataacgcactcattgagacaaagctagcaggagaaatctcgatggttggatggcccatgtgcaccagaatacccgggaccatagttgacatgaagcgagggcactgggatgtcagcgtgaaatgaatccaaggttgtcgaaaccggacccggaagatgactcaaaactccgctgttgactgatcgtacatttccgatacccaagctcgtgtgtctttgcagtttgcgtgctgaatctacccaattgttctgctgctgaaagtactctagttggggcctgtctaagcaagtcgatcctgcaatagctgctgattggcgcctggatatgggtggagatggaagctttggagatcgggaagatagttcgaggggcggcgagcctcttctcgagttaggaggtgttaagcgagtgccgccccggcggacttgacaggtcgggcatatcttcacgaaacgtgatataagctctttgggaacccttccgagaatcagtcaagcactcacgcagttatgggagtttgtatcagccacgtaccatgagtatatctgtcgtacctgagcagatgttttatctcgaccaccgtgttggcactgctgatgcgccttcgtgaggattttgaaaagtttttccctgatagcgactggctttccttcatgacagatcattcgcctgcactgatgagtgacaccttcctattagctgtggtcttttgactgcagacaggtgtggcttacggacatctgaggtattccccccaactgtttgaagcttgaacatttttttgacccaaaacctaaactgccctttagcttctcatatggtccatgccaatgacagatgaaatatctcggtttagaatggggtacttcataccgaaactgggccgattcaatggctgtgtccttagggtctatcaagactgttcttatgtttcgcgctctcttggcgtggattaatgccttatcttgttttttcacagataaatcgtcaacgtaactatgaaaaactcagtgtgagctcaaaacctgctatggagaggataggggtagggcagagaagggagaatttatacctcttgaccaacctatcgaactctttgacatccggaaagccttctagcggaggaattatcggctctgaaagcatggtatcttcgttcctagagtcctggctctcaagctcggtctctgtcaatgcttcatgaagaggaaggtaggctggcccctggagataacggtgctgcggcatgcattgtgcaggcgggagatgcagggttgtgtggtcaggaaccggcgccatcgatgcgccatgagaatgatggggcgacatgtttgaatggttatagggcaagctgaaatgctgcgcatatgaagtgaaatgatgttgggggaaatggtaggagcctgcttcgaaatcatgaccctcgccatgaccacctgggataggcagggataagtgcgggttgatgaagtagccttcctgtccgtcattgctgcgcctatgaaaactgctcatggtcgtgttctttgaagttgttttgatatatccggaagtcttctgatacggttggtttgacgttgacagagtggtatagtgagccttttcagaacggcagcgatctccaggcttgtttggcccctccccccagtacagttataggctgggggataatgacggcgactggctggttaatttgaagagatgtgcggtacgcgaacgtctctggtgattgtgacttggcgctggtgtggtgtgagagtttggggttataaggactattaacccaaccctggcggcagctagagacgacttggtatgaagaaaacaaaatccaagaacagatgggaacttttctgtccttcaatgcagagcccgagctacaaaggagcggatatagagttgaatttaaacggggtatatgccccatgtcacagtctacaagttcctttgccttcatgttctcttccccgtccacctttcttttccattttttttttttagaaaaactatgcatattcagtaggcacggagtgccccgagtagtgatgcgaggtaacaatcaatcaagtatcaggtaacagtgagagtgcagaggcaaaaggaattcctgggttaggggcgggctagtactcacttgctgctgctggcaaatgggacaaataattggggaacagggaggaggggcctgcgaatgactggcaggaaaataatgagaagggtattgaatagactactagcaaacaggattcttgataggaggcaacagaaacgacgccgtagtctgtgtgtagcgcactctgcaaatagagaaaatacagcagctaaagcaagctgcattgaaggcgcaactcaaggcagaaggagccaaggatgagaaaaatgaccaggatcaagcatcccgggcaacaatgttggtcgaggagggcggaaaacaagacaggctcatcaaagagcaagtaatgattgatatagttcataccttgcgcagtgaagatagccctaaacgacggacaggctagctccgagtcggtctccactgaggttcagcctattcggattctggctcgttctcaatacctagtcactaagatggcataaacggcttactagaccctatggaacatagaagcacctccccatgaatatcgtggagactaactccaaggcgttcagtgctaatcaacccgggaagatcctggtagcagtacatgaatcttagaccagggttccctaccccaacccgatgcagcaaatcaccctattagctattccaattccccttgggacctagcgcaatagttctcaatcattgatgcgcctggcttcgttgcttcttctcgtgccacactagcttacctgaccttcattctgctgctagcgatattgactgaaacgcacgcttccgaagcgggggctacttattcggttccggccccaaaaccaataatgactgggagagagctcgaattgggaccccatcccaagtcatgttgcctatcacccattctaggattgatggtgctgcacagttttgtctcatttagccacctgcgacggatcctcaatattatcggatcgtggtggtcatgttgatggccgaagttctgggttaagagaactttcccagcgtcatcataggttcttgaaccatgggtgtgctggcaaccagtgcattagacatgatgattggttcaacgtggtgtgacttgcatacctacaggtaatgtcagcagctttgacctagcaggttcatattttgagaatgtactaacgaatgggacaattttcaagcccattttgctgcgtactacgctcagacactgacagcctgttacagctaggatgccctcctactactcgtcccaggtaactcggaatacccggccgtggcaaggacgaagcaaggacactgctgatggaccgggataataagttgtgcataacgctgtacgtgactagtcaagcacccggaccgccaaaaaagaacggcctaccagtaggatagcgctttaatggatatcgaggagctaccaaaactccagaagttgtgacatcaaaccttagcagacgcaggccttcaacgacatgctgctggattaaggcctctcacactacccagggtcaaggaacgtagacaggcagaaacaggcaaattgaagggtactcgcatcatctttagcgaggggtaatgacctctcgtccagccgccataagactagattctgaggagtttgtcttctgaattaatgaatcattttactgtactctttagactctgattgcgtatagacattgtaccctacctcactctcactgctcgcatcttcgcagaaggatgaggtccgcatccttgcgcttggttttacgcgcctgaagagtcataaaaccatggtgttgtggcaggatggtaccctaaggccagcgctagaattggcttcgaaatataaagccatagtaccccggggaggagtaactggatcacgactgattgagcttcataataatctctatttccatcagctcaagtaaaaaatgtatccactaaaactaggtaatataggcataaagcgacgatagttgttttggcgggcagtgcaaacgcaatagtcaaactcctcgccacgcactattagagtccggtaatattgatgtataggagaagctcaggaaagtcgtgggtatcatcattatt

SEQ ID NO: 4665 - DNA, 3687 bp, Emericella nidulans
  unsure (1)..(3687): unsure at all n locations
gatatatcctttgctgcaaaacccagcccccagcgagcggctggtcttggttcccgttcgcagcttgctttcagcagttgaatggttagcatgatgttatttgcttctatccgtcggagtgcgtgaaggccttcacgcaacaaaacatctcgagcgctagggttaggtggcgccttccatatgtgggacatcccgcatcaaaccttgggtgcccgccaattacctccattggcataggttagcgctggaaatcaagcatcgcgaagtcctactgctagacaggtcagcgctgcgaggacgcaggtctgctcaggacgtacagctgtataattcggcgcagcgcaatgagcaatctatgcgctagactcatgccaacgactcgacggcaaggcgctttacaaagtgtccattaccagtttacctactatatctatatgatacccactgtatttaatggttgcatcgccctacaaaggaggaggctcagaaggttttaccggctttcctgtatataagcacatacagtcaaacatattcgatcctaagcttgctcacatctggactttactgtgcttctatttctatcctctcatatgacctggaccaactcttactgggcgatcaacctcaagtcgagactcggctccgactctcgtcctgctgtaatgtaagagagctatacctaacacatctataacacctcactcaggaagaccgtccgttacttagcaaagtaagccaatcaagccttaaaaacgccgttgcgtggactgttacatgatacgttggaatcagaagcgctgcaagatcaccggatatcagactgcatgactgactttctctttcctacaaatccctcgtcatggcatgcgcgtatggtctccgttggtaccgatacagcctcaatttgtcccaattaggaagcaacgaccctgttcccgccctcccctctcagatatgtcgcccttccggcaatccgagattggtaagcagcgatatagcgagggccgaaggccgaaggctctttcctatataaacttccttttcactctctcgtcttcgttcttctttccttctccatccaacttcctggtcctctcctggtgcccgtatagccccctgttcgttcctgatttctgcgccttgatatcatactgtggtcactgattttcgtccagaggttgtgtgtcgatatattagatgtctgtgttctgtctggcttgcccccatctcctgcctatgcgccctgtttgtaccccaatttctgcttgtgaccatactgtcttaactgtggcatttaaacaaactggaacagaaaagaagaaaagaaggtataggaaggaaagaagggggaagaaatggaaagagaaagaaaagaaagaaggaaggaaggaaggaaggaagagtgaaagaaaaagaaatacaaagcatttaacttgccagactgtcccttgatatcgtcttgtttagccttcttgttcgtctcctcttgtccctttagcctgctacgctgtttttcttgtcacggactactccatgagaccaaactgaagttacgtatgcaccactttgtttgttgggctatgttgtccatatttcatcttgtcctgttgtaccttaaacagcaccttgccagaaagcataaccctngggctgtggaccattgagtgaagactattgagtctgtgagttccccatctcatcccactctatttccatagatctgcaattgtactgactatcctcccaggctggcctcacacgcctctgtgtgtaggggacgtgggcaatccgactcatcagcgacttgtacattcacctttgaggagcctgtatattctacaaccacgttttcggggaggttatatatggaggaagagactgtccgctcccctgtctgcgctgtatcttagcaaggtttcctcttggagtacccctggctattttccaaatgtggagattgattgtgttattagtttgtctctgttagttgggtgtacctgtgacggggaggatgcattgtattagggcttgttcaccatatactcccttgtatctcggtcaaggctttttgccctcgtggctttcttgcgggattgcttgtgttttagtgtagtctggaggtatctatggatgagaagcttggtgaaagatagggtcgctgagggatacttccctgtatcgtaggaattgtcggttgtttctttttacttctttgtatccggtcgagattgagcctttatggcggggaggtctggctgtggtcgaacatagttctgagtcgtcactttatctggagcggcaggggttgcggggtattcagaaactaggcgcggctttcgcttctggatttcgatctcgctgggagttagatgcgagttgttcctgtacttcttgatctcctgcacctaaaacgacctcctgtatggactggttcagaactgttgcatacatccaatttgcgcaactgtgttattatgacgataggaaaaggactagttcataaataatagctaaaatgtcagttggttatcacggaccgttgctgactcttatgtattccatagataaggtcaggataaacttcggggcgccaatggtttgagtcgatgactccgcgacacgtacgttctccaccgggatcaactagccctaacttattctatactcctataaaaaaaaagggggtccatcacttctgtatctatttcttggcttctgtgtctatttctcctctaaaaaatcacgccaaagaattgatcgacggacaagaaacagtcgcaagtgtatttgaaactatagagcagaagatcccaaacgccgatcatattgagtcgaattgaccaagcaaataatatcacctgtcaccggtacaccatttcaacgccaagagaatgctaactacagatccgttcaacaacagaacaaaacagaacaaatcacacagaacgaggttggattcggtgagcagcaagcgagatgcggaattgtctatgcgcggtcggaaaaacgttttatgagaatcgaatgcaaggggtgtggagaagaaagaaagccaaagttaaatgaggtcaaaatgaagggaaatcgatacatccggagatggacatgcttgctgatgctgacacaagttggtaaagaagtggcacactggcaaacgaataaaaaaagatggtaaacgaatcaagacgaggatattttattcggaaacatcctcatctttgcccgggtacatgatgtcctgacggataacagctcgaacatggctgaccaagacgaagaggaacatgcagatgataccgattgacattgcggtcgcgacgcccttgatgcctgtactgtcgagccagttgcccagcgtgattgtggcaagtgtgaacccggtgttaggaaagaccatggcccaccagcttaggtggaaggcagtcgggcgctcacgaatgacagcgataacggcaatgcaaaagaaccagagactcaacgcccagaggaagacggcggcggagacggcaatcaaggtcatgatgcgggcgtcttggatggaggattagtcgtgcaggatttcgaactgttccgggagacctgcggtcataccgacgagagctagaaaagtgaaagcgggtgggccaacgcagataaacatgcccggtctgtgttcgcggtgcggaaggccgaacatgcatgaga

SEQ ID NO: 4666 - DNA, 2461 bp, Emericella nidulans
gacatcttctactaattgtcagtgccctcatccagctgctctaaggctatggaaaacgcttctttatgtccgttttcatttgtggcaagtctaagttggcaatgaatcatgcgtatatccagagatactcgagccataggtgaataactcccgccagatacctgacgatgacaagtcccagagactggatttgattttcttcagatacactagctagtaacttgaattcaggcctgggcacggtcaagggtagtaggcagacattgttgcgccaaattgtcgccaagtcacgggatcgattgccggcacttcactctttttggaactaccaaagccaaagctttaactgtcaacgcatacgctacaacaatgtggaaaccttcgaagcctctctcgttattactggagccttcgctcctgcagagtagtctctgcctcaaatgtcagctgcgcggtacctctgcggtccgacctagagcttctctgcgttcctatacaacgccaaacagcaacggagagaagccgtcggcctcaactaaagcaacgacaagcagaagagttcaattccagcagaatgccactcctcaatcagctcctcccaaggcgcatgaacccagagaacaagagccaataccacttttagaccgcccaattggttcggcgattcccccgcaggagggtcaaaacactgggattgacaagcggacattgggacaacgacgggacgattttgtgaactatgaaaaacatatcaagaggcgtgaagagctgtatgtcatcggcctccatatgctctattacagttgcttactatattcctcaattattaggacacgacaagccgcaaagccatacttccgagaatggtcaaacatgcgatacaacgagggtaagacctttgtgtcgaacccgcgcttattcaagcgtgacaaagcgctctacttccctaacctttacggaactacactcgcctcgccgcaagaaccgcagaataccacatccatactccgcggtaaagtgtctgtcgtgaacctcttttccagcgtttgggcagaaagtcaggtcgccacgtttactgggccccagttcaaccccggtctatatgaggcatttaaggaaggtagtcaccttgtgcagaaggtcgatattaacgtggaggacaacattctcaaggcgtggctggttcggatgttcatgtggcggatgagggggaagctgcccaaggaacaacatccaagatactttctggtgcgcaagggtcttgacgatggcctcaaggaagctattgccatgatgaacagtagagttggatacgtgtatcttttggacgagaactgccgtatccgatgggcaggcagtggacctgctgagcccgccgaattggagagcttgaacaatggcgtccgcaagcttatcaatgaacggaaaattagtctagggtccgagttgcacgtgcagcattcgcaagtatcaggaaaggagacaaagaaggccagggtgattgagcatagccgttaatcattgcatgtacatattagtgtgagcatgtaaactgtataagtagcccaaatccataaactccgacccaatattaactttccgcaggaaacagctaggtgcaggagagcatacaattaccaacccatgctactagctgcaggcgaagtcgaatggacgctctaatcatcgaaagaaaagcagcatcagaaagcaagccccaataaaagctcctagtataagcgcatctctcctccttttattccctatctttccgatcaacgcattcacccccgggatttggctggcagcgcccacaatccgccggttaatgctcgaaagtgtctcgcgctgcattccaaagttctcattgattgcgtacgcctggctcagcacgccatctattactccatggctctcatcgatacgacgccgctcctcgagcatgtactctgattccgcggcggcagggttcgaggagcggtaagcgttaatgtcggagcgcacgttggagaggaggtttgcgcggtcccgcaactcagctatcgcagccgtgaggcgggatagttcacgtttgtgttctgcgaggacttcacggtggcgggctaggttgttctgtttgagagctgaggatgtgagtgttgcctcggaatcgaggaggcgggcgagttgggccagtagggattcgcgctggttgagcaggttaattccaagttctttggcttatataaagggagtaccttttccaagaggtctcggatctggtgctcattgcggatctcctcttctgcgggctgcggaggcagcttggtcatggaagcatattgggagtaggtgtgaaagaggctctcggtctatcagacagagccagggtcagtgtctccaatttatccatggaagatgaaagctatgcatgtgcttgccggaccttatattcgagagatctggcctgatcgcgcagttg

SEQ ID NO: 4667 - DNA, 2537 bp, Emericella nidulans
taacgggggcaggttaacgggtatgacatgcgcccactgttgcaagcttgaataatactgacaacatgcgctgtagtggatcgaagttctcgagcatggccctccgctctgctatctccctcggtatcaatcttcgcttccaagatgagaagacccctgcagcgtcgaaagaagctcgaacccgcctgtggtggtccatttttcagatcgaacatatcgtaacctctataaccggccgcatctctggctgcagcgaagggcttagtgcagccctcctcccagtcccattcaatgaagagagcgcagaccgtaactcaggtcttagcgaaatcttccgcgaccgcgacctccgatgcagccggctgcagctcacactttttcagaaccaggaacaagctgtatctgctgcagcgtggttacgcaattgcgagccctccccggcactcttatttcatattattgttgatcttaacatcatcgcgcaagccgtcatcaacagcatctacagcatccagggacttcgccagtccgcggttcaactcgaacagcgcctccacaggcactccgaaagcatggataattggttacgcaaaatccctcattactatcgcttctttatctccccagaagacgatgcctttcatcttccccccggagcgaacaaggcagaatcaaactacacccgcgaacgcatcaccttagccgtctactactacagcgcccgcatcaccctctgccgtccctgcctctcgcacagccacaacacaaacacctcccagaaatcgagcgactcgagttcccgcgctagcttccgcgccatcatgacacacacatgccttcgctcctcgatatcgctgctatccatgctccccgaaactccggacaccgcctggctgatctccgtcacaccgtggtggtcaatcctccactccctcatgcaagccattaccgccctcctcgtcttcctcgcaaccgaatccgttgagaattcatcgaaaatatcccacagtctgataaaagcacaccggttactaagaatacagtgatatcacaaacaagtaaggctctgcgttggctgcaccaccttggcttcagtagccttgccgctgctcgcgcgtttaagttgtgtgagagcttcgtgcggcgaatggatccgagcttaggttttgacttgggcgatttagcctctagtaaggactttcctagtcagggcggagatgttgatatgtttggggctggggatttagaaagcgagggtgtgctggatggcttggcgatggttgatgatggttagtttcatatttgcactgctaccttatgaactatcttagtttatttccctggttaaaaggatctaggagagagcatgtgaaagggtgtagtgttgcgtggtgcttctatatctatatccctgccattaagctggcatgtcttttcggctcatatatagaaacggactcagatatatctatttgacagcttttttaagttcaaagatgtattggattaagacttccatactgcccaagtgagacacccaacaacctgcatcaaggcctggtgtaggcgcctcttcttgtggaaatctggtaacagtacaccaaatacgaagaaaaatatgtttgtactagtgggccgaccacaattgtatatcactggtgtctttgatgggtcgatgcactgttgctattaaggcaaagaaagacagccatgtatgtagagctagagttagggataagcgttgttcgcaaagcatgcctcacccttccacttgttggaacagcaaatagccgtgaccggtatacgtagggcacggaatcacataataccggagagtcatggcattagtagagagcaactgcgtacaactgagcatctaggatgcttccagtgccgtagacatagtgtggcattgtaccattgagcaccaaacctctgtgaggatgcgcggtgatctcattcactgtgcatcatcgtttcaacgcattctgggtgctctagattttcagatatgcttcctgctacagagaataaggcaacaagattccaatacatatggatcaaaaactgcggggtgtggggtggagggtagatataaacttattgacgtcgcatgtcgactaaatggtatggttgctctcaactttaacgtaatcagcccagccctacttcaccaaaccatgttgaaagagactccacgggctacttggaatgacgagttagtcgacttgcgtacaaatggtgcgcttaaattcggctcgtcgtccgcaggcaaacctgtttctgcatgactgtctccgaccatcgactagggtagcatgaaccctattggcgacatctatgtagaggtctaatattgcaggggaagggatatctatcaggctagaaatactctgatcacgacctgcatattatgcggggaggcattgcgtgccccattatgtaatacaaggagccgtttgcttttgctcatctttagactaatcacagtgtttggaatccctggagaaaccaaagctaagtttttttttgctaaa

SEQ ID NO: 4668 - DNA, 1603 bp, Emericella nidulans
ggtcccttatacttctatctgaagctaaaatcacttctttaataaccgcgccagcaccaaaagactcctttcctcacgcataccgtgtcccgaaacactgccgcttgccatttccgaagccttttttcacgcctgacggaagagcatcgtatttctcaccgaccatgcgctcgggtttgaaggattcggggtcttcgaagacctccgggtcccggttgacggcggtcagcagcgcgatgagaggttgcgtacgcgggacttggtattcgccgccggcgagaaggacgggctcattgcccggcgacgggatcggctcgatgttgaagcctggtgctgtggcgctgagtcgcaatgattcgcgaaggatgccctcggtgtaggggatttgagacaggtgggcgtgctcgaaggggccggaaccaacaacggcgtcgagttcctcgcgagcttttgtgacgacgtctgggttggtggcgagataatatagcccaaaggagaggaggttggcgcgcgttgcgctgccgatgaagatgttaatgatctcgtcgaggacttggctctcggacagctttttgcccgtttcactgtcgacgccgtggaggagggcatgcagcatgtccttgggtccgccgtcggggtatgtcgtcgcggcgttgtcggacgagctctgcgccgtaattgcgcatgatcttgatgtcggaatcgtagcgcgtctggtgacccataagccatgtaaggaatgtcgggcgcgagtgcgttcacagcctccattgtcgcattctggcaggaggcgatcacggctggctcggtgccgttcatgatagacaccttctggtgaaagaaggcaagcatattcgcttcgtgttactccgatccagatcattgcacacattgacgcgctgcttcgatgacgccgtccacttctttatcaaatcatcggtcgtctctctcatctcgttgaagacaccttcacactcctctggcgaaacaagaggcttcataatccggtgcgcgactccccaaatctcactctcagagtggtaagccgtaaacagcgagtcgtggactgcgtcgcggatctggacgatcggccccgtcacgcattttcgaaaacgcgtctcgtcgcagatttcttcgagtaaagctgcggaagtcacgaagacgatatcatggccgagaatgctgattttgaagatcggacggttagagggcgatgcggccgcgagcttgttgaaggaaccccagggatttttagagtcgagagaaaacaggttgcccagcactgggaggcctttcggttgaggaataggggtgggcattatcgcaacaacggtaaacagagaattaattagatattaagcgtatggatgaatagataagtgaaccgtggaaaagtagactccagatctcggtaccatcaacggggaagctcagcagcttttaaccagccagccgtgccacgacgatgaatctgcagagctggaataatcagccattgattcgcccggcctctctcggtggtttacatgcttcaatatgaaactcgatgtcattgggcgactgagggatcgtctcacagatcatgggttcgtccgggacaagc

SEQ ID NO: 4669 - DNA, 2341 bp, Emericella nidulans
ctaggtcgcaattaccatataaattctggtcattgcacccgcgctccaccaacagtggatgagccggtgagggggaggatgataataatgacggagcggccactgagagccttgagcctatagcagcactggtcagccgtacaagcgcactgaatactaggatggtgagcccccaatccagcgctacggagcaggctggattatccgtacatttggttcacgatctggaaatgcccgtatgttcgagcttaccgcgcgacgacctgagatattaccccaacgctggaggggttgctgaccatgtgggcagttcgcttgccccccgcatacagatgacgagaaccacgcttttctagggaatttcgtgtacaaatttacacttgtgaattgcaatccccttgaagcatacggacctgtcagcagttgtcgatttacctgagatctggcgcaggtacttgaggagcaaatgaattcacatccttcaggtccctggcagaagccagcctgaagaaatgtccatccttggtaatcatcaattctccagtgggaccctacgatgctgcacatgttgcgggtgatactactggacgaagcaaggtcaggccggctgaaattagacttaaatgccttttagattgagtgaaatgtacgcaatcgttcaaaatccatacttcttattgaattcgtccaccactttcttcgttgtcttgatgatttcaagacagccaggcgaatcggaatgacaacaaatggcacatcataatctttaatcggcagcggcacgacaactccatcaacgctcgtgacagactgatcctcaagctgttgccggacatgcttctccacatccgcagggtcccatggcttcttcttgcggtcaatgacaagcattccgttagagtcgtacttgacatcaccatagaactcagctcgaaattcaattcccagatcattggcagccttttccatgttggtccctggtaagccgaacacagggatccccttgggaatccccagcatgacggcctttgccacctcataatccctgcacatcataccataaaggacaccatgaggcttaacatggttcaggcgcaccccttcgcgatccaggaagccttggagagctcccacttggtagatagtgatcgcagtgagctcttccggggatagcttcatttcgcgccgtccgaacccttggatgtccggtaagccgggatgggcacccaccaaaatattgtgggctttacagttccgtactgtttccatcatgatcaaaggatcgccagcgtggaaaccacacgcgatgttggctatgtcaattaacgggagaagctctagatccggcccacaagtccagttccgtactattcgattgatcggattagcttctgttcgatggtgatataggagggcctatcatgaaagacagccagaaaaacgaaatgaagacataccgcttctccatgtcgcagttgattagagcttttttcttgattggagccataatgattatggggtttcgccgaccacttcaagcttgctcctcaaatcccgggagcctggctcggtacttatatacgcagtgctcgggctcgtttccgaacgttggacgtgagatatggggaattcttcagtagttggggcagggtgggggcctcggggaggttgtccctatcgttttgtgccgatcctctccgtcaagccgaagctccaaagtcttcggcgtcatcgtgcaatcatagcaacgccgagtccccggaccttttatcagaagccgatttccagtatcatggaattggttcttccccgcaatgcagcgaaggaatggggggttctcgagataagggggcccggggaggatggctacttataaccggcaaatatcagtgattacaggactgcaacctattagtgaaaaaatcatggaggccttaaagacacttctcatcgccaatcggggcgagatcgctgtgcgagtgctgaagactgcaaagtaggaacaagcttggtctcgagaacatatagctgattctttcaaggaagcttaacattcggactattgccgtttataccgagccagatgccgcatcaacccacgttcatctagcagacgaggcaattcttctctctgggccaccgtccaaagcatatattgatgggtcagtggtcttttcttttcctccttgaggagattcctaaccttgggtttagggatcaaattatcgatattgccaagcgaaagggagcagacgctatcatcccaggttatggcttcctctccgagaactcaaatttcgctagagacgtcgccagcgccgggttggccttcgttggtcca

SEQ ID NO: 4670 - DNA, 1995 bp, Emericella nidulans
atggtggggttgcaggacggaaaaagtagggtaggatgttgggggttctgcgtgagagaatggtctgctcttgttcagtgtcatatgcatcatcgtcatcatcgtcgtcatatttatagtccttctgaaataggcccggggttgattgctcgcctacagcaggaaagagagagtaagaaggcgctggggatgctgaagcagcgacatgcagcgtgctagcgggactagacgaaagccatgatgccgaagtcgcttcctgaccgcttcgaggatctgacaggagcccaaggatttcgagttctttactaagttgtatagactgcaatcttggaggacgaattgtggacgccgatgtcgatgctaatgccgaagagccgttatcatcacaaattgttgagcagcgcttcgctctccttcctcgctttgagcggcgtgagaaaagcccgcggatagtgaagctctgaccgtatctgatacgcattgtgaagagtgtgaggattggtatttagggggtactgctattcgcgacactcgttaatcgtgtccagagcaagactcagattcggacttacacatcaaccccagggctaggatttattgccgagcgggtgatggaacgtttgtgcagtagaattcttgttgcgttggccgctttgtagttggtaaagtcgatttggctgtcgaaagccacctgacaagcatcaactttctgagtaacgaagtggtactgcagacgattggtggcagagtggcaactcaaggagctcataaggaggcttctctatgggtagatcaaaagggagtcggcctcaggagcacgacctcgatgtgatataccatccgtcaacctgcctgcagtctcacttggccccagcagaaatttagaaaacaacagccaccaatccaaaattagcacagcaaacccaggtcgatccgtcaatccataccttcggatccttgattccacatgttgacaggtctcacttacaagagacggtctgacagatctctcccaaaccatcagcagatcagggtcaggaaaaccatcccggtgcaacctgaccatccctcgggtgccaaccaattaaacaggccccaacattaaagccgcgattggcgattcggcagcccgtttgacccagtaaagctataggatgctggacggaattgatgtatcagctgtcaaacggcttagtgggcgccactggggggccaggggcggcccgtggccgtagttgggtccgtgatcgctgatccatcgtgcaactcttcaacggatgataagccgtgccgtcgatttgtgatctgaataacgagcatggatacctttgtttcaacgggctgatgatagtcagatctagttcaggggccaagggtcaaatttgtttggtgtggttggactggagcggaccgggaccgggattcggtagttaaaggcgagccctaagtcgctgaattgtttggacttgggaccagcggttggccaatgcaggaagtacttacaactgctgatgtcatactatacttgcgcttcatctcacccgaagttacaaggatacctcctagccttatctgatgtccaaactaggagttcagtgaactcacgttcattgagggtggtaacggctcatcgcattccgagatgaaataaacagactaagctgaggataccaaacgagaaccgagaactcgtgcggcagtcaacgggtgaccacgcggggcgccttcagcctgtttacggtgaaagtcatagtcacgccaccaaatgcagcgttggctgttgtctagaagcctcgttcaactttcaacacatcattctatctgctttggaaaggaattcgtagactccaataacccatagaccgttcggtattcttgcttgacgaattacactggcgggctgctctgatgtttggggcaagctattgagccttgttgaaactggtaagttaccggccctggacaattaaagagctgttagcccaaacactactt

SEQ ID NO: 4671 - DNA, 3420 bp, Emericella nidulans
cgagcaattagggagggaggatgaagaggcgaatgcggccgaggctgcagcttctggcaggggctgattgctcttgtctagacaagccggttttatgatttcttcggatggttatttgagatacccatgcattgcattatacttggagttctgtttttctgcattgtggcgctgtacaacctagaaatacatgtacattattttacagagacgctaacgttttaccgttgagactcttcctcctccaactgctctacatagtccctcgctcggtgaccttcgtggttattagcagcgctgctctttgcaattcctgcgagaataaactccctggtccaagttggcacgatggctttcaccttcacttctccactctttagagtctgaccgtgggatacctcagcatcagcctcccaggaaaccttaaactcctgctcagcactgtactgacttgcctctgcagtaagtgcaatatcagtcatcatctctagccgacatagcgccagtccgatgttcccgataccacctagaaatttgcctgcgctgcgccccttgcgcgcgctgaccttggaaatatttgagccggccggggggagccggatgtctacggtgggatcgtacacggggctatcggaagaagatgagatagcgcccaaaccatcattatacagctggacagggaggatgcgcttccgtacgacaccgcggtgatgtgtccggatggtgagttcctggccaacatagcatcccttccggaagtcaacaccccgcatcatatccatattgcattctaaaggcagcgctgactcggagataatttcggactgcgttcggcgacaccgtgaagcatacgacgaacggtataagtatccaagtcaacttcctctcccgtggccgcaatatgcgtctcgtcctcgccctgaaaatatgtccgtaaatctccatcaccgggaacaacaagacgggaaccgaagccgggtgccctcgtatcgacacatccgacaatcgatgcatgcgcagggaacggtgaagagctagtcgactccagattatatgccgcccagcgcggctcagagtgattcttccagctcgcccagaccgttcgctcgccgtcatctagtgcgcggagcttcaacttcgcgcgcagcttatgctttttcagatgcttcaggagtttggggacctgatctttgtcgacttccacgagccacgctggctcatccgcttgtgttagagggtagataaaggcgtcgtttaggattcggccggtggagttcaggaaggcagcgtaggagcctgtatgtcgaactctgcggtttggatcattgggaataaacatattctgtgtgactaggccctggagaaatgtagtgctgtcgacgcccgtgatggagattaagccccggtttgtgagtcgagcatatccggtttgcggtggatgttgaggtccctgcgactgccgggttgtcgagaacgagcgccctcggaaagagcaactggcgcatattgaacgcggatattttccggtgcgtatcatactgactacgctgtctagattaatgatgcagagaagttacaaatcgactagacatgggtgatgcggtactaaggcggtggggcatggcagtatgctacaatgacataattgctttgaaactataatgaaggcgatctctgttaacgtataatcgtactatgtcagatctagaacacagacatatgcagctcagcaatatcaatcaaacaactcatttgctccctttagcgactccttccaaaaatccaagtaaaaatgctttatttgcaggggacgcaactcggtcactattggagggttcgctgccagccggttgatggtgcggtgtcagtgggctgacaacggaaggggtagccgaatgtttcggcaaagaagtttgcaggttcaactccgcaggcgaatgtttgggagacggtccagatttgccgaagagggagagtagtgcttctctctgcgcaggtgtctggcttggccgtcgataagtatcagcctgcgagttcggaaccgccttggccccagaagcttcagcaagactaattggttgactgctatcttccatctccttcggtcgtattggcagtagcccgtaaatatctaccttatccgatcgacgtagaatctgtggttggaacgttttttgaggcgaaggagactttgccttgttggaccgagagcgggggctcgcagttatttgagctggaggcgtcggagctgaactaggcatttgctcccttttagcactctgcggtctgggtaggatcgtgattggtgaagctaaaggttgcgtttgtctgtctcggcttgtttgacgctttgactcgttcctttttctgatagacggcttcgggatagcctcaaattgcggcgtgttcaaagggccagaaaccgtggcagatgtcaaaggaccttttcctgtctgacgagcctgctggctaggatttgacgcagcattgggacgttgtagaatctgcttcttaccgggcgaggcaggatgagccgacagttccactagttttgaagccggttgcgagcttgttggaccgggggatcctttcagcaagctgagcaattgatcttgatggagggaaggcttgcgctcattgttttgagacacctcagcctgcggcactaggcttgcatgggaagctttaggagtttgcttcttctcatccttgaagacgcttaggagtgccaacgagtgactgttaagctttggtggaggcagtttgctagcaggcggcacagctgctccttgaacttggcgtggctgagtcgattgagagaactgaggatcgcccgttcgttgatagggtgccagtgctggagcctgttccgaataggatccaggcggaaatagccgtgatgtggtgggaagttggtgagatgagttgaacgggcctgtgtagccggccgaaagtccctgactgtgggctgctgggaaactttgcggcatttgaggtgcatgttgattcgctgtagagaatggaaatggagggtagtcaggataaggaggtgctgcccttgttgatttctccacccgctcgaattgctgaggaaagccaggaaagaatccagagaaagggtcggccatatgcggtccatcccttggcagctgggaagcccctggtggaggattcgtggaagcgccgctccttagaagttccaaaagagcgtgagatttagatacatttggatcggcattgaatgaagcttgaacaggttttggtgtaggaaggctgggattgacgttaaggagtcgcttgaggtgtgcagatgcatcgtgagatgctgccacttctggcaagtcgctgggaacggctgcttccatagatacttggctcgacacatgattggcattactggtttgatagttctcgtccatg

SEQ ID NO: 4672 - DNA, 4421 bp, Emericella nidulans
  unsure (1)..(4421): unsure at all n locations
tccagatagccttaagaccgtccccctcagcaacctggatctgttcgctagccttctatcgcactcatccggccagaatattgctgtcgggaagcattatttcaccgccgacggaaccccattctttgatctgcgtggttcagaaatgtacggttcaggctggattgccgctaagaaggaagacgaagaggatgcaccggcaaagccagggtatggaattacgggagatgtggcttggttaaagctaacggcgattgacgggagtctcagtgtgagtgtttctaccttctttttcctttctccgcttttcctgtgctcgggtagctaacagtttctgaaggaggtatacgcattcacacagctggcggatcgggcctgctacctgcgaagatatgcctgaggattttacggtagactacgcggcagagtactggttttatggagacaatgaatgagaacgttctgaaatgggtggcttctctcgcatttttgtcttttgactgnaagtctgggcggctttctggcacatttccagataccttttttgtgatatcggtgttgtcctatgctttataagggaggcaactgaatgacagtcttgtgtagaattaagtttgagggtgacaatatattgaatttatattatatatggggaatggtcgcgaatgtcttgaaccgcgcctcggaaggtgcaaactaaggtaccctcatagcggcagatgtacacgcccttgtgtcatgtacagttaggtgaggtacaatgggacactgctccttttctgtaattgcgggacctgtcctactcagcaatgtaggtatgacggctgctcagtcctccttttttgtcctctttcttttgtcacgagacgcctaggtactccctccgaatcttcgctatccactgttcgtctatcacgtctactttcattctgctttcctgcgccctgatgtagaagaactcgtgccctcgatgacacacactgaacttgaactctccctcacacagcttctgataacaagccccgttgaagttcgtattgacacagtcacgacaccaccacataccctcgtccgtaaccccagatgtgaccgcaatcaccgtcgcagagcaccttcccaccaattctcgctagcatttgcacacagacttccgtattcttgttgtcgccgagcggcacaaacacagacagtagccgttgaaacgcaaatgcatcgttttccgcgtcctcatcgcacaacagatcaagcgcctgctgcactgtctcccgcaccatctgcttggcctggatatggtccccctgaccataccagtaccgagcgaggtatatctgggggcctacgaatgaggccgtttcggagatactgtcggggactagcgaggatattttctgaaggtacagggatggattatctgcgcgctctgccatgtcgacatagattggaccaagtttgctgatcagctgtgggagaagactgtacttattccctcttgggaggtcttgttgaattgcttgctcccactgcttgactcttccgcgcgtcggttgggaaccccatagagcgcttctccgtatgcgcaacggacgtggcacaattggacgtattgttccgtgtatttgagacgagcaatcgaaatctcgtacatagcgtcaagcaggtcgattcgctcagtttcctggatgaccttcaaaaggaaggaatggaagtatgggcgctctgcgaacacctccaccatctcgcctagattgttcacttccgtagagtgatcacgaatgacttccagtaagtccacgatgtccccccaacgaccctgcttggagtacatctgcatgatctcaaagacacgatagtagtcggtgaaatcaaaaatcagtgctcgccgacagacggccaccgtttgattgtatagcttgttcttccagtataacactcccagcgtgtttagcatcttggcgagctccatgcggttgaaagcaccctttgtccattcttggtcatattcaaggttcctcgccgcggattcgagcaagtcgattccctctgccgggccaatgatttcggcgagcagtgtacttgctcggaaatcattcaagtcgagagcaagagcgtggcaagctcaagattcagcttctgctctgtacttgaagtactggaagagaatacctagctgaacgtgccaaagggagcttcgcttcttcacgtcctcacctagtacgctagcacaccagctctcaacttcgttaatctcttctaacgtaggtgtgtatgtcacctctgggacatggccatttcctttgatctaggactgttagttatatcatacggtgccacggaaggcgaacttaccttattcaagaacgccaatataaacaggaacgcatcccgcgtgaagggcctgaaatgtggttgctgcagcagacgatgagccatccactctgctcctggtctcatcagatgattctcatctgatactatctttgctagccactgccgagagccttcatccttgatgtctgcgatgacggcggagtctgcgagccaccttgcaacttgccgtacgctctcgtctttctcgagcaaatcatgccggacacgccaccgtattaaaggactggtgatgaactcgtcgttcttcaggagaacgtccagtgagtctccttttgtgaacagcatcaccagttctgatccaacttttgccaaggcagagtcatctgccaacgccaggtcgactgctgacagatgctgcacgagatatgaataggcgtatggcagcagcaagctgcgttgcggatctatcggaccgtttagcacacgaagacacgccaacgccatgagagtttggccggtgtgttgatcttcgcaacggagggcgcctttgttacgacgctgctgcttttgctctagatatgcgtcaagattcagacgcctgtatacttcaggtgggcacacagtgcgcaagaaatgctgcaccatagcgctctcttcaggagttatcccgtggtcttggaaattgtcatcgtccttctgtaatcaagagctgtggtatcccctcgggatcaactcttcgatatccgtcgacctgaagtcgactcttccgatgcgatcaacttcaaaaatccggtacttgctctttattttgtcctctaaaggcaggagagagggctgacctctccggagatccagagcagcactcaattgcgaaggagtaagacgttcagctccgtacacgatccagcgcacaatttcattgacttctgcgatctcaccttctgtcaactgatcattcaagtgcctgatctcttccaatatctgctccgatctttcacgacctgcagagtctagagccctctcgatgtctgcaacatattcgcattcttggatcgtgtctagcgccgtgtcgatggtaagataatcgcctttggcttgttctgccagtcgctcctggattcgtcttcggagacaggtaatccctttacggcgtgtgccaatcctcaacgctggcatatcgtccattcgacgactgatatactgttgcacgtcgccagcgttccgctgctcgattgtcatccggtcaaatttgatgccttcttgctgcgccagctgatcaaagcagcgaggatctccagtcacaaggacccttgtttctcgaccatgtatgagttttgatgcccgtgccaggaaacgaatcatgccctcgccaacagcgtcgcccagaccatcgatgacgatgtaaaaggtgacgtccatatgcactagatcctcgttccagaaaagtaggtgctttgagatatctcgtgggtcgacctcgcccatccgttcacatattcctgtcacagattttaaataccgtctttctgcctgcgcaaactgccaaacgaggctctttgctacagattccaggtttgtcgcttttttcaactcctcgcgcgagtccccttcgacaaaatagaatgccgttgagatccttttagttcttgcaccggcggctcgctgctgcttcagccatgatataattgtcgaggccagatagctctttccagacccttctttgccttctatcgctaggattggcgcaccctctccagcgaaccaagctctatagagcggttcctcgaacacccactcccccgtccctttaatccgacgtcgcatgtaattcctgtggattgtcgtccagagacgtccggctcctgcgtccgctcgtccatcttcgacgcatcaaacccaagagttcttaacagcaaccgattcatgctagtcgtatccttctctctcgtcaatgtatcaaccagtccctgcgtaacagccaatgccgcctggctcgcctccgccgcctccgcagcaagcgccaacgtttgcgccccaacgagccgattctccttatccactaatcgctgcatctgatccaacagatcagcaac

SEQ ID NO: 4673 - DNA, 4227 bp, Emericella nidulans
cggtgtactcgggtatgccaatagatccactttggcgttggcgggtgcaggcacttcgagagatctacctgtcctgcgtcccaaggtatacaatagacgagcgcatcaggcacagtttcttcatgtacaatttctgatccagacctcgcctctgaagtcttccacttcccggcccaggtctcgatcccgtcgcgactgaggaagagggcattgtccggtacgatctgctggatcagcgagcctgtcggaacactgaagccgaatgagctggagtaagcgaatttgcagtacttggcctgtgaggcttcattggccaggccacgaactggcccgcgttgaggaggaagtggtgcgcgccgtggacgtggtcgcagaggatttgggttggttgcggtatcaacttcaccgagtcatctgagaccgggtaggctgattcaggcgacgtccagaaggagtgaccgtcggccagggccagcggaatcaacgacttaagcgaccagtagacggattggggcgagttgtaatcttcggccatgtacatgttcctgcttggccgtcagcgagctacccagctagacgtaagacgaaagccgtttgacgcacggataaaggtagcctatattcatcgtgccctctggatagaaaatgttgtccgaatgcgctgcccaccatctcagatgtcgtagcagaaaacccttgactgcgcccggagaatccagcggcgccggcatatctggtacttgggcgatagccagggccgcgaaaaagcctgcacacgcaaagcgatatgtgagagacctgccgaacgggatggccgcgcctgtatgcttgtcagtcaggattagccctgcagatctagttagaaaaggctactgaccatccctatcaaaatacctccagaaatcccgcccaaactccctcgcctgctgccggtatccttccgcgcgagccgggtcgatccctgccgcgaacttggcatacagcagctggctgaattgaattgcgaagctgcctgaataatagtccacctggcggcctggtccgattttatcacgccgtcgcgtcctcctgtattcctgctccagttcggtctcctgttcactggtcaaccacggcccgtcgccggaccagccatcgcctaggtagaatgagtcaaggacagcaaagtcgctgtcaatagcgtccttcaattcggcgtacggaactcccctcacaatgatcaaggccaggttcgcgaaaacacgaaaccaccgccagttattgaccggcatctcttttccattgatcccacgcagccaggccatgatattctcacggacacgggcaggctgtgaatggtaaaagtcctctggcgcaaataggaccgctacagcgatgacctctgcttcgaccatccgctggtcgccgtcgccgatctcgccccagtactcggggtgctcgggatctgtcccggtctggataccctgaatccatggccgacatacggtgcggatagcctcagcgtctggatgattgggctcagcacgcactgcatgtagcaaggtagagaccacccataacggccgcgcatagccttctaactgcgctgctctttcgtcgaaatgtgtacctgtcgcgacggggagccggatgaaggcgttcctgggagagaagtgtgtgtgcagaggctggacgagagcgatactgcgcggatgagatcggtgcgggagcgcaatgggttgtctgagaatcctgcgaggggtggcatgtcggtggtccagttcgcagcaccatattggagctgttggagaaacgtggcggcgccttataattagccggctcggggatatcgggaccgtcggctgattgggcttcctcaaatatactgcatatatacctagcttggctgcaccttgctccttttgccccgcatattcccgtggcaagagttgtggtagtcacgcatattctcttcaatctggtccagatcgatatggcaccttgtcgaagggtgggtagggaatgagctataggcctgaatcccagccatgggtattgggtaagtgcagtaaggacccgaccttaagtcttcggcaatggtctataataaagagtttatgaggttttagctcgcttatctataatattattgcaagtgacagtcaatccctctttttgtagcggtcatttgtggcctttttcttcatgtagcttcgatattgacccatgctaatttcaatcttgttatcctaatgcttctataaaatagataccttgccatctctcaacctctctcgccatctctcataccttactgtaatggcttgtccttttgacgcctcgaaagtctgccaggaagtaggatgttatgcgtctgacagagcgcaaagtttgtatcgcggtcgaacactgcttgcttagggttatatccgcacttgtgatctgcttaaagtcggaatgcgaacagaatcatagcagggagaagtgatgttgatgacgaggttctcaacgaaaatttgagaaaaaggcttcgttttcagaaatagcatggcatttttgataattctcatcctaaaatatgcccacagcgataataacccctgcctatacttatgcgagttacgagcctcgcgctcaaatagacagtacgctgataaagttccggtttaggcaaatgaccacggtgaatataaagctgatgcaaggcccggctgacatccctatcacgacacatcaactgctgacggagtctgagccggatcgcgttctgggccagcgtgggggtctctgattctctatattctccatccttattgttgtggcttggctcgtcttttgatatatcgcaggatgctgaatatgtttgccgaggctgacacgtcccagggtttccagattattgtagacacttgcctattctttgagatcactcgaatacacgcttcgaatgtcgatatattcaattcatcatgtgagcgcaactacgttcactcatagccagtcttaaccgttccaatcgtcccccagccctacccactcttgcacaataggtcctttacaaaggttactatgtataagcagggataggagccttgtggatgcttctaactccttgtatcggggtagaactagtagtagggtagaacctgtagtagggcggggaataaccctaacctccaagcagagtcaactataaagctaggcgacgactcctccactgtaccctctataaactttcagagacacaaatattcccctggatcaatccctacttgatttcctcatcctggcaaaatgaagctcggcatcgctgaagtcaccggcaaattcgcccgcggactgctcacccacttgctggactccagcaccagcaatggacaagaatcgctgacagtcaaacgctactgccgcgaccctgccaaactaccttcctctctatcctcgtctcccagactcgaactcttgcaaggcagcggaccacgaggcgctcgcctcgttcgttcaaggctgccacgttgtcgtctgctgctagctcggtgacgataagctcatggtcgaggggcaaaaggcgctcattgacgtctgcgacgcggctaccccgccagtgccccggtacgtctctagcgactgggcactaggctacacgaaactgaagctgcgcgagctgttccccaaggaccccatgatccacgtgaaggaatacctggaaagtaagcggaacgtgaccagcgtgcatatactagtgggtgggttcgtggagccgatcttcagctcctttttcgggatcgtggatgcagacagcgatgtcattcgccattggggcgatggtagcgagattatggaggggacgacgtatgatgatgctgcgcggtttacagcgaggactgtgcttgattgccaggcaagcggtgttttgaggtgtaagttggctctggctcgctcggacaagattatttctctaattgtgtagttgtgggaggccgcgccaccatcaaaagaatcgccaggttctacgaaaaagtctacagagtcccggtgactctggaaagacgcggatctctcgacgatctttacaaacgatgcatgattttcgggggaagaatgcccaggatgtctatagttacatgtcgctgtatgctatatctgcccctgccaaacctcatatccaacggatcccaggccgctaaaattaatacagaacagattctgacagcttcgttacagattcttctacaactactgggtcgc

SEQ ID NO: 4674 - DNA, 1891 bp, Emericella nidulans
  unsure (1)..(1891): unsure at all n locations
gagcaccgacatccagtactggctcaacaattccctcgaagtcggataccagaatcagtccacagcgtggatcctgggcggcgataatgtccgcatcgatgggcatgggattggcacgctcgacggcaacggtgactactggtacgaatggatctcgcagcaggagaacacgtcaaattatccgggaaggccgattgccttgacgctgagcgagttaacgaattctgtggttaaaggggtcaatttccttcggagtcagatgtggtatgtgtgtaagaccccggtcatcgaagctcaggctaatgattgtggcggacaggacgctggcaatcatatactcccaccatgtcgagttcgacagtatccttgtgaacaatacagggaatcgagttgacagctgtaagttggacttcttgtggatagcagagtagaactaaccctctagctaacaccgatggtgcggacacgatccgctcctcgcatatcagcttcaataacctgaccgtttacaatggggacgacagcatctcgtttaaggcgaacagcaccgacatcacattgacgaactcgcacttctacaatggtctcggcgtggcgatcggcagtattggccagctgaaggaccagtttgaaactgttgagagggtcaaggtcgagaatatcgtttacgagaacacacttcatgctgtaggctacctactcaccgctgcatttttctggatctccctgacaaaacacaggtttacttcaaaacttggactgacgaccagaacggatacccgcctaacggcggcggcggcggcctcggctgtaagacttctccctgatgaatatacaccacccctcaatcccgctaaccaacacctcagatgcgtcgaacatgcttttcaaagacctggatacaacctcccttcgcggctctgcagtcgcaatctcgcaatgcacacggttcagcggagcgcccggcgaaggcaactgtacgaactcgcagttccagattcgggacatcacggttgcaaacctgcatgggacaacaaagtccgagcgggtcacgagcttccagtgcagtgccgtggcgccctgtacgaatattggggtgttcggggttgatcttgagtttgcgaatgggacgaaggcagatgagtatctttgtggaaatgtgaagaatccgagagggtttgtgtgtaccggggcggtttgcgaggggggcagtgcgacgggggagtgctagcattacttccttgggacattagagtcaagcacgaaatatctcttgtctggattgtaataggccgggactgtttagccttgggcaacatatacccaaaaggatgtatgtctcccatagcgttctagtgcgttaaccctaactgcctatcaacgttccggtatagagttcacaacttcgccattgcaatcttcgactaatttcttcttcacattctttatgcatatatcgtcatacgctattctgacactcttttttttaccccgcattcctcggcgtccgtggttctcgccgagtagccgactgcagatcttctcgggggaagatcgaccgacctggtcctgcagagctccaaggcttcctctcagaaagccgattagtagaagcggagtcaaagcagggtcaagacggacaattagaagccatgaatggcggatcccagcccatgatcgcatactgtgatccaaaatcgacataactaagtcacttcccttcgcttgtatctgcccagccatccaacaactctagcatgatcagcctgcccttgctagcactggcaaccggngccgttgcctcggcctcatgcttgcgaaacaacttctgcactggcccgtcgaagccctcaatttcaggcccctgggacttcacaaaacttgcgccggt

SEQ ID NO: 4675 - DNA, 861 bp, Emericella nidulans
ctggagggcatgattggggcttttgcctctcagccacgaatatttgttgcggtgaacgattcgatgttggtttatcgtagatagtctctgcaagaggttaaacctgtactccagacagataacggacttgagcatgcgaagtacgcgcccagttgtttgggaaatgttgctgaagaggcattgagataaagtgcgtcacacaatatactccgtaggttttcgccttcttaagccaagtgggacaagcggccggagccgatatggcatgatcttagtttgtcggccttcgatcaactagctcgggtatgagctgcattgctttatacacgtaccgtcgttgagagcattcctgaaaagacagaaatgacggttagcatttagccaaggacgccatcggcgggaaaacggaatgattgaccgtcgcaggagccaagtgttagcctctacatcaactacgtctagtggtcatagtcaaataccctgacgcacttccgcagaaaagctggtctcgatagcaaaaaatgatgatatatgaatggagtcagacttatatctgccctcctgtccctatgatctaaaaataaactgtagtgggagctaccggaaccaggctgcctgcgcgttcacgactgcttgacagtagctgcctgtaatgtcaggccataaagtttctgccttaggcaattttgaggatgttccaatctttaggtcgtttcgtctttttcgaaccaggtcgtctcttcctctccttcttcccgcctctacactcccccacgccacgtcttatccccttcgctctccccctctatctgattattcgaattcttccccacttcgctctgtgtattctcatatctactt

SEQ ID NO: 4676 - DNA, 3854 bp, Emericella nidulans
cggtagatttggacgctaagggcaacttgagtgggtgtcgtgagtactctggcgtggtccgaacttagagacagacgaccctttgtctaacatatcgccattagaagtcatgactggcggacccgagctagtcctcaagggagtagcaaaatgcggcaccataggactgagaattggtcgctctcgcttgtagttaaactgatcatgatgcgactgagaggtcaacgacggcctctgcggacgaggattgagtaatagactcttcagcgcttccgtcttagccttccgctcattctcatcaagggaatgcaagtctggcgacacagagctagctgattgtagagcattcatgcggtctttatatgacggtgcaaaggaagggccaatctgaggctgatttaggtcagaacctcccatctctagagggaatattccagcgttatcgttgttgaacttccggtgttgcattgccttagaatcggtctgtggtgatcgaaagcaaggactctgatcaggactttgctgaggcccagacatcctcgcttcgaccgcagctttgaacaggaaatcgagtggcgtggactctcgttgttcgtgtgagagaagtggacgcgatctaggttttgacggcgtattctcaagatctccatcggcatcgaaactgtcgctgtcctgctcgaacgctggcgcaagatcagactcaggaaaagacttagaaaaaaagctcggaatcggtagagcggacggcgcaggtgatgcgtggaaagttgggccggcataatgtgtttctttcatgtgggaagtggcgatattattgttcgattgcgaagacgtatgacgatggccgggtttattgaccggggacattctagatatatcacgaagcttctttgcagaacgatttcctttcttcttgaatatgatagcgcttgaagaatcagttgttgcttctctaggactcacggccttgggtggtgacgagggcggtgttgcaagtgccgaaacattctgagctgaggctgttatgttccgcttctgattgcggcgattatttcgagagtccttaggcgtcaatggtgttggagattgagtcggcatttcgacgagtcggcttgataaataacagccttattcaagatagatgacgcagagagaaaatccggcacaggagtcaataataagaatagcagtgaggtaagaacaagcagcagtggcagattaaatatatcttccaggcagccggtacctagaaatacttcaatgctgaaatactaccgaaagacgccaacccagccaatggtcgtgatgacggcggctaatcgaaggaaagcggcttaatgaacgatcgagtaatggccgacgaaggtaggtattaaacaggagctcgtagagacagacgtaattacgtaatttgaatgacaaggaggtgaagcagaatgaggagggtgaagcattattgtacgatccgtgtcggcatagtggatggattgtccaagatgaggtcagatagtgaatggaatgaagcgcgatcagttgaggctgggttgggtttcatggattgggcggggatcatgactaagtcagcacccacgccacttcaccacagctcacaggccggagtttgtcacgagagtcattacttgcaaacagggcaaactagtcaggcacgtcttctctgggagctcttattaggcttgacggttcccacaatattaccagatctccatttttgaggtataaatcttgtattccctgttcgataatttacttcgagtgcgaattggtggctcatcctccggtttgagtcccagtttccgttaaaaagctgcgcaccactacgtaatccgcctcaattctgcccctcctcaatttcagccccagggttctcgttatttacaagctcaaaatctgtctacataatggcggatgttgaaatgaaggaggcatcctcctccaagacgaaggctgtatccaaggcagaaggatccggtgatgggaagaagaaattcgaagtcaagaaggtataaccacgctgcatactcctggaatatgttggaaggatgtattgctgatcctacatttcattagtggaatgctgttgctctatgggcgtgggatatcgttgttgataactgtgctatttgccgtaaccacattatggatctctgtatgttgattccatgttgaatcgatgtatgcacttctagctgccgacagagctaatatcttccggacaggcatcgagtgtcaagcaaaccaaggctcatccaccaccgaggagtgcacagttgcttggggaatttgcaacgttggtctaccacgaattactgactatggttgtttactgacaactaacctagcatgcattccatttccactgtatttcccgctggctgaaaacccgtcaagtgtgccctctcgataacaaagactgggagtttcagaagtacggccggtaaacgtgtcttcttatgaatgggaaaggaagcagtctgctgtgcagccagagtttcttgggcggcgtttacggtcatcactattcattctaatcattttttcattacttcctccttattcctttctagtacagttgaattctctacgaactctcaactcaataacatgggacatgtacaatctcaacgaaaagcggtgccgtcccaggtccgaaagacagcctcaaacaacacgactggcgaacgtcatggaaacgttccgcattgcccagcaggcctgcgggaatacaagcctcgatgcgtgggaaaccctccatcggcgcagcgtcaggctggaaaatctgatctgctcttgcgatctctctcttgtacgagacgcgttcaggccgcacgatcatatgctccgagccctcaatgcggcgctggttattttcttctaccgtcgtatacgccgggtacatcctgccatcatggccacccacgtcgacggcgtcatctcctcattgactgactttacagctgccttgccgcctgaacatcgcactggacctggagctacatggccggcgtttattgcaggttgcgaagccctctcatctcagcggcgagaggcgattctggcatggcttgacaatgccatctcaaacagcggccctgccagtttcagcgccgcgagagatatcatggtcgacctgtggcataagcaggacgagcatctagagaggaatcgcggcgagcctatgccaacgtggacgacgtttatacgggagagggaaatatggcctctattttgctgatgcattcctgattcgaacatcgtcatgatgggatgtgtaacgaacagtggttctccttcattatgtattcattttatgtactatctaccatatatcactagaccgtagctacgccagcattctttagcaaccccttcaactcctcctgcaactctggacccagcagcgcaaacggtttgcggagtcccccagtcgcctgccccgtcagctcaacacctgtcttcactgcagcggcatagttatgcgactcgagaaacttgcagatcggccaggccttgctccagagctccttccctttatctagatccttctttatagaaactgcctcgtacaattccaccgccagctccgggatgatattcgcagcaccccacacaccacccggacaaccagcggcgagcccatagaatgtaagcgtatcccagccgttcagcgcagtgatctggtcagagagtccgaagaccagctctgtgaatgctggcgcatcaccagacgtatctttgagccacctgaccccgaccctactcagaccggcaatctcagagggcgacaacttaagccccgatgcggagggaatattatagtacatgataggtagagt

SEQ ID NO: 4677 - DNA, 3488 bp, Emericella nidulans
ctgtgccaaatgcctatcgctgtcacagggacagaaggtcttgcttgttgggctgtcccaactgttgcggctgcttcggcccacttctcttcgatcgcgtatcctgctccttgtcggcaatgatgctctacactttacggaatagtaggtgaaaaatcgctcggtacaagacagccatcaactcattgaatgttgtgcaacgctgattgaatcataagtgtgggattgagctatgcatccaatgtctttcaaatgacaagttcagtgtcgtacaaatctcctggctatgaccgatcatcggccgcgaatttgtcagaccaaaagcccctataatgcttttgatcgccaatccgggagattttgagcacttcttcatgtgttaattggaatttgaaaacatttaggtatgtgcttaggcgagattcctttccactggtagtgatggctacggcgccacggtaaagggaccatctcagaagaatctctccttcgccaacgccatacttgccagccagttccgacagcaacggatccaacggaccccctttggctcgagtaaccggcgtgagtggcccataactggctaccgcgatacccttcctctcgtggtactgggacgagagagccatgctgcgcataaaggagagattcgatctgattgattgctgccagaatcctcgctgaatccaaaatcgtttctaagggctctctagaaagttgacactccaatcgctcgggctttgcctgcttccttcactttctccatagccgcccatgcatcctgaagctcagttggagattcggcgaagaaaggctggtggatcaagtatctggaaacaacgacggttcatggtcaatttatggaacagcgatgagaggagtaacacgtacagatcaacatagcttaactggagcttctctaggctgtcttctagagccttgggaacattcgcaatgttctggttcaccttggttgtcacgaataattgctctcgcgggacaccacactctttaatcgcaacgcccaattcccgctcagtgccgtaaacctcggcactatccaagtgatgatatcctaacctgatggccgttttgatcgattcgaccaagtcacgattgatgctagtatctcctttctttttgaaccaagcagtgccggttccatatccaatctgggttcaagttagtaaaaggggtactagtgaggactgtgtctacttaccacaggaattgaagttccgtctttcaactgggtagtgggaattgacgttgggaccatagtgcttcgaggaaccactcaatgacgactctaagatcctggaagtcctcggctatactgctccgggttgtaccgcagatctgtgaatgatgtggaggcatcccaacctttttatgtctacaatgatgggcttggctccggccggatcacggagtactgtgcgagatgatctcaattgcgagcgagagcggcactgttccgtccaatccccaattaccggacatttcatgttctgaaatcctcagtcctagtcgccatagtactgcaggttggactttagactccgtaaagggtagagttgtggaaatagtacggcagggagtgcggggcacagtattatcgacctgcttatttctacctggggcgtctatcgtaggtttatttggttttccctgaaaattgtgatctgagcgactggtttacaactgtctacgcttagctggtatcttgagagcgcttgtatatcttgcaatgcgaacattagtagaagctaggagttcatactgagcttgatatgatgtcactcttggggttggttatgttattaacccgagcgcggcatctcatctcgactcaaacttattagtaacggagtagaaggcgactgacttacaaccagtaatcaacggcctgcactttgtctagctgggagcgtttgctgtgtctctcacttttctagctacttctaagtattttttggttatatgtcttttcgtgccgcattctcacagtcgcaaatcctccggagccgtctgggtaaaatggcttcccaattctccaaagcagacatgggtgctggtctttcactggcggagctccccaaatcaaatgtgttcacgtccaaacttccccccgatccagcctttgacacgcctgaagcatctcacaaagcgcaaagggagagactctacccgcggacagtgaaaggtgcggctttcaccttcgtccgccctgaaacaaccgaggatcccgagcttttgggagtcagccccagggcgatgaaagatctcggactgaaacctggagaagaaaacacggcgcagttcaaggcagtagttgcgggaaatgagttttactgggacgaagagaatggaggcgtttatccttgggcgcaatgctatggaggtatgctaacccggacaagctaagtgtatctaacagggctagtccactaacttctcttcaggatggcagttgtatgtcttcgttcttgccactcaaagaaagcaatatattgacacaagacagcggtgcatgggctggtcaactcggagacggtgtaggttttagccttcagacacgaaggaacagaagctgaacatcagcagcgcgcgatcagcctctttgagagcaccaacccaagcacgaatgtccgctacgaagtccagctcaagggtgctggaaggacgccgtactcccgtttcgcagacgggaaggctgtgctacggtctagcattcgtgaatacattgtgtcagaaggtatggtacaattacttctagatgtagttgcaataagtaacacgtgcatgtacagctctgaacgcgctcgggatccccaccaccagagctttgtcgctaacgctcttgcccaaggcaagggttctgcgcgaacgcatcgagcctggcgctatagtttgtaggtttgctgaatcttggcttagattcgggacattcgacctaccacactcgcgcggtgaccggaacatggtcaggaagttagcaacgtacgttcgcgaagatgtgtttaatggatgggaatcactaccaggcgcagtatcagtaggtaaggaccagcaggctgactcagtcgaagatcctcccaggggtcttcttggggacaaaattcaggaccaccatggtgtggaagagaaccgatttgctaggctttatcgggagattgcccgtcgcaatgcaaaaaccgtggccgcatggcaggcatatggcttcatgaacggagtccttaacacagacaacacatcagtctatggactttcactcgattacgggccctttgcttttatggataacttcgatccacagtacacccctaatcacgacgaccacatgctgagatactcctacaagaaccagccatcggtcatctggtggaacttagtcaggctgggcgaatgccttggagaacttatcggcgccgggccccaggttgacgacgaaaattttgtaagcaaggagtaacagaagatgctgc

SEQ ID NO: 4678 - DNA, 2679 bp, Emericella nidulans
acggtgaatttcagagactggtattgttagtagggattcacaaagatatctgatagagaaacctaccagagaagtctcgtcgccactttgaatggcaagtggacaaccggtgcagagcaggtcgacctgctgctgctgagccgcctgggcctcaagcggattaagacgggcgacatcgtcgggcatgacaaagccgtctgcgccgatttcggggacgacaagcaaagcgctagcgctggagagcgcaagggcgcttcccaagagaaacgagcgtagggtcatagcgatcagagattagaaacaaacatggaaagaaaagaagagagagagaaagacagaagtgggaggatcgtgttcaagcagatgatccggaggcctcacgtagatcacaaggtgttggtaaggtcgaaggcggcagaagagatagaagaagtggaagaggcggatgggggcaagataatcgttctgtctggggggatggcagcaaggctgacgcaaccgctagtccatatttggtttggcgtgtatataagtggggcgctgacgactacaatatcacaatgtccatgtcagttcgattaaacccaaccgttagcaacacccgcaaggcaggcggcaaatcggcactttgaatgcttagcgtcaagaatgtgtggatatgcaagtatctgcagagtgttcgttgtcaagcgctggatgcggcctgtttatatttatatccgaatcgcgggagattggccgctagccgttttgggacatatggcctcctctcggcatttcgtcacatgattctcatcacatgtgggatgagatggattgttctcaccgcgggtggccggaatggcctgccctctctaaacaactagcttactaaataatgactaattgaggtcaaaccccaggggcaggcggtactgaagggcagtatgctccgacaaacaggtcccgtcacgtgcatgtcaccagcttgtagcggaatgaagttattccgagccattactatttgctggaacgtcataatatctttgaccaccatgggcgaataaaccctcctaactcttcgaatagaccagcacaatcttgtttgaaatgggtagagtgttaggcaacccaggccgaggttgtcaaaaaccttgacaggatctcctcggtgtgagcttcagagttaacgagactgggacatccagcgctcgtaaagccaccaacgcccggaatcgttgagcgcaatttatactgaaatcccgcactggtcgattcattgatatttcttatttgctactgggttcagaatgacaccagggtctgacgggcctctccagatccccgcctcgagaatccatatctgccatcacgccctgtctcccgtcatgaaacagtatgttcaaggtctcaaggtccgaacggcagccggtgatgtcgtcaatgaattgtatgaagcgtgaacttcagtgctggggagtatcgcaacaagttttgcgaatcttgacgactgggccaggacaaaaggggcgtttaattcgaggttagagagtttgacaaccaagcgaaacgcgctcaacgtgacactgatctcggcgactatgtcgttcgtatcgactgccttaaccacgacattttcctgttcgctttgagcgatcaaggccagctcgccagaccctaaacatacaacaagccctgcaagctcggctctctcctgtgaatgtgctccccatattcccaggttgtcatctaacacatcggagaaatcaaaggctcgcccggcgcgctctgtgtgcggcattattcgcaaggaagcagtcacgccgactcatcccaaaaagaaattacgtacgtataaagtaaagttaggacgggctcgtagatgtctcgaccttgattcatagggcataaacatgagggcaagatcagtcacccgggcggcagagggcgatgcagcctgtggagttttctatgcgcttttcgtctgccaaggacgtgcctgaaagccgtactaacagtattttgtttcagtcagttttattaacatactgaagtgcaatgaaatatattcttcttgctagtcttaaccctagtttcgaaccatactatttagtggccgttttgccccttggagtttatcacgacatccacccaggacagggcctgctatctgccgtgatcaattcaacaagcggaccaacgatggcttcatcgtatcctagagccaatagcgacgagataatgcaaagcgggcgtccctttccctcttcgatggcgttccacagctggtccttcatccttacctcggcctgatatcctctgatgagttcttctagagaagcggtatggtcgacgacttcaagctgtggatctggtcccaggctgatggtgattgtagtcggttgaagtgaaacgaaatctgaaaaaaagaccgacagacagggcttattgccatattgggccaatcgaacgtcaatgccgtcattttttaggtccctgccattgcccagcagtctgaagtcctgcggctttaggttcataccaaggaagcggagattaagattgagcttgccggcaggaattcgagcagtcagtttccctgtagcttgtatgaattcgatattccatgtactcgcaagttcggagcaggtgcgactcgttccttaaagaagtcgtcatccaccacgtcctctatcaggc

SEQ ID NO: 4679 - DNA, 3674 bp, Emericella nidulans
caccactgcggtgtcggggccaacaaggcagtaaggcatcagtccagaccaggcgagcctcggcaattcccttttcgggcttaccctcgggccagctgagctcagcttccacactactctttctccggctcttgtctcgcctggaaacccgaccccgtggagtccggggcatccatccacatatttattacctcgcctcggttcaccgaccgatttctttttctttcaagtctcaccttctccatcttcatcctcccaccacaccagaccaccccagaaccagacgaaacaatgccaaatccacctcccgcctgggtgcaggccctcaagcccgcctcaccgcaaggcacagaactgctgactcaggagcgtgcccagtcaaacattgacgtagacacgctcggcgacctcctgcacacgaaagaagcactcaagaagcaagacgagatcttgtcggtgctgaaatccgaaaaggtcttcgacaagtcgcgcaaccatgtccttggacgtactgagaagatccagcttgcgttggcgcggggaaagagactgcagcagttgaagaaagcacacaattggtcagacgaggatgtgcatgttgcgaatgatttggtgtctgaaccaacgccttacggtttgcatgcgtcgatgttcttggtatgttacccttggtaaccgcagttgggcggtgggagaatcccagttggctaatagttggctcgctggttaggtgacacttcgcgaacaaggaacaccggaacaacataagctgttttacgagagggcgagaaactacgagattattggatgctatgcacagacggaactgggacacggatcgaacgtgcgtgggctggagacaacggctacctgggatccttcggatcagacattcatcatccattcgccgaccctgacggcgtccaagtggtggatcgggtcgctgggacggacggcgaaccatgcggtggtgatggcgcagctgtacattgggggcaagaactacgggccacacccgtttgttgttcagatccgggatatggagacgcatcagccgctggagaatgtctatgtcggtgatattgggccaaagtttggttataagtgagtgttctgggttctctggtgggatgttgctgactggtgccagtaccatggacaacgggttccttcttttcaacaagttgaagatcccccatgtcaacatgttagcgcggtttgcgcaggttgacaaagccacgaacaagtacatccgccccgcctcgccatcacttatgtacggaaccatgacctgggtgcgctcgaatattgtcctgcaagctggcggtgtcctcgctcgcggcgtgaccattgctgtccgctactgcgctgttcggagacagttccaagaccgtgacgccaaggccaatgccgaagagaaccaagtcctgaattacaagatggtccagatccgacttcttccgttgctcgccgctatgtatgctctgcacttcactggccgcggcatgatgcgcttgtacgaggagaaccaggaacgaatgacaggtgccgctcaggcagaccaagagaagcggggtgcgggcccagagcagctccgcgcgggctctgatctccttgccgacttgcacgccacatcgtgtggtctcaaggccctggctagtacaaccgccggtgaaggtctcgaagtctgccgtcgtgcctgcggtggccacggctacagcaactacagcggtattggcccgtggtacgcagattacctgccgaccctgacttgggagggcgacaactacatgctcactcagcaggttgcgcgatatgtacgtcccccttccaccaccacttatctcattactaatatttcgtagctcctcaaatccgctcgcgccgtcctcgctggcaaaggcaccgccaacgacacctcgcgcattctgcaagcgtaccttgcccgccgcgacaagggcgcctcgttcgacattcttggcaacgacgccgacattgtcgcggccttcgcttggcggacggcccacctcacattcgagactctcaagtaccgagacgttgagaagcgctcgtggaacagtctgcttatcaacttctggcgtctttccaccgctctatcacagtacctcgtcgtgaagaacttttacgaagccgtcaactcgcccgaaatcagatcctcccttgacaaggacacagcatctaccctccgatctctcttccgcctccacgccctgcacactctcgaccgcgaagcctccgagttcttctcctccgctgccgtgacggtacggcagatcggcctcactcagacaagtgaggttccgaagctccttgatgagattcggccgcatgcggtgagactcgttgattcttggaagattcccgattggcagctcgacagcgcgctcggacgcagcgacggcgacgtctatcccgatctgttcaagagggcgagcatgcagaacccggttaacgatctggtgtttgatccatatccatggaatgagaatgtgctgaagaacgcgggggagattaagagcaagctgtgaggtactatattctttctttttgaactattgcatagagatttttagttagagtactagactgtcctgatacaggtggaatatagaatagaacgatgattactcttctgccaaccttatttgctcaagggccctggttgctcgaatagaagattgacacttgctctaactagctattcccttactaacctccccgagccaaaaacaatgagtaagcatgagaccaagcatccaaaacttggcacggccgagacatggccgagcgagtagcatggctgcgctggtggcgatcgctccggcgccgttgcggcagaggacgatcttattcgctgcctcacagacaaggcgacaagacttcccaaacgagctagacccggagacattcttcggggattgtgccgacagtcagatctttaatccttcaggatcggtgtttgttcctggcttacggcaaatgctagcatgctttgaatagtgcaatatggcgtgaaaaacatcctttccttctcagattcgggatcctgaataactctctctgtcgtcttgacggtgcgtgtacctgaatgttgacaatggcgtacgtatgtggcgatgactaatgtatacaagacaggcgctaaaaaaacatccccaccacgatttcaaagcaagtggacctcaactgtccttccactcgattctgtagaccatatctgctatataaggagcgtactgtccctgccgaagatgtcgtccatcactctctatacccctgcagtcctccacaatggctctccctgacgtcgaaaacacccccggcgccggcatcccctactttacaccagcacagaaccctcctgctggaacagctgccaacccgcaaaccagcggcaatgccgtccccaagctgtacacacctctgacggtgcgtggggtgaccttccacaacagacttggcctcgcgccgctctgccagtactccgcagaagacggccacatgacagactaccacatcgcgcacttgggaggtattgcccagcgcggccccggtctcatgatgatcgaggcaacctccgtctcacctgaaggcagaatcacgccgcaggacgtcggtttaggaaggactcgcagattacgcccatgacgtag

SEQ ID NO: 4680 - DNA, 1371 bp, Emericella nidulans
accataaacagcgtgcaccagcagataacaaagatcgtgttgaccgcgtatcccttgcgccatttaggtgcttctacgacagggaacacggtgatcgggtagaagctgaagaagacccagccaaacgtcatctatcctccatgttagcatgccagaaagagagtaaggtatagggtaggcataccatagccccagacgtaaacgctctggcttcggagtcatcgcgcatgaccatgttcacccacgggaagaggattggcgtgacacacgaggtgaagccgagaaggtagtatgcagtaactagtatcatcaacacgctgcgcccaacaaaggggtatataggaaggaagggatgagctcacatttcagtcccagcggaatatcccagaccaaaaggcagacattcgagaagagcaggacggaggcaacaacgcccatgacagcccagggcggatataccatgaccagagatgtcgccagtacaccggcaaacacagaaacagcctgtacgcccgtcggaatcatattgatctgagacactgtccaggtaccatatcgatctgcctggtcttttaaccagaggatcatctggccggcaacgtaggaggtgcattggaagctggttgaatcgttagtcactgcaacaaacagtttttacctacctgtgcacatgctaggtagggagacggcccactaacaagatgtacgtaaagactgcgatatagaagtgccaatgggtaaacactctcctgagcatgcgtttcccaattttccggctttccctcacaccctcgttccgcatcctctgaacacagaggcctatgatcagcgtccgtcaaccaccacactttctccccgtgcggcagaccaggtaagaagaagaaacttcccagggcaattggcaagctgatgcacccatcgataatgaatagccaccgccacccggccatcccatggacaccgtctagcgtctcgtgcgctgcggcttgtagatacccgcctgcgaaggagccgagattgctcgagacgaaccagacacctgcgcgcttgaagagctcgtcgcccctgtaccaggaggaaaggatatacatggtaccgctggacacgggggtctcaaggacaccaagaagaaaccgaagaccgtagatatcgtggtgattgcggagccgggattgtgcgaatgtgaggacggaccagcacacttccatggtcggcaggaaatagcgcgcaaatttgggccgcgacattatcatcatgctgggaatctcaaagagcatgtagccgatattgtagaaggagccgaagagcgagtactcgtttccatacaaattgaggtcctctttcattcccgaggagtaggcgttattatgt

SEQ ID NO: 4681 - DNA, 1160 bp, Emericella nidulans
tctatccagaatcctcacagtcggatccaaacgatcttggcattctcgatttgttgcaggcgaaatcggaaagtttccttcatacctggcaatcattatctgaggataagtcgcgtcatgtcactccggatattgtgcagattttgacgtccttctgcataacggtagccctttatacttcttgcctgccggagcagccagggcctcggttacagactctgctttcgaacagccgtcgtatgtgggaaagcgtctgttcagtcttagcttctcgcgaatccacctttgtggtctctagcttaatactctttcctcctttctttcctctggattcatgcttttccaaaccagcaactgccatccatagggcattatatggactgctcacgcctttaagtgaagttcttgagagccaaagacagtcccacaaacaaagactatacgctctcaacgacgacactatggacttggatgatccgtttgggccgtcaactgatcaggtagaagaggcgtcaaacattttatgtacaaatcgcagcgatctgccactgttccaggattctgctagcttccatcgctatatgaccatccttatttccatttacaacaggatgtattctcaacagtctgaacctcaacaacacgttactagggctttggaagactatctgaacgatcttgatgaggttgatcttctggctgcgcatgatctcctaccttacgtatatcaatcctgcgctagaacggaccgacaaacgcaacttgtgctacttgaaaacctaggtgaaaagtgccttcaaacatacgaattggagcgctgcgagaactcacatttgctctgtatccagatgatgtgcagccttgccatgtcatggaccagaggaacccaggacagcctcagtgactcagccgcggacatttatacctggttcacgacaatattcctgaagaaagggagggcctcctcgtccgtcttaatcgcctttgcaaaactactgggagtgattctaagcttgaacccagcatactcgagtgatcaatcaagcccatcccctaagactaccctattcaagattattagcgatggtgaagtgctagtcaaatttaacgcggggagtctcgttccgcagctgttcggacagtttcttctcgaagaccac

SEQ ID NO: 4682 - DNA, 3665 bp, Emericella nidulans
gcgcctttgggtacagcccaaactggatgaccaactttgtcgtcgtggaatatactcccatcgtttttcagaatatcggctggagattttggatcgtctggacaatctttaatgccggcttcctgccggtcatttactttttatacccggaaaccgcaaaccgcacgctggaagacctggattcttattatcgtactaacccatccctggttgttacaggggaccctgatgcgacttgcgtcaagcggccgctcaaatatatccagcatgaggatgaggagctgcagaagaatgcaaaggggatatcaatggaagtcgaggaggttataaaatctgaaccccaaacgtatagctagatggcaaatcactctttaaagactaggtcgtgatcatagtacccattcacaccagtcaattgaccatagctagttttatcgtgaccttgcgtagacgtttccaggttgaaccttgtagaaaaatagcttgaaagacccagtacagtgtaaaccgagctagtgtgtccgcagtatggtatgaaacaagcctttaggagtataatttgtgattgaaagtttcctactgactagatggctcgatcctctataaaattaggtgggacatactcgattcagtgtatgatgattgaccaacatcttgctttcgacctgctgcagtgacccacggtatcagacagtcgaagaacgggtccgtagagatagatcgccttggtccgtcttgggaaaggccttcacgcggcctctgcgccttctaatctctcaccctaaatacagatcgatagtatcatctccgcttttgactatggcatcctgtacattgttctctcgacgttctcctctctgtggatcgaccagtatggtgtcagcgttgagcttagcggattgcattacatcgcaactgccctgggtgatatggccgggaaccaagccactgccttgctcatggacatgcattacaagcggcggagccatcttgcactccggatcctgaatcacgtctcccactcaccctctttggcgccctcctggccccggacggtctgttttttttacggctgggccgccgcgtacagactgcactgggccgtcgttgatttgggtactttcattgcgctattcgggctgcagagtactgggatgccaatgcaagcatatattattgagacataccctcagcacactagtagtgctgcggccgttagccagttgctgcggaacttaacagcatttgttcccgctgcttgctcccagaatgtatactgttctaggatatgggtgggcaaatagcacgctagcgattgcaggtttggtacttggggttcccgcaccatttgtgctttggtgcgttgggggaggttgagaagaaggatgaggaagagatattaggggtttaggttagaaagtaagggacctggccgttatctagagccgaagactagttatcgaacagtaccggtcgcttccagattcatgtcatggctaggatatgcaagccgtaccatctttgcgctcaaagctaagataacattctcttgagatgcagctcgcagcaaagcgccacgctacaggcgaagtaccagtcagccagtcaatgatttattgcttggtccaggctggctgggagtacatcatgcgcacagcagcaatagctgctgtttggtaggcatttagtttccccgtgtcacggcgcagcatctctgactgcttcgtcaggatagtcggtgcgtgggtcgcgtcgaagacacgaacgagacgaggatcatgatagcctggaaaactgacgtcgaccaaaacatccatcgccaggttgtgcggccggccatgaagccaccgatgctaggtcctgcacctgcgtcagcaactcacaaggccagatagtgagtgataaatggtgaacggtaccaacagcagcccccaataaacgaattagcaggtacgctcctaaactccggccccgttcttgatcatgccagatatcccgtaacaccccgctggcaagcgcaagatcgtactcgccccgaaccccgccgcaatgagcaacttcttactattcgcgaacccgcatactaggttctacacgaggaaccagatattgctggcgtgaagcatcggttttcggccgtagacttcggacaatgctccgatcatcaggtgcccgattgcggttgctaggaggtagattgatagcgccattgctgattcagtggaggatttattaagttcctgggagattaaagacagcgccggcgccatgatcgtggagaccatgatccgattgaagcccgtcgcggagaggacatcggtcacggcccatttcttgccccttggccagttcttcgggtcgattcggtcggacaaagaagtgaaagagacaaaataggcatcgatgtcgttttcttttgtgtagttatgttgaatggtgaccgggtttggttcaatgttcgcttgtgtaggggtaattgctcctatgcggtcattggaggaagcgtccgtaggggggttagtggacttcatgtttcttcaattgcttaaaagaattttatagaaggttctcagggtgattatataaattccggcacagagccctcacaaaaactccatgttattcagcccagtactacgcaccagatatcctccggttttcggcgcctttcaagatttctccccagatctgataagattgatcaaaaactaaaaaaccggcgatgtcatcttacgacccgggcagaccggcaggctgatatagaaggtttctatatgttgactgagtatgaactcacataagcactagtcaggatttccctagtggtgccactacctacatgaagcctggtaagagcgtctcctctctgtccggataacggcgctaaacggttagataccctaacggtctgttgaaagcagggctggacacggcgttctgtcgtgcagagaatcgcagttgcctatccaattaagtgcaaccgcggtgagatcaagccctccagctcgaatctcgaaatgaagaggcaataactgactagatatatgtgctaagtttattttgattgaaaaacccacttgttttcttgaagaagtattctcgttaatggttacaataaagggtttaacaactagcttctagagcacgaaaatgggaagggggtattattaactgttccatcctaattcatagtttctgcacagtataaatgcatacttaggtaactttcggggtgatgtcgtatactgttgatgcaggaaggattatacctacgccacgggacgtgactaggccataagatgtcaagccgtgatccaggatcttagaccccggctaattgaaaagtgtaactcctatctcagttttgaacattgtagttgcgaaccctaagctgcggaaatcaccaaatatttcagatcctccgtattttcaagactcaatcccatccaacaagagacgggctctatcaaaaacggcgactgcgggaactggatctcaagaacagcaaatccacgttcgaaatatccgtctttaccctgatttaagagaagtctggtgtaggctgtgcgggagtcgagtgcggagtcggaacactcgggagctctccatggacacaatacgcgtggccgggtctcaggtttgagcagtcctgtctgaggcttggg

SEQ ID NO: 4683 - DNA, 3156 bp, Emericella nidulans
gatagccatcgatcgggcccccagacctgcctatgctggatcttttgcagttgatacatcacattcccctgaaaggatacttctggagtctagacggagcgcaagagagaatgttcctcacgcgttccatagcccatcacacggtcgaattggctagcaggcaccaccgagacccgagcctcatctctccaccctttgcctagatggggaaacatggcaagtggcagtggcggacggaccaccagggtcacgacgcggccacgagtgctcgactaaagactcgaccactgacgcatcgtcgcctccgtggcctctggcggatcttcggctagtgtccgagtgtgcgtctgactgtctcgttgctggagtggatctagtgccgtgtcccagagccaaagaagcgacgcccgtcgccagttcgcagccatttcgcagccatcctcataagtgatagtcttcttactcgtaaaggagctgggttgtgggaggggaacaccacagcccagacagcccagacagcccaatagcggctcatggtcccatgatgaatcgggttttgaagttggatggacaagagagtaaagaaataccaagaccgcggtgccaatgtagaagacatactattggggacaagggacaagaaaagaagaaagcatgtcaggttcctgggatgatgtcattatttcgctccagaactgtggttaagagaaaatcaagcagagcagatccctggctttaattaagatccagagaataacccctcttgtgctgaaggcaaagggcattctccacgaggacaagtccgacaagacgaacttttccttttcccttcacctggtccttgtgcttagaaaataattttacctcacaacttcccccatcctcgacctctcccgacttccaccctctcactcctggttatcctttcctcatcgtcagttttttttatgtcacaaccttcttgcccgccggttctctaactgtcacttgcacgtccccgttcctcagccgccagccgcgcgtttccagcgtctgaatcatcgctccaaccccgccggggcagaaattcctttttttttggccagtcggtcctaagcgtattgtttgtcgcggccggggtcttggtctcgtctgatctgagcaaagcacacccgagtcacccctcttttttcatttataatagactctgatcacaccatccaaccccgtaagtctggggaatctaccaagctctcttgcgaaggggggataaacgggcaaaagcatccaaaccgtcaacagcatatccccccctcattagcatcagatggtttctatggtcgaggcctccattttgaaccataatgacatggccatggaccaggtcgcccccaagtcagaacccctaaacgaaggctcgatcagttcagccgtctcaacgccagaccccgagggtgaggtcttgacgcaagatgtcgcccagacacagaagcggaagggtggcaggaaacctgtacgtaagaaccatcgccattcatctgggggtggatgtccctttttatatgtttttttttctggtgtttatcgcttttatctctttgcattccttttacttatctactgctgctctcatttgctggccttatcttttgacattattcttttaccttgcaccctggtcggagtgtccggggccccgcatccgggcgttttcccatttatcattttcattgatcatccttatcttctaccaatgtccgcccttttttcgtttgttctaacatgagcctcgatctttattccgaggttacccttcctgccgacgcttaaactgacatccctcagatctatgcgacctcggaagagcgtaagcagcgcaatcgccaggcccaggcggcctttcgtgagcgtcgcacagagtacatccgccagctcgagtccaccatcaagcgcaatgaagagtccctgcagaccttgcagcagaatcatcgcaccgctgcagatgaatgcttgatgctgcgttacaagaattctcttctcgagcgcatccttcttgaaaaaggttggtcgacttcactcttacctcactggtctcgttgtactgacacatcctaggaatcgatgttcaagctgaactacgcttgaaagcgggaacgcccaatggcccggggaaacctagtcctataactactaaagctccatccctgcaacaagctgcaattagccgaagctcggcccaacgacaccctagcggcctcgcccccaaggagcctttcagtgttccccagtcgcgcgatggtggcttcggtatcccgtcgccccagtttcaggctacgctccctcccatgtctcctcaccatcgcacgccaagtcacccaactacgggttccagggagctttgtcgcctgccggtgtcgatcctcaagcacagcggtcccaaatgctcactcactcgagaaacataagccaaacttctccacccatgagcgttggccagcctgagcccaccgaaccgaagtctgccgtatcggctagtatgggctctcgagctccccgtctcccttctgcgtactatccatcgccatttcagaaacattatgatcaattaggtgagtcaaattctatcgccttctattattgtggcccccgctaatggtcgctcagaacaagaatatgatgcgcaagcggacatgattgatgacgagcacgaatcatctgtcggtacttcatctttcgtacccgggtacaacccctcaagctcagtctcgaatgcttctcaccccatgaaccctcatggtatgaatccatacaaccactcttctggggaagctgtcaacggggcatacggcaatacgagcgccatgatgggaaactatgagccgatgctagacgccgatccatttggactgagcgccagtatgcactttcagaccccgttcagctacgagcaaaataatgcacgtcaatgactttcgatccgtttccgtcgatgatatatctctcgtacatatcttttcttcttgctacttcctgccgatagagcagtttattctcgtccatggtgcaagtccacggctataagacaaaagttgatgttttggtgcattagctcgcgttaggtggttgataccatttgcttgtgttatctgggtgttttaccttcttgtaagcataaat

SEQ ID NO: 4684 - DNA, 1471 bp, Emericella nidulans
acggggcggagatagactcgggtttaaggtacggaagaattcgccaatcattgaccccgccagctggaatgcgtagtcgattgtattggccgtgatagacggttgtctgccggacagaaaagtctttgtgccattgaagagagtgcagtggcgggcgtcgagagctgatcaacacgtccatgtagcagaggatgagggttgaactgggacgagggccgtgatggcagaaatcgaccaaaatttcagctactgcgccatccagcttaaaatcgggcagctgaatccaacgggtcatacgccatgcagtcagcctgggagatgagcttggtctctgaaccagtcgaaatgagccagaaggcagccttgcagcccccattgttgcgacctatttgtcatacagaattttataagtctcccttgcgatcgtcgcaaacaagacggcactatgcagtacccaccttccagatctacgatatctgccagtaaacatgacttagttggcttctgcaactccgggaccccacgtagtacttagagccaatacatatctgctatgttgaagtcgtatcggggcccttctctgataaaaaagccaaggccctcttccaaagtcgaagcatcgagatatgcccaatgaagaccaggccaagacagggaatgtcccgctggagcccttgagcagcgcaagcgctgtatttaagaatgccggcattctcattggcttggacaagcagactctctatggtcgttgttccggcttatatatgccatcttttcgtctcgagaggtaggagcagccgctctgtacatgggcttaccaaacatagcccgtcacgtctccgctcattaaagaaagatacagcaagcccatgcttgcggcgctaacatacagagtgatggagaaagcagcgacgagggttgtgagcactacactgaggacggagagtagaggaatatgagaccaatacagatagttgccgctaaaatggcgacttggaaggtagagctaaacatcagtagcttgttttgacatgaaggtttcgccggtaaggacttattttctgccggtagaaagcctgcgccgtcaatcagtgtgtttttgctgtccagtgtatgggaagtgcttcgtgattttactctctacagtagcctggtttccccgacgttattgggatgcctagtagtcacagtattccccactgtattggctgactgtgtgccagtataatactcccaatgatgaagtttgttctgaggcttccatgttttttgtactctgtaatatagtgttaccaggtgttaatcactgtccagcttcaaacaagaaaccaccttctcagccagcatcttagggtcactcaacatgggcaagtggccggccggaatcctaatcacctctgaccccgaaattccagcacatatctcctgcactcgcggggagaggacccgatccctttagtgagggttaatt

SEQ ID NO: 4685 - DNA, 3115 bp, Emericella nidulans
tccacgacgtagatgttgtgcatcacccgtgttagatctgtccctccggctgtgccatgcagtctcggccttacctcgctctcagtctcccaactccgaacaatcagcacccaactgagcagttgtgcatgcaaaacccccaatcctccaaaggtcttcgtacatggcaaacaaaggaaacacaagttcagcctcctgagagataagcaatttgagcctcggacgcatgacgataactgcattttgagccttgtggtggaatatgcaatcaaaacatgcgttatgggaaatcagcccgacccttccacaccggataacaacgcaagcaccctaggacctcttttatgtgcagagcgaacccgatgcaacagatttatccagaatgcaagggagctcctgaacactgcgagtctgttttcagcattctggcagtctttccgggatccagccaagttctttaaaacgatctataagagaggcgacctgggattgagtgggacctagactattgtctactgctgaagcggataccacattagcttgttgctactagctaaaaggaaagctgacggcacacctttaaaagcattcttcgaggatttgtttgcggaatgatcattgcggtgatggtcaacgctaagaagcggtgtcatcttggggttcatttggcctgatccataactcccaaagaaggaagatgtagaagaccttgacgaagaataaggagcgggctcgagactgtgatagaaggtggtacgggaggtgtttgcggggtggaaggcaataattaatgaagatttagcaaggcgacggcagacaataacacaaacgccagcccacctctgaacccaacccacgagacaactgccggcttacgagagcttccacctactgtctccttcttctcttctagtctcctcttacagcctgagggactcgctttgccgatggtaagagcgagtttcaaccgggtcttgatctcacgcgctgaggaatccagctccaacgcgaacgcctgcagtctcttcgaatcatggcttttacccgacagcggacttcgatactctattaaaccgctcagagtcagaccaccgacaagtttccaatccagccggtcttctcttggtcttgctccatcctttccaaaatctgtgctttgactattgcggacagcctccattcgcacggctacgagcctttcattagcaacacctcttccgcccacgccgttcagcaagacaagtctcacgagcttgttgtaactgcgaacttatcagctacattagtgcctgtctaccgatcttgcagcaggaagtgggcactttgctctaatcctgcttctaagcttctcggtgtctagtgcgtacttcctgccctccagcattgtgtcctaccttgggggtatgtcaaattcttgaaaacgaacagctgttgctgggcctacagacttactttccgggaccggccatgattgctaatgcggtcatgtggtcagaggtttcttttgcccttaaatgtgatcgctacagacggagtcgaacctcttgtggcattttcatgaataaaagaatatctctcattttatgggcgcaaagagagattaacttgaatggcgccttgagatggaccgcgttgtctcacttgctggacgttgcgatcttatactactaccgtcgtgtctccaaaacacactggactttcttaccgaattggacacgccactatcttgcgtttattgctcgttgatgattgggaaacttaaacccttgaacaattcaaggggatcctttctctacacttgtttgaggactgaggccattcatttctgcagggagctccgaagctcaggctgtatagtacccggcattcaaaactatgcttgtgttccaatgcctgatcctctttgataaggagagcatttacgagaatcagtggagtgtaggaaatcacgtctatgtcaacgctttgtccgcactgtttgagacttacctcgccctgtaggaaacagtcgagccgctaatgagtttatgacaacactaagtccaagttctagcggcaaagctcaatgctacagtctctttcatttacgagtttgctaggtggcccagtaagtccaatcttaattgccatattcctgctctaccgccatattcaaaaggctgagctttctctaggtgtcgtcaacaattttgaaatatgccctatgccctaggaaaggtaaagtttggtacctgagcatccacaacagactattcgttcaaagagcgtcagctctctgtcgggtttaccgtcgacgcactctcttctgctcttcaattttcagtcacaataaggagcaatatgacttcggactatccgatatactgaatggactagcgggtgccgaggaaagatgagaactcccactggagctttcgaggtataatctgcgggttgcttttgcagacaggtaacgattcgcgcagaacaggaggagcgtaacgtatgatgagggacctagtggtacaactcatcgcatacatatgtcagggatcgacttgttcgcctgtaccatctcccccggtggggttaccaaactctccactggccgcgattctggccaccaaattaagcttattttgttcctggttgcgcttgatcagcctgcttcgaccataccattgattttagccccgctattcgcttccgaacgaattcctcagcttccccagatctggcccctatcggagtggagcaaaggccatacttacaccacctccccgcagcattctaggctttatgtgatgaagaccacttgatgactatccaattactttgactgctccgcggctcgaatttttcacgacaatcctccggagaggccgattatggtggatccatgtttgctgaggtggacaaatgaaacctgtcgatggtggtgtccgtcatctgaaatcctagaagttgctagattgcaaaatcacctcaggttaccacacggctagtataaagccctcggccttccagtcgtaagtgttggatcttcttcttccttgattccccatccttcagctgcttcatcggaatacatcgaaagtaacttctactaatcacttactgtatcgattccactatg

SEQ ID NO: 4686 - DNA, 3004 bp, Emericella nidulans
cagttggatccggggcaaatcgtcataccaagtcttgacgctcggccgttctgtggtcgctgctcagtgccctgagcagtgggtccagatccgccgctaaactgccgctgagccttgcaactacacctgagcggccaacaggcgcgaatcattgcagccctagttttagttcgatggccaaaatgccacttcagcaaagcgattcgtcgagaaaagaacggtcatggcgacgccggagtattcaagtggagacggcggtaagtcaaaccgttatctggggaatgacagggattgttcaattcagccaccgaagccaatcagcagccttggaccccaattggaggatagcgtcagtcagtccctgtggttaatcttccggtgtgttctctacgttcagtgcgattcggatacggagtggaatgcaagaaatcgcgtcactgaagctgcagcgcgcgcgtcgatcgggtttgctgcaggaaccgctgccgcgccgcagttcagctgtgcccgtgcccccatgacctcgtgactcgtaccgctaacgtgatgacagtgtagtggagttcagctactgggcaaagctgaatgtgttagagtctttgataaaatcagtgccgcacgggtactcacttgccatcgcttttctccgttgaaatactttttaagacgggccaataccctcttagtagcacggaggataccaaataattcatcgagtctcatctgcactttggcgttgtcgctttggttggagaacacgatgaatcaatcccctctgtcccagggaagcgtttgaggcgtaataaacggagtcaaaattgagaacgcactcgctctatgatgagaatacctatctctcattgagtagttactgctttactattgcgtcctgtctgagagccacggcgcgagcctctcaagatgaaagagcggcatgttaatatcaacaaggcttagcttagatagaaatgcccatgctattagaactccctccgcgagtattgagaagcagtatgcaccaaacaatgagctaagtatatcatcggccataactgtctgctctacctgtcacttttctgaccgtggatctaagtctcaaagtattacctgttcgatgaagagagtccagttcggtattgtttcagtgttatttaggaagtgatgatagggcttaccagaaccctaccctaacaatccagccgcaaacttcacgcttacttcaccctactgggtagtgttcgagaaaaaaagttggtctgacttgcaggatactactaactcgctgaaaccaaaatctcaagctacgagcaatacggcacactgttactatgacgcccatctccatctcagaaaataaacccaagcgacagaactggatatcaaagtggccccataacgccgaatatgattgacaacatagcagtaataaatcgatataagacataatgtaagaaatcaaccgagaataatagcggtaggcatcaagcagacgggcttggagaggttaaaatcacgcgccggtgccgaagcgtttcttccgagcctccatggccgccttatccttctcactccagccattcgaggcgccgttattcgtagcagatttctgggcctgtccgtgcttctggctctggccttgtccctggcctctatggccgcgaccacgctggcgctggttgttccgcccgttgtgattccgtttcttgccgcctcggccaccctggtcgttctcaccacgacccctcttccgtgatccctccggcaaagcctggtcaagccggctcacgctctccacagcaggcgcttcacccgctgtgccgaaccgtttagcgcgttcaagcttcttcgccgcctcgtcaatcgcagcctgcgactcctccgtgataccgaacttctccgcgcgggccttgcgcttcttcaactcttcctccaaatccgtcacagtgagaccgagagcgaagttgggtgctggcttctcctccgcaggctgctgggctgcctgttcctccgcgcccgtcggttctactgtacctgagggctttgcactgtctttggttgctcccgtcgccgatttcgcgccatctgtttcggtttcctccgccttgggagcggcggtggcggtctcttcagcaggggccggagccacagctgcagctgcagcatcagtctcggcggctttggtcgtcgtggtagaggttgcggcaggaacttcatcatcctcccagtcgatcacatcatccgcgttctcgttttgagcgggcgcagcggctttcgagctgtcgtcttccaggaggcgcgcaaccatgtccgccttcttgccagtgtgagggaggttccgtgacttgaggatctcaccgtgctcagcgcaggtcttcttggcgtactcggtggccattgcgcggatgaggggccacaatggatagatcctagtgatgactggaacggagtgtatgttgccgaggcagcaagggttgagttgccgacagatagcctagccattgaacgggtcgaatcaaacaacaagctgtctcacctacgatggctttgcactccttagtggcataagcactcaaactggcttcctgtcctttgaacattcaggcatcaattgctacaccccaagcaaaacaaataccggtcctacacccctaacctacttttctcaatattcgcacaggtcataccatcctttccgttccaaccctatgctatccaggaactggcaaggagaaacccctagctggccatcgccgtgaacccaaaacgtttggagagccggcagaagcgcccagacttatcggccacataggtacccgagctcgaaccattggggcactttccggaaccatggttccaaacggttcggttagttttggggaccccgttccgggcctccggcgcttccgagaacttatcatgcaagttagagggttccccctcttgtgtgtttaattaagtttcatacgtttctcccttctccaataaattttctttttgtacacta

SEQ ID NO: 4687 - DNA, 2833 bp, Emericella nidulans
  unsure (1)..(2833): unsure at all n locations
gagcggacacagagaatcgtgtgaaattcaagcgttcagcgattcatgcgccaatagaaggtagtatatgaaagaatcagcaccagccctaatcgctcagatctgggttggcgacaaagagtcgcacgttggtcattgaggttgtcctatcgtccacactgcctcggcgccgaagatcggctgcttttttggccttttgctcggccagagtagcagcattcggtgcacccatatccccaacggtaccgaaactatcttcctgctcactgttgcgactgttggttgtggcaccatcgtccttggcaatgttggtatccttttgctctccagctttgtcctcagaaactcctggaagatccgtcttttcgttcggtggcgtgttaccgctgctcgctgtgtttcgttgatagccgctaggataacgatggccgctgccgagagagctccggccgctccctgtccgacgatacggaaaatccctatcgctgcgggcatcgtcgtcggcatcgcccacctcgttggcactgagtcgaaccgggacggtagcgccaacaagcgcagaaggagagagcttcgtaactttattgccatgcttgccctttccgcttccgagagtacttgcacgtccggggcctgcaccgggaactttgggtatgctcgcttcttatctactagcttctggtgtcccaatcggggatcttccgcctgtgcacgggcaccccaaactgttgccttttgccggcgcaacaaagccacatagctcatctgagatccaacggatcgggatgacgtgctccnccgtacatccccattgttacctgtggatgtggtcgaggtggttgcacttgacaagcgccttgccaaggggttatacggaacggtcatactgtgttgtggggatgggccggtagtatacggctgttgtgggtggtgatgctgtggatgccctgcatacggcaaaacgttcgaggaggtcgttcggttccggctgtgcgcaagcgaagcaacagagggatgggggaagagttgttgagcctgttggtgaggctgatactgttgttgttggtatgcattatgatgataggcctgaaactgaggcccggagtgcgcagaaggaacgggtttccgcgaaggtatttgatgcatcggcagccgataatctgtcatggtgggcgactagagctggacactggccatgtaggcccagtcgatatagttgaatggaaagtgttatttgctttttagcaaaccggtcgaaaatcaacagaataaggttaaatattacaaagacccaagcgcttgacgtggtttgcaacacaactcaatggaggccgacaagtaaacggttcgaaagtgagcggctgctggcgtcgtacgagtcccgaatatgcggattgaaaggacagagagacaaggtatgcctcgcaggacgcgcaacgtgcgattaaatgagcacgagcaggcggccacgaaaagcaagtagccaaagcgattcgttcaaaggagttggctgccagagatcaaaggcgagacgctggggagggacggcggctacctaaagcaagccgctctgagtacccgagccggagggacaaaagagagggcagtagcgggtttcgagcaagcaattgcagggtgacaagatagcgtcccgattatcccgagggggaatcagaagtcaatatataaagcgggcgctgcagggcatggagagaagagactatgggaggggaaaactgcactgctggatatggcggagaaaggaacggcgaagaagcagcttgatggatacgtacgaaaacggtattgtatggtacgacctgcacagccacgtgagccatcataaggcggccgcgcatccggccccccacgcgcctttcaactaccgtggctgatactcactcgtcctccgtacggaggacactaactccgtagagacgaacatcccaatgatgtggtacgcagtcacttcatacattctctgtttgtacgaagctactacaggatactcttgattggtttgagattcagattcgtgtggagaaaaagtcaccctgcgccacaatacgcaagccacattaccttacggtttcagaggctaatctgtactcagagcgctccgtggagcgtacctgattttcccttactttccaagtctcagtgtgcccggatttatgccactttgtatctcttctacttcaaatcatgacgtcgaaccccacagtcgccgagaattctagcatcaaaacgatgagggttacagataattccgtcgtcccgcttaaggggaaggttaaagcgacccgagctcgtattgacaagtagagctcagctggaggattcagcgcctccgtctcgccgtctcgtgctcggcgactagacactgagaggaaaacttggaagataagttggagaatgacgtgagcatccaccaagataacagtagtgaccatgactagcgctagcagaaaatggttcagggagtgaagcgaatcagtccgaacaagtgcagcatgtgttgagttacatcgagtccgaggttccgagttccaagttgtaacccttgttcgaccgttactttctcgcgtaggtatagaatggcgcgctaagacatcattttcagctaatctgggcttctctagagtagctacgttgagctacgttgaattgttcactgtccatttgtgtccttcaagattaatcatcaatttgtggctctgtcttgtaatggtgtccatgagacaacagaaaggggctctattcccgctatttgtctcagtcggaccgtggattgaatcgtgcacagcacaaaaagagtatagctcagaagttg

SEQ ID NO: 4688 - DNA, 6207 bp, Emericella nidulans
aagagagcggacttttatggacatctcgcgcttatgaggacagaagttgaaaaccaaagataacccaaataagcccaaccaatatgggaggttaaaaaagacaacctcccccgttaagatggcttataaagggccccatttactaccggtttaagaggtccgcagatcgccctgcctgatatagggccttttagccaattggaaagcttgccggacattctttcaataatccatcagttagattctgtttttatacacatgacccaaagtaggaaattataactaagaaatcactaagttttagggttgggatatttatactatgaaagaaagcttgactctttataaattcaaagaaaatcgtctttaagcttcaaatttgtttatattcttgaaacatttatagtcaattcattaattattcctgaagccaacccttatttaaccattaatctcacaagatataccgctatataccttggtaatttgtataatcgttttacaggcttcaataatcagctgcttgatttttgacctacaaatagtaggcaaatagataaggcagctagtatattgagtattggattcattcactcatacatatttaggctttagctataatattctcaagatcttaccaggccttagtgggagcgatttaaagatttactgtacgcccagattctgaccgcgtattgtaactattaccccacattgcaatcctttggatgcggagggtccgttactggtcgggaagacttctagacctctttgcccacgcagcgtcaatttccgattggatctagacggagttcgagtggttttctacaaagagcggaagcctaacagcggatcctatgaagctattttgcggtctacttttgcgctaaatcataaacctaagcgagcagagtaccccacggggtcagtcaaatggcattcagccaccccggcttcctctttctcttccttcgctagctacaactatatccggctaacgtgcaaacaccacacttttcagtaatttttcccgcagtgggtcgcatactgatgatctgaagaatcgggagacagctgcctatactgccagaacaggtccggcgccactccagtgcctacgagcgatgtatcttgttattctaacgcatctgtgcaaggtaggcttgatcacatatcgtccgtactcttcgaagacgcatagcttccggcctcctcgctcgctgcagtgtgtgctctggtcaagatactgtgctgcgaattgtcggaacgcctcctgcctcgtgtgccaaaacttaaatcaggggtttaagttattctatacgaggtgttgtgtacaactggagcgtgccaagtcagatatcaatgtccatcgagaggtcgcatcccttgtaagtatgcacagaagagttatctgcctctgtggttagtccatgcctctgagcatggcattgataaattgatagaactgtcaacccttccggtatgtttatcttcgccggtggtcactatatggccgagctcaaggacttgatgaagcagtcgctttatagacagacttctcacaacaatctcacttcaggagggctagctatatgcgtgtgatctgggagactggacaatggggtctaatcattctgacctttctggtccagttagtagtctttcttctagcgctagtttctcttgtcaaatttgactcagttagctattcctcattcagtcgataccaatccttgacgcagatcattccttgcctagttaaggacatagggagtaagactcgctgctagagcctcgagttgggttccgggccacgatcaagaaagtagtgacaatgcgagggtcctgatgaaggttcttgccacggagagtccgatgttcgtgccattacgcaagcccagtgttgaagaggcagtcagtgttgcgaacctgggttcctcgttgaggtcgttgacaattagtacccagtggcattggcttcatgcgtttcaagcaggtcacccaagtagcaggcatcgcggaaactcggtgaagacatcgttaggctgcgttatctgatatcagacacccaatcaagtggtgatgtatatagtaggatagctgtcagttatctgaaatttttctatgggtccttttatctagttcgatactgccttattagggattagaatagataagaagcgggccaggtaatagctaatcctagagaaatcttccctcgctatcctgcgacttcaggctaccataaattagggctctgttagatttgctaaacaatttttcagttctttatatattatattcctaatgtagagttaattaggctctgtttatgcagtataaaatacctaaatttagggttagaccctgccgcctgtctccgtatcccagaaaaccccccgtaaccattccaatagtttacaaacggtggtcaatttgaatccatgcggcttcgccgggcaggcgacaaagtcaggccgttgggcactgggcactggatactgcattaaacttgtggtggcggttgactcatttcgaaaccgtaagcctttctagaaccaagttcgaaacggatagtaccaaaccccatccagagcaccaacaagctgaactaatggagctggttaatacaggattacattgttacttgacaggattatgggctagtaagtccttgtgtcaccgtgcctgtcatgaaggtaacaccattgccgttcatagtggaacttggtcaatcaactgtaagagcatagcccgactttttggcgttgttgatggggtagagcgcacccgcccgtgcaggtcaagataacagaagatggattagtcgcggcagatataggatgagctgtcttggatactacactattggaatactgacatctctgctccacctcgcatacagacagtaaccattatattattccaaagctgacgattactgagctctcggccgtaaaacaaacgccaagcgcaggacttaccaaatatatgagaaatatccttcgcaatgtcctttgaaagccagcatgtgccccacacagcttctgcaagacccagtggcgcgatggatagagtcgaatgcatgataagagctccaaggaccaggaaccaagtaactgatctgcagattcctggcgatcaatggcgctggttccggtctccagccatagagagtttactatatccccgctcttatcggcaactgcttgaccggagcctcggtgcagcgaagatccgggaaggaccatctaagcaaggacggtataatcgacgtgccgccccttcgtcgatccgaacttacttctaggtggcattctcattgccaggccaagctgctcagagcaataaagtggactgatctagagaggttccaccccgtctcagagagagcgaattcgaggtagaacactcaccgactattattcgagttgcagcggaagcaggacagcaaaggatcaagaaagctaagccacctctgcagacgtgtctcttgcaggtggatgatatgcagggtaaaaagggaccgtttgccaaggaagcagtccctgagcttgcaggatgattgggatatcgccgattccttggtcgcctatcgatggttagtcacttataggctgtctgatatctctgagattagctaggcaagtctcttcgaagctgcggtacggctccagagctaggaattcgcagttatcacaagagaaagtctagacaatgacttgaggggctcccgaaaagttggttggcgggatggtccgctttaccgctcaaagttcggtttgccgactctaaccggatcaggacgggaaggagatacctaagaccccagacggtgaagacatgaaacagctatgattgcagaggatttacggcctacccacctgttactacgcccgttgcccagcataaatttcgggcccacgtgtcctgtaaccacgttgtaagccacaagagctagtatgctaagaaaagtgtgtggaagaaatatctgcaggccagggggcgtattagtttaatgcaccctggttatatatgaagcaaccacgatgatcttcatcgccaatatccgagtctccgaccaagtctgagaggagggtcagacggaagtccgtggctgttcgagttagctgagttcttctctagaacttcaaccaccgtactgtatacaaaccttttttggggctctacctgagaacgttataaaaggctcaagatccgccttcttctgccagtcctctgcaaccacatccgcaacgcaaccgcgacagacagtctcagtcaaactccaagctttgatctcaaaccgacaacatgaaaggcctccagatcctcgtctcatccatcctcgccttgggggctctggcagatccctccgcacagatggacaagagagctgaccgcggttcctacaccgtctccggacttggccagcgcaagcaggctatcctggacgcgggtgggaacactcttgatctcgccatcgccatgcttgagacgtaagctagcctctattgtcatattataacagatcaccgggtattgaccaattcagtgagggaatgaccaccgactacgtctacggtgatgcgaagaccagggatgctgccaacttcggccttttcaagcagaactggggcttgctgcgcgtctgcgctgatcgggctggctttgtcggccagtccgaggatgagtggaataatggtgctaaactaaagtatgagcttctttggccttgcatcgaagatctaccctctaacccaagtgtctgtgcctagttcggacgtgtatgccgatgtcgcctcccgctgggattgccaggaacactatggcgagcagaagtggttcgctggccaccgaaacggtgaaagcggactcaacaatcctaacacccaggatatcaacagtaattgctccctcctcactataaatgctactaaatgcagatactaatactgctgcatagactacaagaatgccgtctactggatcaaggagcaaatcgatagcaaccctgctcacaagtctgatgacacccgcttctgggtcgatgttgtggctatctaaaggaagccagcgaatgcttgtaaaggaggatgagcacggcgatcgctcgaatccactccaagctaggcagaacataccgtcttgtatccttcttttctcctaatatcttggtctagtcccctctcagccggggtgtgcggaaaggaaaaggatgagcatggccctcattcggatccaagtcagcacaaagcaggccgttttttgtatttttaggtctcttgcgcagtttggccagtggccattgcagcaattaaacattcttcgttctaccttactcagctctactctggagtagatgcagtcgctcgagtgcccgtcctctttatgtacatgataagacgacccgcaaaggacgacacatacagcaaggaacagagtcgttttcaaagtgcgcttttgcatatgcgctgtatattgtatcgaataatctaaatagactttgagacttcctgtctcaaactgagacctaagagacgcttcgtattactatcattaataggtatccactgcttgcacaatacataagagctctctcatctatcgtccaacaggcaacatagattggcattaagtagcttgaactaacatagtaatggtgtttcaccgaaccaaaaccaaactctctctagtcccacaagaccacatgtctcgaactgtaatgtattcgggccagtagagtaacattgtccgctcgttgacaggtgaaactattgggtaccaggaaacacagccccaaggtactccgcagtagtctgtctttacgtttcagtgtcgtccccacccaataaatcctcggtttagttaaagggttcccgcttacgtactcagagtgaataccgtacagtacggagtaggcaaccttgtgttgacggtgatcgtcttgtactgctagaacgagtgcttttaatatttaatatttattttttatttctatgctcatggcacagcggtgacagcaacgtcaccaaaccgcttcatcccccggctcgctgaatgtattaaaataccccctcgtcataaggcgtctctggagctctctgaacttgctcgtctttgcccttttctcgaacaggatatcgatctccagataactcagtccaaacgtctcgggaagccgccaatagcaccaaacgaaacaga

SEQ ID NO: 4689 - DNA, 3367 bp, Emericella nidulans
cgaaagagcacatgctcatagcgctcctgtccgatcttgcccttatagtcttccacagcgagacaaatgtctgggcagtcgcgctcccgcggtagtgcgcgtcgtaaaagtgctggatcaccgtcttgccgctcttgaggcgctgggtgtatggcacgtggtgtaaccacagcagcaggttgtcgggggtggtgtcgatattttcgtacatctgatatacctcctccgggtactgacccgcattgccggtgccgttccagacggtgcggtccatcccaatgctgtcggcgtccgcgcgggtccactggccccaggggttgccgtcctgagatgctgggttggggccgtaatggccaagcagaatgtcagtcagcgtctggatcccgaggtttccagagtagttctcgtacgcgggccaagactccatcgacatcttcgtgatcacgtcgacgacctcttgatcgtgactgaatgtcatcttgatccactcctgccacagctcccccgagtcggccgacgggtcccaggcgagccggccgtaagcgtagaggtttgacatggccaagtgacttcctagccaagtcgtgttgaggccaacattaaccactcccgcgtagccaccgagagtattgttgaaccgcctgccgctgacgatatcactgacaaccgagtctttgccgtcaacgcggaggtcaaaatcgagaacttctttccacataggtgcaagatagaccagatggcattgctgtccgagatactcttgggtgacctgtagctctactgcactggccgtctgcgatagatgggcgaataggggcgagacaggttcgcggacctgaaaatcgatcggcccattcttgatctgaatcacgacgttgtcctcgaattggggatccaacccgtcaaagaactccactgccgcgtttgcgcggtcagccttccagtcgagcgtctcgttgagattctcgtggtcgtagacaaacgcgcggaacagcacgatcccaccgtgaggctgcaatgcccgcgcaaagaggttggctccatcggccagcgttcggttgtaggtaaaggggcccggctggccttcggagttggccttaaccagatagcctgccatgtcggggatcctctcgtacagctcatcggtgatttccccccaccagctgatgactctctcgtcaaatggatcaaatgtatccaggccgcctagtgactggggggacgcaaagttcaaagatagaccgagctggatgccgtacggacggaaagcatccgctatcctggctacgccatccatgttctcctgcgtcaggatcgtctcattcgcattgacattattgacgatgacagcattgagaccgatcgaagccagcagacgagcatactggctcgcgcgcgtgagatcgtcgcggaccctgccatcctagaagaagatggagtctcctcggtatcccctctccacgctcccgtgggtgccgccgtcctgtagattgtcccattgatttacccatcgtatcggcgcgctcgggttggatgcgaacgaggtatccgagaccttcccatgcgccagtcgctaaaaatactggaaggttccgtacagggctccgcgctcattctgtccgaggattaagacgctgggccccgcgacgctgagatagtacccgtcgtcgatgagttccggaacactggacacatcgccgccagcttcagcgtatgcttcgacagtgccaaccgtcacggcgggaaggtttgggtcgtcacgcgtctcgttcttgagggtgactcgcttgccaaatatccccttaatgccatcgacgagctcgtaagctgcagtatctatcggtcgtccagccgttgcattcaatggcacaattactgacggtagatttttgtggtacgatttcgcatgagggatgggcgcataccgcagccaggctgccagcccatcttcagcgacggcggcgacgcccagtagcgcggtcagcagcagaaagctccgcatcttctatgttaaagctgctacttgagctgtaggtgtctgtcctgatttagttgcgtccgccgctgggcttttaaatctatgcacagacgcagagccctgcactaggtacgggaagctcttttgcggtcgccggaaaaggtccgatgcgtcgatgtttttccacccctgatgttcggccatgcatcatttcaggctatatgccgggcagacctcgttctcgcattttggcggggtcgtagatcaagccagatccggaataaagtgcttggagattgaccatttagcctgaaatcccccacgcaacccccgcaaaccccggattgggagcatacgaatgcttcgctagcggaggatcctccgtggtggaggggcaggttataaagagaatatccggtggccagggcggcaatgtcagctcttctagtgttccgcatgagttgcaacggtgtcggaatcatgagattcaccaagttggtggcggcatgcgccctctggatcgcaacggctgccggaaagcccatttactggcaggatagcttccacagacactggctggcaacatggacggcaatgccccaggaagttgagagcgccaatctcccgtcgagtccttttgtgagtgctgacggatcagttcttagcatgccagtctagaagacttctgatctcaagcaagccgatgctgacggacgatagggtggagcagacgccgactttcagttcaggaacgcgactttgcggcagacagtccgggtctcagtcggagctgagcgtgtacgcttccaattctcaaatcgtttcggcttgaccgagttgcccattacggcagcgtccgtggccttgccagaggggggaaacgcaggcgtaggcgagatcgacacgtcgactatccagagtctcaccttcaatggggataagtcaatcaccattccgccccaggagactgtctactccgatccaattgactttgatgtaccacccttgacgaacctcgcaatcagcatctacagcgcggagggacaggcaaaggccaacattactggtcacccgggcagtcgaacgacttcgtggatggagacgggggacagggttgacgcctcttctattacagaggccagcctggtgcactggtactttattagtgccgtcgaggcgtggactcccagatatacatctggtctcgtaatcctcggcgatagcattacagacgggcgagggagcgacgacaacaagaacaaccgggtagcatcggtcatcaaccccggcgatggtgggattcccagatggcattttcagctgacattaggagatggcccgacgcccttgctgaacgactaccacggagcaatttggtcacatcgctgt

SEQ ID NO: 4690 - DNA, 4381 bp, Emericella nidulans
  unsure (1)..(4381): unsure at all n locations
cgacgggtcgcttaagtgggaagtgcgttacggaggtaaaaatatagtgaggacttctcgcgttgatgagggcgatccaggcaccagccgttttttcgctgtctccaggcgggatgaagagaaggttcggcatggcgcggtatagcgaggcgagttcaatgggttggtgcgtgggaccgtcctcgcccataccaatggaatcgtgggttgcggcgtggattacctggaggtgctgtaacgcccccatgcgcactgctggcgcggcgtacagatagaacatgaagaaggatgaggtgaccggaatgaatgtgttggggttgaacgcggccagtccgttggatatggcggccatggcgtgctcacggacaccgtagtggatgtaccggccagagtagttgccgtttataccgcatgttgttcgaagatcgggctttgatggtcagttgggaagccggggctgctattagggggaaagtctacttacgtgttggaagtcaaccttgcccttccagatcatgttcacagagggcgacagatcggcggtgccgaccataaatgatttgatatattgtgcgatgggattgaagacgaggccagatgagacacgcgtcgcagtcggcttgtcggggagctcactggggatcagcttctgccagtcggttggcagctcgccgcgcacgcgacgctgaaactcatcggccagttctgggtgcgcctcgctatagcgctggatgaggtctttccactcttttacataaccctcgccgcgggcaggcaggtcagcaaagaattcacgcaccgtctcaccaataacaaagtgctcctctgggttgaaaccgagcttgcgcttcatagctgcaacatcttcgacaccgaacgccgcaccatgggcagctgcttggccagccaccttgctgtcgagaccgatgaccgtgcgaatattgataaaggtgggcttctctgtggacgcacgagcctttgaaagcgcctccacgatcccttcgacatcgtagcagccgtcctctacattaatcacgtcccatccgcaggcgcgcatcttggcgttgatatcttcagtgttggtgaggtccactgagccgtcgcaggtgatttggttattgtcgtacatgatggtcaggttgttcaacttccagtggccggccagcgagatggcctcaagagcgacaccctcctgcaaacacgcatcgccgatcatgcaccaggtgtgattattgacaacctcgtatcccggccggttgtacgtcgcagccaggttcttcgtagccattgctagacccaccgcattggcgactccctggccgagtgggcccgttgttacctcgatgccctcgtgctcgatctccgggtggccgggacacagcgcgttctcgcgctccgagtggtacgacttgagctgctcaaaggtcatggctttgtagccggtcaggtgcaggaacgtgtattgaaagaggcaggtgtggccattttattggacgaaacggtcacggttgaagaagttgggggtatgcggtgcgtatcgcatcacgtatcgccagagcgcaactccgatcgcagccatgccaatggccccgctgctttggtcagtatgcttgatacttgtctgagttggtattcaacctacccagggtggccgccaccaaactgctggcatagatcagcgatgagaagccgaaaggtcttgaggacgatatcatgcttgctgctagaaccgttcaccagagagccggccatggtgaatgtgatgtgagatcaaagcaagtctagcttttcgcaagcaaacagtcggaagcgctggaagcactttataaccaccgatggaggcaggattaccgtatccggtaattggtggcactgctctccaaatggggaaatctagaactccataaaagtcaacctacacgccggagattcgccggagcctccagttgcctctttgactgcacagtatccccacggtgtatataatcgtgggcgcgtcaattcccactcttagaaattccaagtcttgactaaaaccttcactcatcgccatgccctacctcgcgaatccctctctccaggtcaccgccgaccaccagatcaagctcgtcgaagcccctgttcacgagccgggcaagggcgaggtcctcgttcatatcaaagcgacgggagtctgcggctcagacattcatttctggaaaaccggtcgcatcggcgagctgatcttccacggcgactgcatcatcggccatgaagcggcgggcgttgtcctgaaatgcggagagggtgtcacagatctgcaaccaggtgggctaccacgccgtgcactgcacagcatatatctctataaactggtcttgtaatgtttaagggagacacgctaacagaactgtggtctaggcgaccgcgtcgccatcgaaccaggcgtcccctgcgaaaactgcttcctttgcgacgagggacggtacaatctctgtgaggacgtcgcattcgccggggtctacccttatgcaggcacaatccaacgctacaaagtccacccggccaaatggctacataagtacgcgggcgccccgtccctgtcccagtcccctgcaaagctcaaagctgaccctgtccttcgtaaaatagactcccccctagcctgtcctacctcgacggcgccctcctcgaacccctcagtgtcgtcatgcgcggtattcaagttgcgcaactcgaactcggccgcggcgtcgtcatctgcggcgccgggcctatcggcctgatcgcggccgcagcagcgcgcgcatcaggcgcccacccggtcgtaatcacagacatcgatcccagccgtctgtccttcgcaaggcggtttctccctaccatccagacataccagaacaatccgacactcgacgcacaagggaacgccaaagcaatccgcgcgttatttggagacaacgagtacaatgccccagaccgggtcctcgaatgcaccggcgtcgaaagcagcatctgcacagcggcgtacacggctcggagaggcggtcttgttgttgtcgttggtgtcggcaaggaaatcatcaacaatgtcccgtttatgcatctgtccctcgcagagatcgatctcaagttcatcaaccgctatcgcgatacatggccgcgcgcaatttcgtgcatggctgccggaatcataacggatctgaagccgttaatcagccatacgtttccgctggaacgagcggacgaggcgctcgagctgtgtgctgacatggggcggccaagcattaaagtaacgattgtggatgagggcgatgcgacggtgtagctcacttgcttccaagcagcaaaaataacgaaaattatcaatagacaaatagatcttatccagtgaagatggattaaggcaacgcataatcgacactaggagctgccgccttggaaccggcgttttagggcggagaataatatcgagccgcacgcagtgcgattatcttcgctctacatttctaggacgtatattgagcccgtagcttcgtcttgaagatggggtagcgccaaacagtagggattgtaccccaagtagacaatacatgccagatctacttcagagtcgtcggcaccggcgctatgcgcttcttgctacgaagacatactttcagaaagacatacttccgggttactggagccccagaaaccgtttaggtcgctcaaactcggtatttggcgttgacaaacatacgacaataactagatgtgacctcagggtttaacaatagggcagaggaactggcgcgtgacccgctttgccctaatatccccagtcctagcagtacgagctcagcatttctttctacggctgtgatattgccaatgcagtaattatatgagttaatccattgctggaattgatcaatactcgctctctgctcccacaagtagattaaacgcggcttgttgagtaagcagaggataagtggttcgatagataaaggatatatggaatagaaccttaccttaacggaattccaacgaattttgatatagtcttgtcagcttatattagggcctgaacagtactacgctcttactttgaagcactataagcttgaccttgcgaatagactcctctctgaacccgacgtacccagcgacctaccggacagcaccccgtacctgccatcaggccaagtgctttggcattactgtcgggaaactttggcttagctactccaattttgaaattagcgagtttcagttattctacttcccttgatcggtagctgtgcactcttccttcgatttcattcatttggccgcttccccactagaaggtcacttattcaagccgaagcacgccccaaagatttcgagcaggtatagccggtttagtngaaaaaaa

SEQ ID NO: 4691 - DNA, 2694 bp, Emericella nidulans
gagtgggtagtaaggggaggagagaagattgggtaaagaatttgaaatgcgtgtgagatagtaaaggaaagaggttggagaatttaggtgggggaaggatgaagtgatgggaagagaaattaattgaggagtataaaagtagagtagatgaagatagaatggaaaagattgatgaagaggtggtgatataagagagtgagagatgaaaatgatagtttgagaagagtatagaaagtgataggttgaagtgtgggatgaatagatgagtatagaaataggaaagtgaggtgtcagaaagtatgagattatattgcagggaataggaagggtgaatcagagagtagaaagcgaatgggggaatatgaaagcgtgggaggagaagggggatcagaggtaagacgaggaacatggaagtagatattaattgtagacgagaaaggatgtggaaagtttcgacgtagcagtgtgaaggatttttctgtagcgaccacagggagcgtgggtttgagactgtattaaagttgtgatagatgaaaatgggcctcagaagaatttaatctggatcggtatcggtcatctgctcgtagaccggtgaactatatagcaagtctatttagtatcagcaacctgtgggtcggtctagattggtgttagtgccatagtgcccatgcccatgtgcagtagtccatgagcgatacgcaccactaataaagagttctggtgtagatggtagtaactggtcaggtgcctctatagatgcgcctaacgcgagttcttcgcaccggcaccacagagacccatggcgaaaatggcattaatggcaacatcattatcattgtcgtgactgcacctcgataaagtgtcgtacaccttcatctgagggttacttgggctgataagacccatagcaagaggaaccgcctttcgaatgatgctagcgccgtagtgcatgagatggccgaactgtcgaagaatcatatcctgaccaacatcttctcccatcgcaatcaacgacagacctagcacggcgtaagattgcacaagctcttcaccctgcttctcatcactttcctcaatgacatcgttgcagatgtggagaagctcctgcagcttcagaacggtgccggtacctgcccaagcacagacggaggcgaggacggacgtaggcttcgccataggatgatcgacagccttgaggatgtcgaggatcacatcaacttcttcctggcgaccgaagtacaaaagcgctagaccaagagccatgaagcgagtccatttatccttaagctgcttctggcgctcctcgtccatgagggtggtagcgattgcctcactgacttggtgattcgatgacccaacaaagacaagaccaagtgagacagccgccattgcggagagttgcatatcgagagatacatcttccacgataggcagtaaagcgtcaagaatttcctgcttgttggacccggcgtacgctaaaccaaggcccatgattgtggcaactctcatgggaatattctttgcctccaagttctcgttgtcacacagaagggccaacgcggggtcagaatcaaggcgcacgcctgaattgagtattccaatagacaataaagcaccggccttgatctgatcctcggaggcgtacgtgtacttatcaattttgtccaaaccagtgtcgacatctcggtgcaggagcatacccattgaggcggtggtagacaacatgccatcatcctttgtcttccaaacccaagaacccttgtcaccttcgacaatcatcatctcatcgttgccaaaaccggcatttgcgaatgcattgacaaaggcacttgcaagattatgtctggcagagtcgacattggtgaggcctgctcctcggctgctttctaagtgggttttgtagatgtcttccggcataattgggtcgaggatgttcagttccttcccaagcgacttgaaatgctttgggatcgaggtgttgttcagacactccatgaaagtctcgtcctgctcgtcatcgcccaagtcatcgagccatatttgttgcctagaaactaggaaagccatctgtttcttgagcgaccgatccgacgtcgcttcaaggtcactcttgatgaggtcaacatcgtttaggcggatagcgagcacaatagctttcgtgagctccttgtaacgaacgtagatttcgtgtgccgtccggaggaactggtggtcctcggggtaggtaaggagaggcaccatgctgaccatatacaagcaaacccttgaatatgtgttctcatccacgaactgaggaatctcctctataatctcaagttcgctcataagatcaacggcatcggcttctgcattgtgtctaaggaaatatggaacaagcgaaaccgcgagtttgatcagatcgtctacttccttttcgtcgtttactctgttctgatattcctggccgatctccaacgccaggtgcctgacgtattcgtggccccaggaaccgaggtcatccgatttggtgagaagtcggtatttgagcgtttcgagtttctcttcgtccccgtacgtcattccgaggacagaaagcatatccgccaacgaatcctgaaaataaggcaaaacatgagttttcggtcttgtgtactattcgtcctgaacccaccttggttgcgccggcggaccacttgtcatagacgccgctagatc

SEQ ID NO: 4692 - DNA, 2945 bp, Emericella nidulans
ctccttttgtgtcgcggcttggtggcgaatttgtagtcgttatgttgtcgattagagcgcctttcaagaagattggatggactagactggcctagacaggaactgaggctatcagtctccatcccacacctcccacaaacctcgtcctcattatcaatatcctgagcagcatcggtaccatggggtcgacttccctgccgcagccgacgcttgcgaactggagcaaaacccccaagttcgatcagagtcctagccgcagcggaatctctgttggcgattttcgtcttttaaaaatattcgcctcgggatgttcaactgagcctcaccgcgaatgaccatcagtactatcgtcttgggtatgatcagacagcgtctgactccccgcagcgattcgccgtccagatcatactccctagacgtgttattatagctgtcattttcaatcatatccgtactcaagtcagcatcggcaaatgcgtcctcaccatcgttcccaagcatcatactgagcggctgtggcagtaacgtctggagctcacccttttgatatccctgtctaccggagtcctcctggcgtcgccggtgcggcttcgactcgctcgccacatactccccatcatctatgaacatcggaaccggcctttctggtgacgagaatgagtttcgagttgaacccaggtcattatcgccatgtccaggctcaggttcaggctcattgtctgggttccgatatcgatacggatgggaactctggcgacggaggtgcgaaaaatctctgctgtcgccgagccaagactggcatggcatccagcctcaagtgcggctgaggttagggcaaggcaggcatgtacccagtgttgggacgatggcgggggagggatctgcattgtaaggtaggttcgtctttagaatcggagggggttgcgcagtttcttgcgttggcttatcgttgtagcgatgatacgccatggttctcgaatcgatatgtaagtcaatggcgtagttatgttagcggaaaggactagtcgaacagtgtctaatagatatcatatgtatgtggtagacggggtcggtctagacagcctaagaatagaccctgagagatggaggaggaaagaggaagaacgaagccaatatagaatctatactagttcaaatggcaaccatgtaattgtcttacgtaggcaatatagtacaacaaagaaggcaagtaagtcgatagcttgagaatccgagaaactttgtgctgtagcatgtttgctggctgtgagaatagaaaaaaaaaatcaaggagggaatccaacgcctaaaatgcatctcgtccattcgtgcctcatgctcattccactctaacctcgatccaatctgaatttcccgccacatcatcgtttccgtgtatgtatgtgctgcttgcctaagcttttgtttgtaatgtctagccaagttatactttgttgtaatgtcgtgtataactcttgttcggaagttttctctgtctgctgagatcgttccgtcgctcatgcgttgctggcttgttggttatgctgcatttctttatacggcatacccagtgggcctaggtacgtatttccgcattgcccgactagaactgaaaccaacagacccaatatcaattgaattaagctctcggctcagcgcgtcctgaactccagtcggtgcgccgatgggcactttcgctggaatgggagggccgacaggggcgggtgcatacattggcgatggagagggagagatcgagtgcctacgtggcatgggattcgacgacggcgtgctataagttcgtccatgtccagaattgctgccatacccaggtcgtccgcggtcaccgtccgaagtggagacgtacgaagatgtgggacggggcgctgcaggactatgcctggtgggcgcgttccgaaagcggacaatcactccaggtttgcgcgatttgcggtctggctccggcgcccatgtatctgtaggcagatggtcggatgggtcgatctcgcggccgtcgtcgccaataatgggaccctctggtcgggctgcagcggcctcgctccgtctcgcggcttccatggcttccgcgggggtcgtgtacgccggcgctgggtccctattcataacagagcgggcagcattcggattgaaggagtcgaaagagtctggcgaaaatggagtctgagagactgaaggctgagagccaccgcgacctctggaaggaggtggcctagggctaaccgatttgcgtagaacaagctgctgcgaaggagcttctgcaatcacggatcttcgactgacaagtgatcggtggtgatcttccgcagggagattgtcggggtaaggtggcgatataggggacggggacgggtcgcggctgcggttgggtcctgggaggtgttcctcgagaacaccactgcgtctccggatctcacgcgcaaaccgctccgactctgcctcggcaactaccggatcaagcccagcgaccaggctgggcggcatagacgtgctcgtgactggaggggggtccagcatcagctccgtaggctgggggagtttcatgtcttgggtcgatctggggccgtactctggagagtaagctttgtacgaaggagctggtgacggtactaactgcggactagggtgagccattgctgtccgatgaacaggcggaggaggtggtgctccctcttcatcttcatcttctacccgcggctgcattgaggcatactctgcgtgatagcggctcgggctgcggccacgcctgggaagcgagttatgctgccgataaggctcgctctcctgggggtattcaatgcgatgacgtgaagacatgctactggacgcatcatgataccgagcaggctgaagttcttctggaacataagagtatgcgtccgggggatgctgattgtaatgacggctggttgtcgcctttaactctt

SEQ ID NO: 4693 - DNA, 1008 bp, Emericella nidulans
cgtacaagatccccatcgcgtcgcagtgggcattgccgctggtcatgctgagcctggtctactttgtgcctgacccgccctactggctcgtacgtaagggccgtacggaggatgcgctacagagtcttcgccgtctggctgctagtggtgtcgatgtcggccacaagctggcccatatccgcgagacactgcggctagaagagagcttcagcttgcaggggtcgaccaggcccagttacctcgagtgcttccgcgggccgaatctccggcgactgacgatctgcgtgatggcgtatagcatgcaggcgtttacgggaaacgtgtttttcatctcgtatgcggtgcactttatggaactcgcggggctggatgcggccgatgctttctccatgaatctgggactgacaggcgttggattcctgggcacctgcatctcctggttcctgctttcctaccttggaagacggacgatgtatctgttcggctgctgctcgctggcacttgtgctcttcgccgtgggcgcggtggacctcgccccccggcaggcggcagcgagatgggcgcaatgtgcgctcatgctcctctgcacattcatctacgacctctcgctgggacccttctgctatgtgctgctggcggaagtatcatctgcgagactgcggggcttcacaattgccttgtcaacagtcgcctgttttgtgtggagtgttgtctttgcggtcgtgattccgtatgcgatgaatgaagaccaggggaattggcgcgggaagatggggttctttttcgctgggacgagtacattgtgcgcagtttactgttactggtgcttgccggagactagggggcggacatttgaggagctggatgtgctgtttgagcagaaggtgccgagtcggaagtttgcgagcgcgacggtgaacatcaatctctctacagacgaaggctctcgtagagaagccagagtataaggatagaggacgaaaagccattctagccttactatcatta

SEQ ID NO: 4694 - DNA, 2510 bp, Emericella nidulans
gttattagctggctggtgccagtgctgcgctgatcccgttcttgaagaatggatgtgtacaggatccggtgtagctggacctcgttgagtgggatacaggtctcggtatccaatcggtcagtgatggactcgtgttcggccatgtaaccgatatcatcgatgattccgaggtcgactgagcaagcggcgaggcctttgctccggcggtagagggcaaatgagtctaaaaatgcactggctgcagcgtagttggcttggcccttatggcctacaaggccggagaggctggacaagagggtgaaaaagtcgaggtcgagtccgagttggagcgcaacatcatgcaggttataggttccctggaccttgcagcgcagggcatcgtggaactgggcagctgtcatggaggtgtaaattgtgtctttcagaaccatggccccgtggatgactcccgcgactggcgggcgtgagcctttgcagaacgctttctgaacatcatctttgacggacacgtccccgcgaactagactgcagttgacgcctagcaaagtgaggtctctcagaacagcttttgacttatcgtctgtgtaatcgctgcgggacattacagatatatgctttgctccgtggcaggccaggtatgttgctaggctcccacagagacccttcaagccgccgactatcaggtacgagacatcaccccgcagcttgagacttttctgcacgggcatcactggcacatctgtgcagttctggggcgcgtctcgagagatgatgattttaccgatatgggcaccgccccgcatgtaacggatggccgctgcgatgttgctgtacgcgtagacagtccgcggtgcaatcggccgaatgtggcctccgtgtatcagatcgaatatacgctttaaaagcctatgtacaatattagtgtcaccattcgatcgcgacgttcttcaagccgctcaccttgcaaccaaagggcgtgtgatgctcggatgcgacaggtcaaaggcacgatacgaggcattgcgattgaagggttccatggaaagactatttcgatcaaggatatccttcttccccagctcgaccatcgtgccgtgagctgctatgatgcgccatgactcgtctagcaagctacccgttaaggtgttgaggataacgtccaccccccttccgccagtctgctcgataatgcaagatgcgaataccgtatctcgagacgagaagagccggtcgggtgataagttgaattctctgataaggaattcccgcttctcgtcacttcccacagtagcatagatctccgcgcccagatactgacacaactggatcgcagcaataccaagtcctccagctgctgagtgaataagcacagactgcccccactggacattggcaaggtcaacaaggctatacagtgcagcctgatatacaatggggattgtagctgcttcttcgaaactcatccagtccggaatagcgtggataccctcgatgggacattgcaccctgttggcaaaactgccccgtcgacaaatagccaccctctgcccaatgtaaaaggggctgtctcctgcgtgatgcctaatgcgccgtatgaccccagctccttccaatccgagcaggtactggttttcagggacgatcccgagaactgttgcgacgtccttgtagttgaggcctgctgcgtgcatctccacctcgacaaagccgtctggcacaacagcctcactgggcccagtttctgtaaattgtagtgattccaagaacccaggcgcctggcatgtcaagcgaacacaggaggcgtggttgtgaaggttttggatcacggctttgccatcgcctccgcttgcaatatcagggtagactctactcacatgaacgatgccgccgcgctccacatactcatactcttcatcaaccagaccacttgaggtgtttccattgtcaactctctcaagcacgtcagcaatcgctcggaaggactttttgctatacggagattctacgtcgaggagagtgaagctgatagttggatcttcggcccggacgactctggacagaccagagaccagagcctggagtggactgacaacatctttttgagcaccggaagtaacccagacgatcttgcaaccaaaggcgaggattcgctggatggctccccactgctcctgcgtgacctcggcgagcaccggcttaaacatttcatcggttattagtatgatcaaatcttttcggatttctccgagcggtagataatggataccggccactgtgactccggactcagcaagcatctggctggccagagcagaatctgtcgagctcgacagaagaaccaggctgacctggagttcagcagagggctcgcgaacgggcaacaacaattgacccacaatagcgtgtgtttcagtacccatatcaaacgccactgatttcttgaacccatggcggccgagtgcatcgttgatgcttgccgagtgcccgtcccaaggccgcgcctggacctg

SEQ ID NO: 4695 - DNA, 2834 bp, Emericella nidulans
aacaaaaatttagagatataagaatggaaaagagaaaaaaaacaccctatctttctccccgaagaggccgccccacaaagggagaaagtttttagacaaaatcccccgagaaggaaaaccctttattttctctccccacggttggccctctaaaaacccaggggaaatcgggatttgaaacaggaaatccccatatggaatttttgccccccaactaaataccctcctttgggggaggaacaagactaattcaagggccccccgccagaaagcccggggcaattccccccttcgggcctcccaaaaatggcaaataaccccttgttaagtaaaaaccttgatggcccattggtaattcatattccgggaaaatcaacccccaggtgccatcctgcattaaacaagggattcaagggctccaaagggggaattaaagtgtgttttatattaaacgggttctggcccgttttacacaccgttgtaaaccagtaagagtggtaaattggtctaaaagaacggaataggctggttgaatcaacagggctcattctttgggcggtgcggggtttttcccaatgagccacactgcctcccgttggaatccagccctgcccttgtgagcttttacccccgcgctttgggattggggctcccgcgactgttttcttattaggtggtcggtgcaaaatactcttatacttgttgactactccgtaggttgggattcgaaaacaacttaactcgatttgcggcctcttatggccatcgattacgttctgtagcccgcgatcgcgcctttactgcagtattcggcaagcacagacatttcgtcatattgacggggttgatggggcttgcatctgtctcgatcagcaaagtgagcgctcgccgcgaagggcaaagctctatatatagtggctggccggcgcgtctcaaaaataccaagtccaatcaaacatcacgttcgcggtagatcttattatggcatctcaaagctagcggtctgtgtccagtggtggttggatgctcctggttactcgggcttgggcaaaagcgtagcggccttgagagagattgcccgagcgatgatagactcggagactcggaagacggcgagtttgaaattatcacggactgcgatgaccgcatgcattgaaagttcaaacaagcgactccacatgaaaccggactagtgcagcatgccatacgtgtgccaggctcggttcaagatagagttatggggagcggcgaagtcgaagcgatccccgagcactctcgaaagtacggggtacaaacatgtgatagccatttcggcgtattcgagaggcgaccgcagagcatgatagcaacattgacgagactgattcgattcttggctcaggtctcaggaggtggctgatgagccggttcgattcagcttgtctcgctcgagttggagtctgagctgcaaccaaaccacggaagtcgaaaattgaactagttaacttatggtaacgagcttgaagcactccttagtgaaggcgcttgggacgaacttggattggaaagattgcgcgttccaggttaatggaccaggatgccctggatgttcagccggaaacccctatcgtagacgggcgaaaactgggaacaaacaggcccgattgacaacaagcgcgactgactttgacgcgatcctcgaatcaacgcgcgtaaatgactttttcggagtcgctgccaagggccacggataaggcttcagctccagtattaggccaggacccgacgtatgtcatcattgcatcgaattgacgcggtacgtgcagctcgacttgatgagcctcagtgaggcggagccattgctccgatttggacacggatttatatgtaattgagacctgaaagacgctttgctgtagtcgcgagtaattggaacctgtaaggacgatctgtgatccagagcccagaacggagagtccgaaagcccgaaacgtgggacgcgaatcaacaatgacgccatgggtctggtcatgcagccctggacgcgctgcaggatctatctatcaattgatcaactcttctgccgttccttctagtgggccattgaatcatgaggagtcgtctgcagcctgaaagatatcgaaactctgaactgagtgcctggtcgctgggtcttgctgtccttgtgagagattgaaatttaagagcgaaggcgaatccgactttggggttgagtgggggcgtttatttaccacgctacggctggctccgccctctttttatttagcttagctcgttactgtaaggcaaagtgtcattgtactctgtatgtatgtatggaaggtcaccgttacttacagtcttcgaaccaagttagttgtcgactccatatttgacccatctggatctgtcaactcgaccgcgaaacgatcaaaagacgtttctatccctcacctgcggttgggcatctccgcactgcgcagttttggtacggctaaaaaatcttctttatggagaggttcatgtgccactttgtcctcagcaacggcgacagtaaccgcgacaacaaccgcgacagcgacccgggctgaagcaagaatcgggaggaaatagacgacgggatagacccagcagaggtcagatgccattagcgaatgctagacggcttatgatgatcctttgggacgctaggttgcgttgcttgcattctaatactacagcgtaaacggccttgtaaagcaaagtaattagattgaaccctctttagcagcatatcccattaaacagagaagacttgtctctccagtatcggtcatcgctcgtcgtccaccttcatacggccgagccggcttctg

SEQ ID NO: 4696 - DNA, 4910 bp, Emericella nidulans
gtaacaggagcctccaattgggcccagctgagctcggatgaacgccagagcctcatgaaggttctgtcctcagaggtccaacacgcaaatgaggatcaaagtggtgaagttccagccccgttgtcatgtctccgctacgtttacaacaatgtcgagaatctcttaacctcaacgaccctgtccgacgaaactcgaagccaaatcgagcagtatggcgcatacctccattcccagcacgagcggagctggggccactttttgactttattgggccatacaaacccagcgatgcgcatcatcgaggtaggaggcagtgctgggagtgtcacaaggagtatcctgaagcacttgacgtcaccggaaactgtgaggctatactcagcgtatacatttacggatgcatccgcggagaatgttgaagctgcgagaaaggcgtttgcggaggaagaaattgactttaaactgcttgccatcgagaaggatctaggagagcagggttttgagaaacatagttttgatttagttattgcatctaatgtcggtagttgctgtccctgcccggtcttcaggtaacggcgtaaccaaactgataatcagcaggttctcagaggcagaaggggccagctggagacatcgctcaggaatattcgggagttgctggcgccgcgcggtagattaatgctcaacgagctggatgaaggtaagtcgagaccttcaattgtctgcaccgctggcgctgatatgatcaggacatcttcctacagccttcgtcatggtaggtccaagcaaatcgtgaatattagtcccttactcataaaccaggggcttctgccaatttggaacaggaataaagacgtgatcccagtacatataacgagagaagagattgatgcagcccttcgctctaccgggttctctggaattgaagccatacgcagggatatagaatcaccagacagcgtatcgctaagtatcttgtcgagccttaacgcagagatcccaaaaaaaaccataacgttattagtaaaggcggcgatcacctattccgagtcctgggttgaactgctaaaggggacgctggaacagcaaggatacgaagtatgcatctgcgatttgcaagctggtcttccagttgaaggggagtacttgaccatctctcttcttgatatggatggtccatacctccatgacctgtctgaagctggatttacttccttgcagggcctcttggcagatattaagcaaccgattctgtgggttacggggatgtcgcagttccggtgcgaaaacccacgttacggcttagttttcgggtttgcacggactatgagacacgagaaagacgctgacttcagcatcttcgaaactgatactttcggtgccgagtcagtgaaatcacttgtgtctgtggtcgaaaagcttctgtggtccagggcagatgcagaaacagacccggagtatgaattcgccctataccagggcacgatctacgtcggccgttgtcactgggtctgcctggcagaccatattgatagtaactcctcaatgaacctccctagacaactggatatcgaatcactaggttcaattgatacacttcgctgggcaccgttcgagggcccgccgttggaggaaggccaggtcgaaattgagatgaagtatatcggcttgaatttccgggttcgacacctgcactttcgtgtcagtacattattaacggatgatatgataggacattcttgtatcgcttggcctcttcggcgaacccaatgagttcggtctcgaaggaagcgggatcgttcgaagggtagcaccgggtgcaatacgagacctgaagcccggcgatagagtcgccctgttgacgacggggacttttcgaacgcgcttcgtcgtgcactcgcggtattgccttcggattccggatcacatctcgcttgagggagcggcgacgatgccatcagtctacatcacggctgcgtactgcctgattcatcttgcgcggttgcaaaagggcgaggtacggctgcctgcgtgtggatctagagtgatcttctgaaactaactctctcagtccgtactgatccattcagcttgcggaggcgtcggtctcgcggctatccgcgtctgtgagtatgttggggcaaaggtatgactccgtttccctgaaccggcaaggcagctaatagctcagatctacgccacggtcggcagcgacgagaaagtccagtatctcatcgatcgcttcggcataccaaggagccgcatcttcaattcccggaccccagacttcctccacgacgtgatgcgcgagacaaacggtcgcggcgtgaacgtcgtgctgaattcactgactggtgctcttctccacgcatcctgggactgtctcgcttcgtttggtcgaatgattgagctgggcaagcgggacttcctgagtaacgggcagctcaatatggggccttttatcaagaatcgctcatatatgggattcgatctgacgcagtttggaaaggaagcttatcatacctatgagtcgtacgtacagtccgatcagattctcgagctttcttctaacggtttcaccggacagaatgcacacccagttcgagacactcacagcagagaacgagctagttcccattcgcccagtgagagtgtacgaggctacagacgttatagatgccttcaggtacatgcaacagggcgtccatatgggtaagattctgattagagtgcccgaaaacccctctagcctctctgtctctccagggaattcgccattctctcttcgtccagacgcctcgtacctgcttgttggtgggctaggcggactgggccgctcagtatcgacatggatggtggaaaagggcgctcggcatttggtgtatttatcacgctccgctggtctctctgaaaaggatcaggcttttgtccgtgagctcgaagcgcaggggtgccaggcaatctgtgttcccggtgacgtgtcggccattgcagacgtggaagctgcaatatctaagtcttcgcaacctcttggtggcgtggtgcagatggcagggtttctccaggtactacgctgaactggtccatatcaatggctctgagactaatgagttcaggacgcaatgttcgacaaaatgaaatattcagaatgggagtcctgcgttgcctcaaaggtccagggaacttggaacctccacgagacaacctcttccagcgccctcgatttcttcattgtcgtcgggtcggttgccggcatctgcggaaacccaggccaagccaattatgccgcggccaacacgttcctggactccttcgtccagtatcggcgagatctcggtcttccagcggcggtaattgatctgggcgccatcgatgaagttggcatgatggctgctaatcaagaggcaatgcaacgtgcgcaagcggcgtcagtctgcttcccaagcgagcaacagttgattgaggggctcaaactcgccttatcacaatgcgcagttcccccttcatcaaaatcacttctctctacctcgtgcatcgtcggcctctcaaatacaaaaccgctctcgaacccgagcgtccggccgtactgggtgcgcgatgtccggtttgccatctacaagaacctcgagtcaagaagcaccgaggcagtccagggaggtcaaagcaacgaactccgcactctcctccggcgcgttgagcagaacccctcgctgttgaacgacccggaatcggaagagatcgtgcgccgcgagattggcaaccaggtgacgcagcggatgccgcaggcggagaacatggatgaagacgagattgcgaatatcacgattgactcattgatggcgattgagataaggggatgggcgagacggaacctagggctagagattacgcttgtacagattgcaaaggcgaagactgtgggagggttgacgagggcggccgtcgatcatctgaaagccaagtatgggatgaaaagagaggacaatgagaacgaggctagaattggagatagagacggagaggattaggggtctagtgcagtaagggtttgtggttgagggaaagtagagagtaaaaaagcataaaaatatttaattgtgagaggtcctgcccgggatcgaaccgggattaccagatgtgactcggatagatatcagagtctgatgtcataaccattagaccacaagacctgattggttgaatagccctgaataataatgaatgataggttatgattataacttctgtcaatttatacctttttatccatcgcaactcctgtagaccactccgctgcaccatcacggtctagtggcaagcttgcccgaaagtcgtccacattcaagcttcttccgtaacgtctacttgcttaagtatgattcgatcataatgtgttcactttgtaggtatttgctttcagcgcggcgacgatatatatcgacacgcttctttcaaggaaacagcccacgttgatatgttgaggcaaccgacggctcctacaaagatcaccccgttctatactcagatacacatagacaaccagaaaactactcataacgccagtcccgacattcgacattcgccggaacctgtctcctagacaaaccgggcacactgggagaggcactgggagtcaatggaaggcctccaaggtgaacgctctaaatccatgagcagactgaggagctaaccactcaccaattatcgaggcaaggggacttcgccggagccgcatcagacagtcacactttccatcacaatataaggcctttatcaaaccaccaccttttggcttgcaactaaacgaagcattgagtactcgccaacaatgctgccgggggttttaaaacatccaatgggcgactcttgtgtgatacccgtggatatgaaaccgggcacacagctcatat

SEQ ID NO: 4697 - DNA, 3541 bp, Emericella nidulans
agtacggcgctcgaaaaatgtcagaaccagagtagtcgaggctgacatggtacctgttattgcaaccattttggacagctatatcaaagtaatggacaaagtgcgcgctcgatcggattccgaagctcaacgacacaggcaccatcaactccatcacaagataactcctacggcgagcgacagcacaagccgctcttcattttcagacgcctccagcaacgagcagcgcacctctcgccgtcaaccacctcccactcacatcgaaatccctcccttcttccatgatacccgtgcggtggaatctaatgctgctgacgtcccctctccgccgcgtgcaccaatgacttcgccgcccgagagaagcacttttggtcaggatacgtatgctcatcgatctcatgcacctctccggcacagagcaattcagcccttggcaacagctattccttcaatggacgctgctgatgggtctggactacgccctgtccgggatacggagaggcttcccagcatgcttcccgctgcttttaatgaactcgcatctcagcccgactctcccactactcccagcggcgccggacacatccgaagcaatgtacacgttcctattggaacacacgcccgcccaccactgagccagcatcaatcaacctcaggggactcagatgacgccaatggtgaagactctataatggcggatgatacagggtcgggacaatctaggaggcctattatcggtctccagagccgcatggatatcgacgatgacgccgatagacagactgtgatcgatagcgttaccgactcctcccacgatttaacagtaaccgataccacttcagatgggcaagaatcggagacattcaacattacccaccgttccgccgtcgatggcagtataatcaccaatgataacgcacaggctgtgaacaatgcgaactctccacctattgtgcccagcccctattctctttacttccgtgatcggacaaacatcgctacccagaatttcttgaatacgatgccccgcgaggaggacgtcctgatgtcgcttcagcttttggcttacgtttccaagtactgtaacctccgctcatacttccaaaactcacactttgtgccaaagctcaagatcgaccgagagcttcgaatgctggacgaaggagcctcaccagttgaactaattgaagaggaagacgagtacctacttcctgacgatgtcaacatcttccctctggtggagaagtttaccgctcgccaccattcaaaggatatgtcatactgggcttgcgtggtgatgcggaacctctgtcgtaaggacgagtcccgaggcggtattcgccagtgtgcgaattacaaatgcggtaagtgggaagagttcacacgtcaattcgccaaatgccgccgctgccgtcgcaccaagtactgcagcaaggattgccagaaagcagcgtggctctaccaccgtcactggtgcgccacgccatgatcggatgaaaatcgactttaattccccttgcatacggcttgcatagcgtctcgtcgttctcattttactctttttatgctcttttttaccttgaggtctcatatcttcccgtgcatggcattcggaacctggcggtgttcctatttaccgagagataccttttgtatgtcatttcttgcaaacgctgcttttgtgcagcttcgatatccctttccagggccgtttcatttacgctggctacttcagcccgtttcttacttatacgattacccatagcggccatgaacgacatcatcttcagttatctgtcttacttgtctttttccgagctgtcctctctggctcgcactccgtacagagtttctaatccaccgttgccctaacgtcggacgattttcctttgtcagtgtcattgtcattcacattagcttcattccccgaaactcccggacgttctcattttggccggctttttgctttttgcctttttgaaattattctcccattggctattcttgttggagtatttttttgtccaattgtggaaactttacctgtccagaacagtttttgtgtttagcatccaatggcccgttgcatatactacttagcacttgcaattacatagtaactcattctatctgctcaagtacattgtagacgtcaaatacgcagagaaccgtctcctatgcgacagtcgcttcctgcctaaagtcataagtcgcattcaaccgcattgcgagatgctccgccgccgtgagcgttctccttccagggtcaagattcccagctcccccttcaaatcctactctttcctcagcgtccacaaccttcttcttacggtaagccttaaccacgtcactcggcacaggaaccagctccgtagaatcaaccggatggcaaaagataacaatgctgtaccgatcctgtgaactattccctgtgcgttcttgagccggaaatacaactcggtgcacagtggacttgagcaaaccgtctgtccaatagcttagcaggtcgccgatattaaccaggatgggcgggaaagcaaattcgttgttaacgtcatcaccgctcggactcggccttccaggctctacggcaacaggcgcccatgtcccctctggcgtgaggatctccaatcccggctgtccaggtctctggaatagcaatgtgatgctcccgtagtccgagtgtgcgccagcacgtacgtcaacagtatggtcgtagtctgctgtctggggcgcagagatggatgggtagtatagatagcgcagtatgcaacctgttgggcccctcattggatcgtggcgggttaaaaagaatgagggggagatctggcagggtcaactctcatcgctctgaggagctgggaagggtagggtaattgtactttgaggcctagagaaagaaggctgagaatgcggttgcaggtctttgtgcagagggatgcaaagtctgcgatctcagcttcatggggagctagggccgggggaagcggctgttgagctttgccttccgctgtgaattcgccgaagttgaaggctctagcaaaggtttatggttatcttgtattcgcagtgtatatcctgataggtagtggcttactctttgaaatcgcccgtctatataccgttagtatcccgtacttggccttgaggggatctagacctaatactaacccgctgatgttcaggatccaaagtctcagaatgcatcccagaccagccgcggttctagagaaaggtcaatggagtccaagatcccaatcgggtgatacgaacgttcgattgaatccgagaggcctccttctcctctactggtgacgcgaagaagctcttcgactagaagacgttggctttctgtatgttcattagagtagtagagatacacacccgctcaaatgctttccgcacatcttcagcggtgaagtcggtccctttgctgtctacatatagaaagccgtatttggtggcggcgtctagcatggcctcgcccacagccggatcctagtattctatagtgtcacctaaatcgtatgtgtatatcata

SEQ ID NO: 4698 - DNA, 3244 bp, Emericella nidulans
ggaatccacagtttgacgtgcatacctccgtgcagctccaatttatgtttgttaagacttaaagggagtcccccaccgaaccaaacccaaccgtcagcctttactccacctccagctccccaaactcgacaacctgtcaagtgtcaactcgtccacttcagttgaactcatgatccacccttcatcaagggacgatcactctgccgattgaacccgaatcaatttcaaggaggtctcgatgtcgtctgcttcccagcccgacttgtcgactccaaccacacccgccacctcgacctcatcatcaggtaccgaccctccacacctcaactccaacgacaagaagagctccagcagtacctccttacaccaatccgcggcctcctacttcacctacccagttactcacgtcgtctctgggctttaccgccgactgaccgatcccccaacaacaaactccgccaactctaccagtaacaacatgatgtcccgtctgcgccgccaaaaccccaatcccaatccgaacccttcctcctcgtcctcctcgatctcgtcgtcctctcagcacccggtcttcacgccagtccgcacagtttcgcccttccaaccgcccccactaacacctctcaccctccttgcgaacgaagaaaccacaccaatcccgctcgcgccgcagaaccagcttctctcccgtgcccttgcagaggaaatccgtcttctcgtcccgccgcgcctccaattggtcaattcctggcgtttagcatatagtctggatcgcgacggcgcgtcgctatcaacgctctacgagaattgccgctcggtgtcagcgcgcagtccaagggctggctatgtcctcgttgttcgtgacgcttcaccgtccgcatcgacaatattcggtgcttacatgacggaccccccacatccagactcccattacttcggcacaggggagtgcttcctgtggcgggcgagcgttctccgcccgcctcctgcctcgctcagtatggccgacggcgatggaggcgtatactccgaggaagctttggaacgggcaggactcccaccgccaccgagcgcggatacaacgaacgttggtaggtccacaacactgcggggtgagaaggcacagccgaaatcgcttgcaccgcatacacatgggcttgctcaaggaggggctactaatagcggaactacaacccccgaccgaatccgcttcaaagcatttccttatagtggggtgaatgattacatgatgttttgcgagacggggtttctcagcttaggtggagggtgagtttgaatccttcttttacaatctccaggaatggcaggaggagctaataaattgatctgtcagagacggccactacggtctatggctcgattcaatcctcgaaaagggtgttagcgcatcgtgtcaaacattcgggaacgaaccgctctccgatgagggagttaaattcgatgttcttggcgtcgaagtctggtatgttgggtcgtagctcaactgttcttgggtttacgtccgctcatcaccgctttggttacttaatatccaatgctcttggacgatatggtgagatggaggcgaatatctcaaaagatgacatgctgccacgcggcattcactactagtatataatcaatacccgggcatgatacggctggtctccgtcatgtcttgcttttgctgtttgtttaatttgaaaaaggttgggtatttaattgatagggagatcaacgataatttaatgagcaatagaatgagaaggatggcttgtcatgcacgcttatgcaggtagatgatctcggttgtacagcagcatagcttattgtagatatacactgccattctttctagctactagctattgtgtggtactatgttccaagcgacatcagcctcaaggaatattaaaaattacaatgaacataggaaaatggtagaagaacaactggaatgtttagaaagctcaataataagatattacaaacgacaggggtatgcatatgtcaagagcaaatcacgtaatcatcaggacgtggcagacgtgaagaacaaaagaaaatccactaataaggtgagttgacgatatcatccctcccgagccggctgccccagcgagtggcgcgacggctgggcgtaaccgggccagcaatactctcgcgggtaggcctctgtagagccttcctggcaaccatgttgacctcatttggaagcgcaacaatgacattcttatctgagccaaagcggaagttgtccgccatcacatcctcggagtagcgcttgatggtgtaggggtctttgcgacctgcaacaaccttcttcaggctccaagtaacgatgaaaggccctgtggcggtgacaatagaagtctcttcagtgtcaacgccagtgttgaagcgggctggcgtaaatgagataggtttcttcgtctcgtgttggaattgcgccacatgagcgggtgttagaccaagacgccgaggttgcggcttagagtctttggcaaaagaacgctcgaacccaagcttgccttcgttcttgccatccttttgcagagcatcgatgaggagtagatatgtgcggcaagtagcaagaacccatcggccgtcagcagacacatctagaccgatgagctaccctaaggtcactacgttcatggtttcagatcctcagaattctctgcgcgaaggtgacgtgatagaattctcctccggatacccaaaaagtcgtcgcgtacaccacgtcgtcgagcgtattattgccccatttggcgaagctattgaggatagaccgcccgttctgtcaagggcagagagggatgcaatccgccttaagaagcgaatggcgaaagcggcacgcagggagcaaaggagggttgagaatggcgctactcaagctcagacctctgtacacggacaagagcatattgggcgtattcgtaggctagttctggagaggacagctgcagacactgcgagtgttgaagcatcggcttagtcgaagcgtgagcggttagaaaatctgtaatatattgttttattatctacatggtttatctgcggggtcttttggaacgccaaatcaaggaaatacttgaactcatggcctacagtatgaaattctacattgggtaaatggagtggtgcaagagagctccgtatggaagggtatatatataaacggggtctaggtaagtcggggtgcaaaggttcacacgtcacaaagctgccaacaaaaagtctg

SEQ ID NO: 4699 - DNA, 2254 bp, Emericella nidulans
gcggaaccctccgggagacgaacaagacagagctctgctttcagatttagagttgaatctgaccaagattttattcttcgcatcccgacgcgagagtcttgcaaagattggcagtggataggtcgcggggatgctgtccgcggtgcatccaagttaaagaagcagcagcgcaggaagcagagccgcgctgcagaaggggagaagggcaatgtagggcccgatatccgtccttttggatggtttgcacttcgcatcgcagaaaactcaactatgcattacacaatggacatggtgcctggaaagtcaggtttttctagtcaacttgatcttgattttcgcgattcgaagatgtcgtcaagcgtgaaccatgctttgttatggtcttgccccaggcaactcatcacttgcgatctctcagtcccgctctcttggaaagcgctccgtaggtggaaattcggcgtggagaaccaagacatggagctctttttactgcgagatcacatattccttctaacggacctgatcacggattggggttctggccccgcacctgattatcatacgttcgtgccattcatctatcatttgagtatatctttcacagatatacggctctatgctaatgtcaatgactcgaatatcgtcagcgaccccactaacctcagtgacaatcgtttgcttgtgatcaagggcaacaaattgacctcggatatttctattccgctggacaagtaccgcgccgagcaaaacgtcgtggatttcaacgtcactctacaggacgctgagatcgacttcgtagccccggtgtgggacacactgcacacgttcttgaagaataaaaaaacagccaccctggagaccctaacaattgacgggacttatagttatttcctttcgacctcccctgagttgacagatatcttacaactcaacctgcatggtatctctccgaggttgtacatgtttgggtttcttatcaagtctttcatgattgtgaaagagaattactttggtgaagagatccacttcaagacacttgaggaataccaagagctcgcgtattcgggagatccgactgcagtacacaatgggatcaacccgaacaagaagacaaatgatctagacgtggttctgcacgtcactgtcgagcacccacatgtctttctaccggagactctgtatgatgatcataattacgttcagcttactgctccatgcctggaggtcgatttgaggtttacaaattactacatggatatgcagttctcgcttgctcctttaagcgccgccctgaaatctcactgggtgaaggaggaccctaaaattcccgagactcagctgttcatagatggcgcctcaatctatggacaccgcatttttggtctgccaccaacagaaccaacatacgtttgcaattgggactttgatgttgggagcattattggcgaatgctcacccaaattcctggcttctctagccagtgccctgcagagcttcgatttttcttttgacaatgaagaaaatgttcttcctcctctctttcctattgctctccatgacgtgacattcttgcgagctcgagttgctttagtccatatttcgattcttatggacattgatgctctcgtacttaagtcagagacaataacggcgaggttcaatgactgggctcatgctaggttttcaaaacgtatgagtcttctgatgccagacatatccattgctgcaattgattgcgcttctcttccaaaatctggcagtgtggatgctcttgaagtgcttccacttgctttgctacagacttctatcaaactgagaatggctgcaaaggagaagcgacatttcggaaagccgaaggcttcagcaggcccatattcgagcccatgatcagagaacccagcgcacaccatggcttcttcttgacttgaatgaactcgagtctggaacacactacccaggtcaggaagaagcacccagacctacaatttgccaaaccaacaacgccagaaccattaacaagagactcaggaatagagggcaagacgccaaaggcgaaaccaaaggacaaaagcagccagaggaggacacaacagcggaaagacacccccaaaagagggagcggaacgaagcaaggaacgcggagagtaaaagaaacacagagaaagccaaacgcaaaggagcaataacagagacaccccggaactgcaaagccgggccgagacaagaacacccagcataggacaagggcaaaaaa

SEQ ID NO: 4700 - DNA, 6551 bp, Emericella nidulans
taggtactaggctctctgcaacggccccagagaaaagggtgatcgtgacaagtcccagagtgagggaggtatagccagcgatggtcagccaataatactttccagtccatctcataataaagcccgcaaacaaagatccggagacaccggcaaagatacaaggcagaagtcgtagcccagccaccgtggctgagacgccgtccatagcctggaagtacagggggaggtagaaaagaccagatagccagccaccaaagctaaagaaattgcatccgtacgcagcgacgaagccgcggtcgaaaataatatggccaggggcaaacggttctgccgcgtagtatatctcgaccacaacgaacaaaacaaacagacagaccgagacactcagtgagacgaccgttaacggcatcgtccaagacacattgctgcctcgatcgaagcctacgagaaatcctagcactgctccaatcagaacaacggctccagggaagtcaatccggcgaagcttggttttccaatgactatcctcgggtgccggcaggtctagtacaactgacaccgagataaatgcaatcacgcacagcgggaattgagcaatgaaagccctaaggtagctatgttagatatcaaaagcaggacacgagtgcgcaaatatcataccatctccagccgatatagtccgcgagaacgccacctgttgcaggcacttgttagagaaggcgatttcaccagagccagggtctcttaccaagaggtgcgccgatgcccgatccagtcgcatatataatgttgataacaccctgccagacacccctgtcgcgaacgaataatatcactcaggaggatgctaacaaccgtggtcatgccgccaccgccaatgccttgaaatacctagaacgcttgatcagcacatataacagtcactgttccaaaaagtcccttcatacgcgagcagcaataagctgatgaatgctttgagcaagaccacaaaacaaacacccggtgccaaacaccgcatacgcaaacaacaaacacgacttccgaccaaagatatcactcagcttgccatagagcggctgaaaagatgtcaaagtaaggaagtaggacgtggcgatccagctcgtcaggttcaacgccttcaagtcggaaccaatctttccataactggatacgatgattgtctggtcagccgcagacaggaagacctagaaacgggtcagaaaaggcagcggatagactgaaagtgagccaactcataccccaattgaaagcgcaggcaatatatatctaaggttcagttcagagcccagtttactcgcagctgctccttcttctgtgcgacctgaatccggcggatttccaacctcggccgtggagtaagtagtattgccgctgctttgcgagcccagcaacggggttgtttcattgtgcggcggttctgacgacatgctacaagcgagtcggatcacctagcacctccatcaactgaaaagagaagacgaatggatgcctcgacatctccaactatttcaccacccctctacttgaagatgtgctttgcgtcacgtgatgataagcgttccacactagatttacgataattggccaaatcggcaagacggaaaggaagtggcgctaatctccaatattgtggctccgcgagctgtcactccttcctgatttgtgctaggttgactctatacgctgtgtggaattttgctatctatgccgtcaacaaccgcttgcacctgagtctagtatatacaatgatagctaggcagcgagcgccttttatggtgatagaaatgtagtcatgcaatgtcatccgtcattatactcgtcgaccgtttcaaaataatgaatgcacgcaacatcacgcatccgtcttcacctcgcccgctgcctccgtaccaggcataggaatgggaccaccaggcgagtccggcagacgcgcggttaggacttcgacaccgtcttctgtcaccaaaagcgtgtgttcaaattgagcggacaacgaaccgtccgccgtcgtgctagtccagtcatccggccataggcggtcgcggtgcgtaccaatattgatcataggctcgatcgtgaagcacatgccgggcttcgccgttcctaccgccttgtttttggcataatggggaacattcggcgcgcagtggaaaagttggttgataccgtgaccgcagtagctcttgactacactgcagttccggctcttggcatgcttttcaatcacatttccagggtcccggaacagcattcccggcttgacaatctcaatggacttgtccaagcactcccgtgccgtctccacgacccgcacggcatctggattcgatcgcgccttctctcccacatagtatgtctcgttgatatctccatggaaaccttcatgatacaaggtaacgtcaatgttgatgatatcgccatcctcaagcggccgttggtcaggaataccgtggcaaatcgtttcgttgatggacgtgcagaccgacttgggaaagtgaacgtagttaaggggtgaaggataagactgatcgcacattagtttgaggtccactcagccattcgaagcatcccccgcaggtagtacttacgttgcgctcaatgcacgctttgtggacaacctcatcgatataatcggtggtgacgccgggcctcaattcccgcgcagcaatgtcaagcacctctcgtgctagtcgacatactttgcgcataccctcctgctccgccttgttcagaatagtgatgttgtgtcggccaacaaacttctgctccgagcggggtatgccatccttcgcgtagtccgggtgggggatggatttgggcacggtcctcatgggcgatagagggtagacaggccggagggatccggtgaacccgaaggaagggaaagggttgaatagtccggttgctgggtctggttcagaaactacttttggagggaaaaggttggtgaggaaattactctttttgtggagagctttgtggtcgctctaagtaggacatattagcatgcaacagacaggtacatgcgcgcggtaagcgagttcttgagcgcctacccagcttcgtttgaaacagtcctgcgagcagaagaagctgtcgaggcccatcttcagacatgtcgggcactgaagcgatccagcatccttcccacagtcggtgcccaggcattttcgagaggcgacttcggctgccatatttgcggtatgtctgtggttagcgcagcctgctgtatattatgtggatgcagggatgagcttcaagaaatgttggcggagtgtaggataaagtcgccgcggcaccgccagaaaaattgggggtgatctaatcctgatttggctagcgttggcaccctccaggaacggactagcttacgattgctccacgtgatctgccttggcagggctcggccgctaaaccaacaatggacaaaatggtctcgtgaccgtgacaccgcatggcgtgcgtcacgagcgagatcgccgccaactaaccaggaaccacagcggggattactctgcatctgcatgccaatcttggttggaggtgatacagcgtcattggagaccaatcgattcgtcgcacctgcgtgaccgattcgtcgctgtgccctcgagatggcatctcctgccaagcaaaaagtggttattgtcggggctggaccagtgggctgtttggcagctctctacgccgcagccagaggcgacgatgtcgagctctatgagctacgaggaggttagtttccagcttgcctccctaacctgttcccgaccttttggagacaccgtgcggtttttttttttttttctctttttttttatatataaataagccctaaatcatcggatcgtgcgtatacctatacgtcggcattgctgtactgactcatgttgtcccagatctcagggttcccggtacaattcccttaaacttcacgaaatctatcaacctttccttgtcccaccgcgggataacggcattgcggcactcaggccgggagcatgtcatcaatgagattctccaagaagtggtcccgatttatggtcgtatgattcatggacgagatgatgggaaactatgggaggcaccgcaagcctacgacgtgcacggccgggttggcctacctaccacatcagcttgagcgaatcaaggctaacagagtggcacagaataactactctgcagatagaggaatgctgaacaacgtgttcctcaacgagctggagcgaatacccaacatcaagctcttctttaaccataagctgaccggtgccgacttccaagcaaacaaggcctggtttgagcgtcgcttgcctggggaagcaccccttcccgggtcgtccggccgtgtccccgaaatagaggttgactttgacttccttatcggtgcagacggcgcccattcggccacgcggtaccacatgatgaagtttgcccgcgtcgattaccagcaggagtatatcgacacgctgtggtgcgagttccgcattcctccatccccaacaaacgactttcttatctccccaagccaccttcacatctggccaggcaaggagttcatgttcattgcccttccctccgtcgacaaatcattcacctgcacgctcttcgcgccagcgagccactatgcccagctcgaacgctccacagaagacctcctccagttctttgacgagcactttcccggcgtctgtccccaactcatctccccttccgacctcacagcccagttcagagccaacccacacctccccctcattagcatcaaatgtgcaccacaccactacagctcctccgttgttattgttggcgacgcagcccacgcagtcctcccattttacgggcaaggcctaaacgccggccttgaagatatccaggttctcttcgacgcactagacaaacatggcgtctacaatgccaactctgatcaggccgcccgcgctctcgcccgccagtcagcattcgcagcgtacacggcttcccgcactgctgacgctcacgccatcaacgatctttcccgccaaaactacgtcgagatgcggtggggcgtcaaacaacccctctaccggctgcgcaagtacatcgaggaagcactctaccactaccttcccagcctaggctggcaaactcagtacacccgcgtcagcttcagcaatcagcgctactcggagatcatagctattaaccggagacagggacgcatactaggtgctgtcttcgggtcgacgttaatatcggtattagcggtcacgggtatctacttatggagacagccaacgactagactcttgtcgctggcaagtttcagaggcgccttacagggtgctctacagggcgccctaacgggaactgcgtagatgtatttcaagtatgttcatatcaatctgtcgatgttgggaggggatttgcaaagttggtatacacactagattgtagaggctcagactcggtttgggctatcttgcatcatctcgttgtttgtgcctgccgcctcttgtggcatattatacgtacactctgcttctacggtagctactacgactaaaatagatcttctcttctctgacatcatatgtcttacagtggtgcttctgtttgctgatatcactatacctcgtcgcatcaacagctgtaaacatatataaaagcccgtaatagttggacaagaagcatataacaggcaatattagctgccaggccacagaaccgtggagttgtaatgaacttgagtgtccgatctggacaggtagagcaggcgccagggaaccgaatacgcgtccattgttactgccgacatcaagtcgtttgcaggaagacgtattctaggcagctagaggtataaagctccatatggtaggtcaccatcacggttcgagttctaactactccagagttcggtgaaggaatcaatagtagacagcctaggtagcatagccctgggctaccacaaatattatatatcgagtgttagtgttgctaggtacaactgatattatgaactcatatagtacctaggccggattcggcgtaaccagtctgcgggcctctgtggggatttctcatctcctaggtagtgaaccggtgtaaactggtgatcctcttactagggctgatggagcaccgttagtaaccaacctaggaaattggaagagagtggatggatccattcggtggctggccagagcccttactgctggcaagacaagaagaacgcaacgagaggaaatcaacacaggcatggcatagacatcaacatagacatagacatagacatagacatagacatagagaaacgcaaccagacattggagtgtaatgcgtgattaggaaacaaaatacatccgaatccatgaaaaaatagagaacataaaacccattgcaacatcaaagaccaagactgactcgagggaaggcgtccctgccattcaatttcagccttggtttgcttccatacagtacaagaagagtctcccatattatctcgaaccaaacacacatagtgtaacctcacacgacaatattcgatagtataa

SEQ ID NO: 4701 - DNA, 1526 bp, Emericella nidulans
tgcagaacagccatggtgggcgctgacgataggaacccggtatcaatcacgtcttctatagtttcaccgagtgctcaaaccgagactgccgtttgcgaaggacagtacaatgtacgcatcgaattcatccgccctggtaagctttgtcgtccaaacagctgatggtacgctaggaagctcggactccactatctcagagacctccaaaccatgttttaacgtccggaaagtgcttcagagcacctgtgccagaaactgtaaaaatctggggagcatcatcctcggagatattcacaaccttgctatcaaccagtgggttgagagagtttatagcctccacgagattcagattttcagcacccctaggctggaaatagacaggtgtacagggggctgccgggtctgctgagaagtcatcactgttgaactcagtctcctcgtcgtcatcgccaagtttttcgaactgataaaagtgatgattcccaccttgggcggcaacatagagaaatccactctttatgatgagcacgctcgaagccaggggtactgtatcgaaatacttaactttgaatcctcttacttgccccgtgagtcggcctttgtcatcctcaaccatgtcaagcgtgagcttaaaaaggtcaccatcctcggtctgtaagaggaagaagaaaagccccacgcatcttatgcattacaccagcatgtaatgcaacgcttgcgctcaggattttccattgcgcctttgcgacgcggtataggtaccctgaaagcatcttggttcgagtgtcgataggtgatattatcttccgcacatacaagaacaccgctcgggccatcggctccaccaggcacctgaaagagcatcgatgatgtgcggtcgacaggatcagtccattttcggacaacatggttgaggccaagatcgagctcataatatactagaagtttttcaacttcttcgtatgcccgacccgtcggatcctggtcagactcggaatagtccacttcaagggcagcaaagacggggttctcatacccagcatctagtgcaactactgagtacaccaaagtctgtggcttgtgcgcttccagcggagatgagatcgtaagctcggcctgcgagtttcgattcagaacataaacaagcttgttcttctccaccgacgcaatgagacatgctctacccttaggatcgaccgccaaatactggccaggaacgacgcgacgcacgcccgacttgccgaacgtctcaagatgaatccggttgaatcgattctgtgagggtacatactcaatgatggtgatgcgtcccgagtccgacccaataattatgtaatctataagcagatctcagcactgttcgagccacgagcgtccacttcatcgaccgggccacgtcccgccttcaagggaactcgttcggcagtgaaggatcatgttgcccgagaagcttgacgaatcactaaaatgatcttggaattttcgctgagatgggaacgtaaaaacatacctttgttactaccagc

SEQ ID NO: 4702 - DNA, 2254 bp, Emericella nidulans
ggtggcctgaggttagcggaacgggccgtttagcactttcaatgatacatgctttcaatggagacctatccgcaggtttatactttcgacgctataccaaattattatacctgcatatcagaaaaacctctaatgattcaactcctttactgacattaccagcacaacaattcgaaggatcctgatccatcgttcgagtcattcttagactctcttttgcgtctgttgggactttccactcagcaaaaggtaccttgacagtattcaaatcaggctcatatggtgacagacatagtagtccatcacccattcattgcacattcgttagataaagtgaggaaaatgatgagatgcgttgcatcacaatgtaagaactggccttggacatagaagtcttcggcatggtaaagaaagcatctaatgaagactatagaagagcggcggctgagcatttgtgagaagtagagaattcaagttctttcagctgagctatgtcaggaatctagcttctctttccaatacctgtctgtctaaaggatttgtcattatccagtatttccgagcatgcgtaaatttagatgggtgtatctggttcgttcgctgaacgcagctgaataagctgtatcagaaataccttgaattgtaatgatacatcttgtcatatcacgaataagctctttgtctgcaggggtagggcggtaatacttgtgcgagtgaaatagtcgcaccgcttggtattgggttagccaagagaggaatatttagaacggcgaaacgaaacagctcaataagccatgcgtaaccatggtattcacggtacagatagtttacaacctcaactgtctgcgtccttttcagcccaggcgaaatgacttcaaacaggatgtcaagcgggaattgacattgtgcaaccagcaagatgggcgtttcatttttatattctagcaaactctctcaaggggataggcttatttcaccagtcactgtactactgtgctgcttacgttgttccccagagtgctgctggttacaaaggtattataggtcctgtcatgctacctgtccacatagattcactagcctcgggaatcgagctgaacagttaggccatgagcccggaagtttggatgctaaggtacggtacttgtatgaacgacgtatgttccatacacagctgcagagcattgagtactgaaagaaacaattactgatgtctgataacggaagctctactacattatagctacgctgaataggaatgcctgtgccttcttagtgggcacattcgctagcttggctaaacctcttgataccgagttctgagtccaactattttaaacctgcttttatcataccacaacaggccttccacctccagtgcaacgatgccatccctgtacggttatattgggaagacaaaacccagggcatgagagtcacgcccgagagaaactacaagatacctgttgaacgaaccaactggaagctctaaaactcttgccttgacagcaaatcaggataactcagggaatttctaccttgttttatgatagcacggttgacggtgattgccaatttcatgtagagtcgctaacggggctggggagttggctatcaacgctgaagggcaggccaaaattgtaaaaagcacagaagtggttctgggctgaaggctgttttcggctcattcagctactatcccttatcttggatgcaggtcctgagggttgtgaaagcctgagacaaaactaattgttaagaggtcaaaaataccgggttgacgtcctagtgtacattgtacgctttcttcaaggtccagctactgaggtctataggagtgtatcaattaactgggtctcacttgactattagagataggctcaaagataaaccatgagcgacgcctgtttgcaacagtaatatagttccgctagcagaagcacaggatccctatggtgtagtcttgtattaactctatagtaatatcaccaatctagtcttgtctactaatccaccaagcccgcctcaacagccttgatctgtaaggccagaaatttggagtaaattcgacacagcgcaagattccctcccatgtaccaaaatcccggttgtccacttggccgccacatctaaatccagtaagacttcaaaccacaaacccaagaagcgtataatgggacttacagaatttaactccccttcctcatccaagtcccaaacatccgtcatccgatccgaaatctatcggccatcc

SEQ ID NO: 4703 - DNA, 3536 bp, Emericella nidulans
gaacccctgtaaaccggaatggcttattgtacgttccaacactccctccacttcttatgtttctaatgaaatctctaggatattgcgcctacctattacgatattccgacattcccaaagggcgatattcgctcttctctgctgcgagctgccgagagactctcgcgcaaggagaaaatgcgtgcggattctggaaaaaggcgttaaataacctatcagatatgctcttattttcatgaacatatagactatgcttaccaccatatcatgtcaaatatactcaggctgcaatattatttgctgctttccagtttatttatgcaataaaaaggcctgtcaaaatgggctaacctctttggctccacaaggctccctttcgagaacaaatatccagtgatagttctagacgtgacatcggccgtcaagaaaggtagccagatcaggcagcatctagtgcgaaaggatgtagctattgttgagtttgtttccaattcattggccttaatatacagctgcaggtatctataacacagtaggtctaatcacataaaacggaaacaaaagttgagtatagtcaatacagatgcccagagggcatataattggaggatcctgatcacgtcgaatttcgagcctggtacagtgccctggctcaaccggaagaatctcactaggagtccatcgtgctagcttttgcgcctggtggaagggtttcggtctcactcaaccttggccttacaggcgcaagttcatcagccacctcgcttggtttatttcgagtggatggtgcagaagtgttggatgcggccgtacgcaggaccaattgtttcaaaaacgcaacctctgacctcaggattcgcatttctttttgttgcgcagcaaccgtgtcttcgagagaacgagaaggcgaagcagaatatgcgtttccttccttgtcgtcgagctcaaccgccttggtttggtggaggttatcaggctcctggtgagattggagcgttttacgaactgccttttgagccagttcctcgtcgagaatcgtggacataagctggttagaataggttcccattaccctttgtagtcgatgggcaaagtcctctcctttcggggcgaaaatgtcgagttgctccttggcaatgttggcaaatgcgtagcatttttccacgagcggtgcgtcaagctgtgatggcggtgcatcttgtgcggccacccaccacctgtgtgaatcggggtcggcttcgctgacaatgtctgcttgtcgacttgggaggtcggagctgaacccgctgtgaacagcagctttaataagggcttcagagagatcgagcatctgacaagtatcgcagagttgaatcatcaatacaatcagtctttccacccttgcgggtgggtgctcggttgttgaggtgataaaggccaaaactctctgcagtacttgtcggcctctttcccagttcttccggactgtgcagaactccagataggccataagtatggcgaaatcgtccatgtaaccggctgatcttgcgacgaggaggtatgcatctgctctatctggctggtcgaacctcagacaagcctttatgagagcagcgtatacaacgatgtttgcgctgtggacagggggaactgagatttcgagtccattgactaccctttttttgtagaggccgagtgtacccatattgatagggtacccttcccttctaacatcttcaaaaagagatcaaagcccttaaggtctttggttttgcggaaaaagttgagaatcgcgaggatgagggaggcgctcatttcgaacttgtagggaagtatcgtcttgataaccaactgggcaagatcgttttgtcgggtcttggtgaatgcaatgatcatgtatgtaaaagcataagtccggtccggatcatggcagtgaagaagagcatctgatagcctcaaaaggagttcctctaggggcatttcattgctaagtaattgatccgtatcctgacggatttttttgtcgaatctcgtggacgtacgaactagatcttcccaccgaggcgaattgaaacccttcatcaaatcatcgatgttgactttggggtttgccttgatttgtctgatcctgcgccggatggcgttcagctcgaacaaaagactcgccaagtcgagttgggggaaggaatcgttatggtcgtagtttttcaagatgccaaaatatgcatgagcaacagccgggcgtatgataagcctgattgcgagctgttttaatgctagttttctgatggcctttgcgcggacctcgtcagttctaagccattcaggtagttcctctacatcaatggccatgtcaaactcatcgtcttccaatgactctgcattctccagctcgaattctttgacaactggagcttccagatcccggtctctttgcgtactccaccaatgcgaaaatctgcacgggttctgggtcctagggaatcgaacagttcggtataatggtcacgatagagtgtgaaatgaccttgctggagcggttcacacggtgaatcgccttttccggaatataatgatcggaaaagcgagggccttcgtcagccatatcgtcagcctcctctctcacatccgcaacctgctcttcccgctcccggtggcatctgctcttcgcccgcgcatctggagcgaggatactagtataccgcactataaccgggtcttcgatacgtatacttcgtttactcgccgtggatgttgttcgaaacgttaaaccttgggcaacatcgttccgacacaatatgcaatgggaacccggcgctgcgcgtgggctgcgaaacaatatacgctgcattgtcagggcatttcgcgctgtcgggcgggaaggctgttgtaattgaacttgtagatcaattgggcatcccgaagatttcacaaacggcgtcgtacggtgaaagttgaagcaagtggcctggctgggtggtatgatgatagttatggttgtgctatcggggaaaaagttggagatgccggaaagcaaacactgcaaacagcctgtatccccaagccggcggacagctggtcccccggaggctcctctttcgaaggtcaaccccgggggagctgcttgttctatattatgctcttattttcagctatattttcttgaaatagcttggctctggttagccaacatcttaactttctgcaattgacaatgctgattacgcttactacggctctactcgccctgagtggcagcttggtgaatgcccacgggtcgcattccacccctacagacccctctgcagattgggcgactcggcacatgcaaggtgggacctagtacttcaggtaccttgcaggaaaacagtctgatttacttacacctgaaatcaatgtagaggagcatcacatcgatacctttgacgccgcatctttcttcactctccacgattacgattcgtccggagcctggacgcccgaagaagtgcgaaagacatacggcatggatgacgagtcaaatgcgggcttaacggaggagcgaaaacaagaagctc

SEQ ID NO: 4704 - DNA, 3740 bp, Emericella nidulans
cttacacactcctgcaagctctgtcgcgggctcgtttcatcatggcatcggcattgtgcgaagacgcaacggtcccatcttctcagctgaaatggcccctcatcgaatccgtggtgctctcgtcatgttctggcagctctgggtcgtcgcaggtaagacctccctgcggcaggtttgtagattgttctgaccttgcaggcattttccttggtctcatcgccaacgttgccgtcaaagacactggccggatcgcctggcgactccagctcggttcggcattcatcccatcttttattctcggtgccggtatctacttctgccccgagtcgcctcgttggttgatgaagcacggccgctacgccgagggcttccggtcaatgtgccgcctgcgagcccatcccattatcggcgccagagattactactactcgtacgtgatctaccaggaggagatcaaggaggcccgcggcgctggctacttccgccgtatgtgggattgcttctcgatcccgcgaatccgacgcgccaactacggtgcttccaccgtcatgatcgcccagcagatgtgcggaattaacatcgtttctttctattcgtctaccgtcttcagtgaagctggcgcatccgacactgcggctctctgggcctcttgggggtttggcttaatgaacttcctgtctgcctttcctgctgtatggacaatcgacacttttggtcgccgcagcttgctactcttcaccttccctcaaatggcctggaccctgcttgcttgtggattctctttctacattgaccaagagtcaaaggcccaccttgcattaattgctctttttatcttcttgttcgccgcgttctacagtccctgagaaggcccagtcccgtttacctactcggcggagatcttccctctctcccatcgtggtaagcatcagtcctgcgtgcagaggtcaaaactcgctaactctgtctagaggtgggaatggcttgggccgttgcgatttgcctcggctgggcagccgttctgagcatcaccttcccccggatgcttgctgcgcttacacctcagggtgccttcggattctatgcgtaagtctatcttctctatgtcgtatccttgatcctgtaactgaccattctctctactcagcggcctcaacatcatcgcccttttcatgatcttcctctgggtccccgaaacaaaacagcgcaccctcgaagagttggactacatcttcgccgttcctactcgcactcacatgcgctaccagcttttccaggttctgccttggtggatcaagcgctacattttccgcaagaacgtccgtctcgaaccactctacagatttgaccacgtccaggaggctatctgaaagggtggacgttaattcacaattgagcgcaaccgtcacgactgtatgagttaacgaatgggcaagacatccagacaaaccagatcttcaaaaacaaaaaaagataacaaaagaaaagaaagaaaagaagaaaagaagaaaagaagaaaagaagaaaagaagaaaagaagaaaagaagaaaagaaagaccatagagacatctgcctgacttgtgcagacggactaaaccggctacagtgagatttttctacgctttcactttctcccagcgtgggtggaagcacgccgctggtctttctcaactcgctcagctctcctattgccatcctagtttttctgctacattgttgctcatttaattcttttccattgttagtttccagcatttgtggactcaatcatcttgccagaccttgctgtctattggaatcattctgtcttgttctcttttgatcgaactagattagaagatggtcatagttgtatggtaaaggataattagatagatgtctagacttctagacttttcccatcacgtcatgtaccgtcaaaatctcctgtcttttgtttatgcgtgtgtcaaatgtttcttttagaatggaattggatttacctttggctgtggtggatcggaatgtctggcttcatttggcttaaagtctaggatagataacaaaaatagcaaggcttcttcagttacgcaggaggaattacttctagggccgtgttgtattgctgaggtcatcccttcctactcggctaacccccttctcaacttctatcataatacgtacagataatacagatacgtacgcatctatagcgtgtcatgagcacaacgtaaaccacatatctgggattttccttccttatcatggtttgagtgaatataagccgtttttcgatgtatccatgggttggtaggtcttagtccctgtaggggctcgaacagtggcaaaataggaaaatgcgggatatggatcgatcctgcgaggatccatcaaagatccatactagagttttagcttaagaatcaagtgtcatttctgtctttcacaataagagtccattcttaagatctttgtatccagcttggtacaggggtggagaccacaaagtgacgacaaagtgaagtctattaatgccttggcttcgtcttcaacgggcagtcgtactatctccagcttggaaagtcaccccaagtttacgataagtagctgccccaatgcccattcgagctaagctatagcgtccgctgtctctaagcggcacgcccttagtaccatggacctgggggatcattccaagtacaaaatatagtgagatgccacttctccttccatccaaggcggatacttggcgagctatgtccaggtggagcggctgaagacttgtgtttgattatgtaccaatcgtcgaatcagagctgtcgcattacttgcattcttgggcgcatttctcataggagcttgtaacttgagccattatcaacttatggggcccttcattcaaaatacgcctacagagtatcccgaatatagccccggctaatatacataataagcgggaaatcaactggtcgaagcatcttcggtatatgagatagagctggatggcgctacgttcgcaatgaaactggtgagtatggccgatctccatcaagatatctacccaaaaataatccttatcacagcagatcaaatggtatcaatggtctttgacgtcgcaataacgtcctctgaggtaggagcccctgggaagggacagtgtctctacgagaccgaacttgtggtgaatttgggaaaaatgagtatgcagaggaccgcaattatcgaaccttatgctaattatctgaaatcagaagagggatgaaaacgcggtgaagcactcaattcgcactactattgagcatctggaatcagtttgtagaatccgctgatcttcatccgcaatgaagtcatcgcaacagaatcctaagttcgatcgactcttgagttatgcataactactatcagctcacaaatttgatacagtttagtcttcaagtgcgatataattccggcattgcaatgacgagtcagaaacacgataatagcggtcagcttggcacaggataaggtgatctatcctctgccccttaatgcatggggcctgaagcatagtagccatgcctcctctcgtgttcgtcagctgtattcttgaaggcgggcttggtcgagccttcatccaacatatggtcgctctctatctggaaaacccgtcttgaatgataatgaatgaagcttggtgagaaatcctgtacattgaagttccgctttagtattttgccttagatgacccaatagatgggtctgcttccacgtagctcat

SEQ ID NO: 4705 - DNA, 2843 bp, Emericella nidulans
aggttcatgatgaggtacccaactaaggcctctcgattaggtctgaggcacgccgtgttcttatgtatgcgaagccgacatgtttgaacgcctggtatatttcgtgcgcgaggttggcgagttcctcagggccaccggagcgcgctggctctaaatcgatgatgggaatacttggagtcgtcattgtttgatactgctactttcaaagacgctgtatagtcactaattcggactgttgataccacgcctttatgttggcgggggtgcccatataccagatcgcgtgacttgggatttggagacgcctaggttgatagcctgaggattatacctatcagtgtgatatggcacaatgtggagtcgtgaggggacaaaggagccgtcggctaggagagggaagttggccgatcagtcggggaactggagttggggtaggccggcgtcaataccccgcctgataagagcacctatatggctctgccagctggactgccatgaccatgagcagacaatcatgggcagcttaccagaccacaggtatcgcattggtgtcgatgtcggcggtatgtagttgcagcagtaactgaagtcgtaactaacgatgggcaggcacaaacactgacgcggtgctcattgcgcctgactcgatgaccataatcgcatcgcacaaggcacccaccacgcccgacgtcacgaccggcatcacgaacgctgttcaaacagtgatcgagacggcttcagtttccctctcctcgatcggctgcgtcatcgttggcaccacgcactttgtcaatgccgtcgtccagcgctcgccggctctccgtcgagttgcggtgataaggctctgtggcggaccagatgagggctttggccgtgggattccaccattcactgactttccgctggatcttcggtcgtgtatcgagtccccgcgacagtacttttgtcatggagggtatcagatctctggcgaagagattagcgctattgacgaagatgagatccgccgaattgctgcggagttaactgcagacggagtccagaatattgtgatttcaggcatgtacgcgccgctcaataatgcgcaggaagtggccgttcgcgatatccttctgcagacgatgacatccgccaattccaaaccgcggattacgctctctcatgaaatttcgggcctgggctttctgtctcgtgagaacgctgcgatcctcaatgcaacgttacgtcctcttgccgagaagacgatctacgcattcaagaaagcgatgcgggatatcttccaaagcaatccctatacactatacctcacgcagaacgatggcagcgttctaagtgccggagaggcagttgacaaaccaatccgcacattcaattcgggcccaacaaattccatccgtggtggagagtttttgtggcgcgctgcggggaaggctagcgggctaggtcaggaagaccggacggagcctctggtggttatcgacattggaggaactacatcagatagcggactgcttttgccgaatggcctaccgcaaatgagctccgtcacgggtcttgttggcggcgtccgaacaaactttgcacttcctgctgtcgagagtattggtctgggaggtggaagcataatacgcgagacggatggtgaattgactgttggccctgacagcgttgctctggagttgctggagaagtcaaagctttttggaggtgactatctaacgtcaacggatatcgttgctgcggcgggtattcattcaccatgcgaaccaaatcccttccgtggtatgggggatacctcacgattggcagacattactgccgacatggtgtctcgagtacgtgagaaaatgcggcaaatgattgcggcacttgtagacaggaccaagacacagaaaggagacatcgatgttttgattgttggagggggtgccgcgcttattaaaacagatgaacctcttacaggcgtccggagtttgcgaacggttagcggggcagaggttgcgaatgcggttggggctgccatctcgcgagtatctggtgtcattgatacggttgttgatacgtccaatcaatcagtcaagccggcacaagaattcgtgtctcgatcggcagaaaagaagaaatgtcgctaacggggcgaagccagaaacggtacagattcggaggtcacaatgcttccaatccagtatgtagacgcgaaggcgagaattgttgttcgcgcggttgaagaattggccgtcgtttcacaaggcgtcgaggaaatcttcggccagtgcgaaaagcatgaggaggctgagaaagaagaagttgcgcggagcattccagcaaaggcagctgacgaagtcgatgatatccaatcctatcgtccgctcatcaagaatcgccaatggatcatatcgaccacagacctcggcttcatcgctcaaggctgcaaagtgctcggtagtggaggcggcggtgacccatatcaagagttcctcaaagtcagcgctctcgtacggaagaacccaggcacagtcagagtagtctcaccagactatctccctgatgatgccctggtgggctggacagggaacatgggcagtcccgaagtcagcatggaacgcctggaaaacgacgaatgtctcaaggcgcatgaagagctcatgtcgcgccaccggcagcccccaagtatccggcttcatggctctggaaatcggtggaggaaatggcgtactaaacctgggtgttgcggcaagatttggtgttttctgcatcgacgccgattacatgggccgtgcgtatcccacgacctggcaggtcacggcgaatgtatacggcactgagcgcggcgaggctctagt

SEQ ID NO: 4706 - DNA, 2173 bp, Emericella nidulans
ccactgacggttttgacaggtgttcgcgtggggaaggcgggatgccgctatcggggcggacgttgaagcatgcaagcacgcaatcagcgaccggcgttgtgaaaggtagggccgtgcatgggttacaatgtagtatcgctgcgagccctggaggtagattgagcgtatcgatgtgagtaccgaagaagtgggagcgacaggcaggacttgacgaagccaaggggtgataaggagaggcaaagtgtccgcactccacgcagctaaagcagaggccgcgttatcaggtgtgctccgaaacgctaatgaattattccgtaatccaaatccctcccgtcctcataaggctctagctccaaactccaacctccaaagtcccgcgccgctagtaccagctccaaattctaggctacttggcgccaattccgtagcagctgatgacggtctagtcacgcagacgcctcacctgccgaccagaaacctattcattgctatggcgagaaagaaacatcagcagccaggcaaaagccgagtgaagggcagtcgggtgcgcaattgttatctcagtctacctacagcagggcttgtgccatcctccaaatgctgtgcaacgggaaccgttgatgttctatggtcatgcagatcagcgtcagcttcaggcacataaaaaagcctgtggcaacaaatataaattaaaaaaaaataattccgatacggggaatcgaaccccgagctgccgtgtgagagacggcgatgttaaccattacaccatatcggattcgatatattgataatgcatatttttgataaagagtcattgcacactgaaaagcctctgctatgacgacacgattccgccaagaattacttttaaagttacagcaaggctcatgcatgtgttccagagaaggcttcaccaccctcggttcccatcccatgaacggaagctcgggaaacacgggatggatgtcttcgtttgataaatgacggtgtccggcagtctcgactgttgcgcttaaatttgcgtcctactgcatccggtgctacagcaacgaaaatctgttgggagtagtgtgtgtaattatatgtacatgcgcgacaacaccgcaagcaacaccccaaggaatgagcaacgaatatgcaccactaggacctggaccggccatccgattgcgtacagcgcggaatatgggcacagccaccagagcgcagtatcttaccatatgccctgttgaattggtgtgggaagctgcaggatttgcaagaagcttgtagccccaaagtaaacacgacggcagttgtgcaagcatatgagtgatccgactgatgaccgattatgatgacagatggtaaataacgcaatcagaggtagacatgcatgatggactggtcgcccgatgccagaggcggcgtagatggccatccacaccattgccgatacaggaaacagtacggacggcttgagaggacagggttgtgaaaccgtcgacacgttagagcatcggctatcagacaaaattcacccgattagcctcggtatcaagagatgataggagaaagataagaaatgatccatataggtacatatattagtgctactatcgatcgcgtcgaatctgcgggatcttgattacaccgtgggttaaagcctcagtactcaattgggaaatagaaggaagtgatagaaactggtgctcataggtatcaagaagcagaggagatgctgcgttacatagtcaggcactagaacacatccgggcccaggcgatagattagcgacagtatcaaaatagttgaactacgcagataccccagccgcaccttgagccaggacggcgcatcaactccaccaagcatccagtctgataagaaaggaccaaagcgacctaaggactggggctgtaagtcagcaatcgatgtccccagtccagcgctatacgcatcattcgaagacctcatagcgcgaagatggactgatcaagaccaatctcatgggacagatcagagcactgtacagacaggagcaagttcaagaaagtaaatcaattccagaaattataaacacaattatcgaacagaattgtcccgtctaaggcccccttcgcttcgcgggttttgtcgtgtcgtttaggcattttcatatcaggataaaaaaaaaaaaagctttgtttgcaag

SEQ ID NO: 4707 - DNA, 4632 bp, Emericella nidulans
gatcatctgcaatgctgttcagtgcagggaagtagatctgtgacgagacgggcgagaagaagccagcccatgatgcaaagaagacgatgtatcttttctgagccttggtgaagaccgaatatggaacctcgccggtggtgtttgtggcgaccacatcgagtccccctttcaggcccgtgtcgccttctttggaaggggtttggggggatgccatgggtgtctggctcgatacctcccagacatgatcttgaacgagatgggagaaagtcgtggagaattgaggatggagacgtcggcacgcttagccgagaacgatatgataagcggctattgcaggctttctccaacagccattctagccaatgagcattgatccatactaatctccacccgcgtgctcgaccgctgatcttgcgatatctctaccatctacaccagtttacatggcgctccaaaaaggaacaagttcgtgcggtaccaaattaaggccgacttgttgaacgaatcaggatgtatgtcgttggcacgaagatcgagcctcaagtttcgtggtaatgagcgacgtagtctcgcagctgtcctactaatagacctcggctgctgacaactcgagagggcgcagctagcggtgtatccttttactgagacgacagggaagtaatcggcccttaatgcactatggagcccgtcccgcaggccaaaacattattcggatggttgagcgtcggcgatgcaagcgattatccctatccaccaatttctatagtaatgtgagccgggttccttgtgaaagagcttgaacgtttctacagtgacgagagagagcccagtggtgagcggtcaaatagaacctttgaagacttactttggacgcggcgggagcagatagtaaaactggcacctctagggttcatagaaaatttagttcatgacggcaacagtcctcagggcctcatctgttattgatcttcatagtcgagatcaaagagagcccgcctaggtctttgttttggggcagatttcggttttgcccagttttttcgttgtttttcgatcgtgagaggctgaccccatgggccaatttgaccgttcaatgtatccattgctttgtcggcgtctgctgcagtagcgaaatccacgtagcaatggcagggtgcattgtaaggatgtggagtatcatacgactcgggagggatcagcggcttgcttatagcctctctggtcattgaaagtggtattagtgaaattccaatctgcgggtaggcagtacttacacgttgaagccctggaagaattgcacaagcttctggttcaatataccctgtttgagcttcctgcggggaggcaagccattgataagcaagcgttggccacgtcgcgcataatcaaagtgtttaactgccttttcagggctccaaaaatccaacacatgttcagcacctttcggcttcatgcggcgttgtttgctcgcaacatgttcaaccctgaggtaacggcccctaaactcccgtcctgtcagcagctccactgcgcggtcagcatcctttcttgtctcgaactccacgaagcagtatcctgggttattgccggtaaacgggtccattgcgatgcggatgttggcactagatagagtcagtgtgccaacagacggctattcgagtgcaccatacacgctaaacccggcatgcttgagaaagtttctcagattcttttcatctgccgctggtgggatattaccgaagtatctctcgttctccggagttgttgagatattcgcatctgggcgtcgacgaaagagttcggtttgacttcgggagacgcgcgaaggagatcgtgagtagggagatttgtcagattgttcctggtgtttgtgaagcgtcgcaggccgagagactgattcaaacataataagctctagctaggcccgtggacctctagaagcaggagccgtgacttaccctgctgtggtgacgattggttgctggaaaatggatgggtgccgattatcctcacaggtgtcctaacaggcgggacaaaggaacgacgaaacaaagtcagggtcgcccaacgaaaagttgactgtaaagccatagctatgatggcagagctcaacggcagaaggggggtaagctgctggaggtgagaggctggtgtcccgaagttgttcggtgttgacaactccagcttgcgggagttcatgcggcccgcggaactgcctacacgggttagcgttgtgcaactgttttatccagcttaagtcagctatgctggcataggtcaggaccggggtctccgctgctattctcaacacgcgcacagttcagagtgtcgccggaggctgtccaaccagactactcgaacctgtgaagactatcatcatgtcacctcattattatcttagctacaaagccgatctatcatcactgccgccaaggtcaggcccgttgttcttcacataggcaaacccataaagtaccatcagcacttctacagcaatgactttctggctcgattccacgtcatccagaacgacgttctcgatattccttcattcattcaagctctgaaagagaaacggtccgttgcataagcccttcaccttgcttgtaccttgctgacctctgcagctacggcgatttcgtcgtcaccttccggccgcactttcagtcgggaggagagatgggtaagtgggatgatgaactcatcgagttgctgccatcttcagttcgcatttttgcatctgtcgggctggattcaactgggcggacgtcgaggcccttggacgccgagggatctggtacgcgaatggcgccagcgcgtccgatgaagcagtctcagatacaactctctacatgatcctgtcggtctttaggaacttcactcggacgcagctggctgcacgaacagccgaccccgagatttttacggcatctcacaagctcatcgcatcgatctcgcataatccgcgcggacatattctcggcctcgtgggactcggcaatatcagcaagaaggtagcagtgaaagcgcaacctctgggaatgtctgtgcattactacgacgtggtcaccagagccagaacgtcgaacgggctctagatgtcacttaccatgatacgcgggagagcctcctggaggtgtcggactgcgtgtcgctacatataccgttgaatcagtacgcaaagcacctaatcaaccgcgatactctgaagattatgaagcccggtgctagctgatcaataccgctcttggctaggtcgttgacgaagaggctctgattgaggccctcgagactggttcgccatccgctgctggcctcgacgttcactaccatgagccgcaggtctccccgaggctcgcggccatggacgccgtcaccctgatcacccatattgccggaggtgcgttgaacacccgcatcaactttgagctcaattccatggagaacattctcgcgactgtgggagcccagggagagctcattggtcagccgtttaccccagtcaatagtaaacaagtgttagagtatctcaaagcacagacttagttatagaatatgagggctcagaaaaataacagctttgtatgttcgagtaaaataccactgtgaatgtgcaatgggcgattaatattagcctcttacgggttgtagccctaaatatattaccgtaagtctcaaggccaccatcataacaacatctaatgtctttcggccaacgtactaaggagttttgcattagaattcataaggcatggacatctgctcgcgcgtaagatccttctatacatcagcggttaacaacaaagggtcttcttcaagcctgtccagcaggacccgagacacagacatacagctcgcaaaatatccatcacctgcctactacagccacgttttacactaattggggaggtactggccctaaggtgcgccaggtagtgccaatgctgtaccactaaagtcacgtctcggtaggggttttcacagctcccggcttctgaccgtaagccacgactctgcaagaaagtcagaactcgcgatctaatatcagagaaggatacacacatcgaccaataagcatggattcgggggttcgtgatatcctttcgacactgagcgagcagttcctgatgttctccggtgtcatccccatcacctcgatcaacagcttagccgaaaacccatgcagcccgtccaaggtgttgaccatgttccactgcccaatatgtttgaggtgcgggtccttgggccatgggttttggggccatttgtacttgacttccttcacgttcttgaatcctgtctcggtcatgagttgtttatactgctctggcaaggcaccgtcccgtccgaatctgcgcaatccctccatcatcttgttgttcagtgtctcaaatgccgttcccgccatggtcccatcgtcgctacggacagggaacgagaagtccatgagctcgaaccagcctcccggcgcgaggaattcatacgcctgccggaacaaattcttctcgtttgcaatcgagccggataacatgcgcccatggataaagtcgaaattctgggcccacgtccactgcttctcgtaatcgtcgatctcaaatttcaggttttgcgggacccatgacggctgaatgg

SEQ ID NO: 4708 - DNA, 7195 bp, Emericella nidulans
taatcgagtatagtctctttattcacatcatgccaccggtgacccttcattgcattgtccacctaacacctctggacgttatgaaggaaaggtttccggctgcctatgagatcaaatcaagcgagccgggctctcctgaacatttcgggcttctatcaatgatgctttgggcgactgtgccgtacgtcatctggcagctctcttaccacttgtttatcaccgtccgccgtgcagacaagattgcagctggtcgtccaacaagcttcacgtgcgttcgcaagtcttatgcaaaggcctggattggtcgacttgtcctcagccttccggaaacactccaagcccctgcgttcatgctgattcaatatacctacgcgctgttgaccatgatcccatgccccatctggctctggtcgcggtgggctagtggtatttttatcacaggcttgttcatcttgagtatccataacggtgcaacgtactatattgacgtgttcggcaagcgcttccagaaagagctggaggagttgaaaaaagatgttgctcgatggcagtctagccccgagggagcaataaccccgataacccccggtaccaccgctcacgctgaggagaagcagttgaacgcgaggtcttcccggagcaactctgataatgccagtattgagaaaatccctctccttgattccaatggggtttcaactgcaattgagggcggcacaaaataaacgttcttttgggcgagcaaccgcgcggagagtggactggtctctccacctgcaaccaattgataaccaaactgaacagtcttctgtcttctagacggagagagtcctccaaccactgcgaactgctgctgactatcatagcagtactattttattaataccttgtttctttttggagtatagttggaattgttctcgcatttaaatgatcaccatgatacccaatttcactatccggtcgttctttcattacagccttgcacccttcgttcataccttatctgacttgcactgattttattttctcttttccgttgatactgcttattgatcgcgtgctctttcgactagagataattagactgctgatattgacttgaatattgatttccattgctgctacggtcaatctaagaccagtaaggacgtatattgtatatttgacccaaggtactcgtcgtgaagaggtcaggtcctcaatactctgaccgagcgggcctgccacgcctagaaactgaccaagggtagtaagtgataggttaggtttaggtagattggcgtgataccaaccacgacggcttgagccctttacagatgcagatatagtcaggagactaggagatcgccaagccggactgtgatggggaacggcccgctgctattctttccaggcctgcaactcttggcttggcttgcgactgctccgctcacagcctgtggcagaggctgatgccataccaggtatttgcctctcaaagttcttccctgctgttcgtccactgacaattggtaaataggatttcaaacacacgcactcggtcccatggttgaatcccttactcgcgcgaaacagagttagacggtgattcaagcttctcggcccgtggtcatgccaatgagatatgatgcagtggcagacatttctcaattactatgggaacataccaccaagtctgttgaaacaatcaaaaaattccttccccatgtcctgtatggcgtggtagtctaactcccaacagtctcgagaccttgcgtgcgccaactggttcaggagctacgtccaagctgatatcttgagcccttccctcactgtccggcagatcatgagctacactggcgtctctggccaaagccgctcggcccatcagggtatatactgggcgcgctgtggtccagtccgattttcttcgcctctgacctttccacagagccctgacctgtcaaagtaacgcattgcatgtgaaccctctgcttacgcggcgtcggcaatgacgctcgtgagcgtcagcctccacatctggactgctgttgcccagaattcgtagcacctggaaataacgctcaattaggaggcacttggggagcagaaagcgccttcaatatcaggaggctgatcaaggcaccactatacagtacctgcgagggattcgtggtcaaagtcggcatcacatattgccaaatacgtaaaacgctcatcaagaacagattaagtctcaagcaaatagacttcgtcttgtctcaacaatagtaattctagtgaaactcgttgtactgtagaccatacgcgggtctggctatgatggcgtgcaaccaaaatcgaatgacaagagtgcgttaaccagttgcaaaacatgagagtcgcatacttctcatcgaacaatcacccgtcaaataccctaaccagttcaatcagtgttgggggcttgatgtgctttcgctgtaaaaaaatcctccccccccaaataaaaactcgagctgaactgtgcaagcggtctgtaggtactccttttcacgagcgctgccgctgcaccacggaacgtctttgctacgtgcctcgctccgaatttcggctgcaatcaatggtattgagaaaccacatccgttgatccactcgagaatctctttcgccacgtcgtaaagcccgaaactgggctgctgctggaaggtctgggccgttcgggggatacacgtaactccgagtcacgtggtcaccacccggctctgcttgcggacttcctaagctggcaccggcttctctgctcatcattcattgtccttcactgcatcgatatcaatttaccaagaaattttcgtgcactataatacctcgctagagttgttcgtctctgtactgttcccgcttgctcctgtgagcaccccctaggcttccgccatgtccgtcagtatgaggtccgcccgccttgtgcgttccaaccccgtgctgcggcccaactccattggtgagttctatcttcttctggttcttttgcatacttgttgcgcttctgttgttgctcatacataatatgttttgacagcccgacagcgctatgctggagcatttggagcagccgcgacaggcctccgattcaacagcagaaacttcccctctcaagtaaccgccctcgccatcctcgttcccaagcgcggatatgccacagaacaatcaacaaacacatccgggccatcgaacctcccgccccctggcttcaacgccgagcaggccaagaagcccatttccgtagaccaggcgcacgcgcgagcgcgaaggctaatcaagatacaatcccgaaggagaggtatcagtccagtcgcagaatgctcagagtacgagtaaggagagcggtttggcatctaagagtgttgcggaggataaggataagaaggctgtcgaggagccgaagaaggagtcgaagaagttgacgattgggcagaagatcaagaaggagattcagcattattgggatggcactaaactccttgctaccgaagtgcggatcagctcacggctggcgttaaagatggcgggtgggtatgagctcagccgcagggagcatagacaggttggttctacatgacggcgttctcgtatatatgctgacggtttagcttaaacgtacggtaacggatctcggccggctgattccattctccatgttcgtcatcattccatttgcggaactgctgcttcccgttgcactcaagctgttccccaatctcctgcccagcacgtacgagggtaagtctgcccgtgagaagaaggcgctcagcctgagctcgacccggaaagaagtctccacgttcctgaagaacacgttgaaggaatctggtctgcccgtgacggcggcaagcgtcaagaacgatgaatttgccgagttcttcaagaagattagaagcaccggcgagaccccgtcggctgaagacgtcatcaaggtttgcaagatcttcaaggatgatcttactctggacaacttgtcccgaccccagcttgttggtatctgcaagtatatgaatctcaacacattcggcactgacgccatgctccggtacaacattcgtcaccgcatgcgccagatcaagcgggacgaccgtgctatcttttacgagggtattgactctctttctgtgcccgagttgcagatggcctgtgcctcccggggtatccgtacacacggtgtctctcccgcccgcctccgcgatgatctctctcaatggcttgacctccgtctgaagcagggcgttccctcgactttactggtcctcagcaacgcctatgtctacgcacagggcggcaaggaagcagagatgtcttctcagattgagtctctccaggctgtcctgtcgagtattcccgaagaactcttccacgagattgagcttgaggtgcacaatgccgagggtgctgccactaacaagcagcgtctcgaggtcatcaaggagcagcaagagctcattgaagaggagaaccagcagaacagcgagaacgaagagaagggtgttgccgcccccaaggacaccgagaatatcgatgaggaccacaaatacgagaccactcagtccggagaggcttccgaggcgatgcaagagggtgagaaggctgaaaaggatgctgagcctgccgtacaggagaagaaggacaccaaataggttgcttcctgtctcatgcattcgcattcttgtctgcgttatgttgtactatagacttgttttaccacaccaccactatctactcttatttccttgtgttttatagatgggaggagcgaggatttcttgacttactgggaaggacgacggttggagcgtcaccggttggatggatacggcggatttccctgcgactgatatgtacctaaacgatatataaactgtacattttctttgaatcttctatctgtagccttaatttgggagtgtggtgtcgtttattccctgatagtcttcggttccaaggcctttttccaaactccgcaacctcggcaacccacccgccttcaccacagaacctcctcccatctcctccgcacccaatcatcgacttgatcaccttattaaataaacccagacaatcggaccgtttgtaattattctactaaaagcatgcgcagagcgccccgtcttcgcgctctacgcaaccatcgtcagtgcagtctcagcttcaacaccctagtcattccccttccgttctctgcacctcgataccaccatccatctagttctcggtcacattcaacatcatcagcaatcgatatgccccgtctgagtgcggctgctcaggtaagtcgcatgctctattcttccagtcactatacgcctggtcggctatttgtgcttgcatggtcctaacacgtcccaggaagcgatcaaccgcctaagagcattcaagcccccaccaaccagctacgacctcgtcccgctgtcgcgtcgcgcagcagtactgcttctgctctatgcggatgcgaagggcgacttgagagttgtgttgacgataagggcaagcacgcttagttcttgtatgtctctgtcttccttgattgtcactgtgcgccagagtagtactgcgataatattgcgataatactgcgatagtatctgccttctatatctatggtttcgcagacattggttaaccgtgtgcatggacagatgcaggacaggctgctttaccaggtggtaagatgacccagaccctcctttttgtcccgtcaaagagccacataggtagtctggcgccactaggaactaataaccatcctcgtccaggcaaatccgactcgttggatgaaacccctcttcaaaccgcccgccgcgaagcccacgaggaaatcggcctgccaaatctaatccagcccctcccacccccgtttagagtagaacatctgtgcgaaatcccgtgctcactagcccgcactgagctagttgtgcggccgtgcgtagcactcctgcatacatttgacgagaggacaggcgaaaacgcggacccagagatcacgctgattccgcgcttggatgcgcgggaggtggcagcggtttttacggcgccgttttacgacttcttaaaattgaagcccgctggcgatgaggggtggtatagaggtgtttggaatgagtggtgggggacgcaatggaggagtgcgagaccttttcctttatcttccctccccactgagcgagaatgaagctgatggtgattgaccagtgcaccaattcttcgtccccgtaaacccggacaaggtggtgaagccgcgcccgcaccacgcaagacaggaagaagcagttcgtgatctagaggagcaagaaagcaagcagcaacggagccatcagtcgcaaggtcaagcagcagaacaagggaggtccgattccgtcaccaggtacagagtgttcggcatgacagccagaatccttgtcgatgcagcccggattgcgtacagcactgagccggagttcgagcataatcggcattctggagacgaggagctgattgcgaggctgagaaggaggggccggttagggccgaagatctaatgtacgtacatggataggatgcggatatcatcaatgggtatattgtggatcgttatgggaggagcctctatcacgggatacggcatagaatctgactgaatataagccatcacacgggaaagaagagtctagtcataagtgataaagagctataaatgacatataggactcttccattttagtcactacctaaacactctacgtagtgttgaggtgcccatatgcagacctctaatatctgtatacctgcaggttagaaatagctcggataatgctgcaataccttcagaagcgaagccaaactgtgctaccgtacgttgaccgcaacgttgagcgtacgttgaattatcattaataaagtaattagggcttgaacctgaccagccaggatcgactccggaccatgcttgttcacctctcatttcctttcgttattgcataggtagtttttatttattatacctttaactacttaagataataatagctagtcggcttaggtctcaacctgggcttattttctgtcgcggaaattcgcctacttggcgggtctagtgctagctgaaagtacaagctgcaacgcaatgcagcggtaggtagaagatcatcatacttaaacctcttctggatgacttcagtctgaggttggagcaggaaaagagaca

SEQ ID NO: 4709 - DNA, 1171 bp, Emericella nidulans
tttttatataatataaaattcagtatattatattaaaataaaaatctttttagaggttttatatgaaatatgtattcaataaaggtatatagtaatatcctcaatccctatatcaaaataaattagttaataataagtataaatataaatatatttatatttacttattgaattttagataataaataaatatacaatatctaaaataaataattatattttaaggcatgttaattcaatggtagaatattgtagtacggccacaagaatataagttcaaatcttatacatgtcttagagatatagtatagataaatcaaaaaaaaatgtaaaaaagttattatgaatttttcaatatttttatttctaataggaatattaggttttgttttaaatagaaaaaatataatattaatgttaatttcaattgaaattatgttattatcaataacatttttaatactaataagttcactaagttttgacgatattttagggcaaacatttgcaatatatatcataactatagctggagctgaatctgcaataggtttaggaatattagtagcatattatagattaagaggaagtatatcaatacaatataaataatgtatttaacattaataattttacctttattaggatcaatagtttcaggtttttttggtagaaaagtaggagtaacaggtgcacatttaataacatgtgtttcagttgttactacaacaatattagctatatttgctttctttgaagtaggttttacattataccagtaacaataaatatagcaagatgattagaatgtgaattcttatatggataatgaaattttagaatttgatctttaacagcatcaatttattacccggttttaaagtctcaaggtttagccctaaaaattttataaggtttatgagcctgcgcccacccatccaagtatttttgtgtattaaggttattcctttctcgtatgttttcctggacccgaaaatttttttaatatcttccggctgaaacggtggtctctttattcctcccccatacccaatctatctcctcctccttcttttatcatatccattctcgattttttccctttctacatcttccttatctctcttctctcacatacctattcccctcatctcttctatcttccactcac

SEQ ID NO: 4710 - DNA, 2773 bp, Emericella nidulans
  unsure (1)..(2773): unsure at all n locations
tcatcctgctgtaggcgctgccctgccgctggtggcacgaggacgtcagctggcggggaagctgggctagatggttcagtcagactgaagcaggagcctgggttgagtagccacacgaccccggcgggtggcggacgggtctcgattgcccgcgaggactgggataatgttcgcaacaaattaagagagatggagcagacactagcgattatgcgggcaggattagacaaggccaatgaggagggtgtgggggtgcattcgacattggagacgggaagcgtgcagagcgctgatgcaagcaaccggtcgaaaggcggctctccggagcgagaggggattcttgccccgaatactctgggcgagggtacagtgcatctcggatcaagatcggtcctggcttatattctgaataacaagtctgggtccgatcaattgcaggctttgctcgagggagggattttgccgaagcttggtcttgacaatgagtctgcgacgtatccgtttgttgatttgtggtcgtccgagatgtcgacttttgacatcagtgcatgtctgctgtgcgcttccgacagaccagcattgcaaggagtaagtgtcgctgattgcgttttatcgcccggctaatggtgtaggtttttctgctactaccgagatatcgccggcgctatctatcctgttatcgaggacgtagctttgtttgagcggaatctcgaccttctcctgcacaatagaaacactgctggcggggtgtacagagcagatgatgaccatgcgcagaggccgtttggcatgtccattgcattccttggtttattgttcgcggtcctggcttccggctgccagtcatcggacttgcctggtaaagaacgggagctgagttcacaggtctatggtaagctgttcagtgtatagtccacggcccatgctgacggtatagtgtgctgctcgtatcaatgtctccgcatgacaaactttctgtctcagccaacgatagaagccattcagactttgctggtgattggcaatgtcttatcgtataacatgaacccagggatctcttacgttttactcggtatgtgaaccgcactagcccatattcaacttactgacccgttaggcatgacacttcgaatgggcctggcgctcggcttgcacgttgaatcgagccatttctccacagtcgaacgttatcgacggcggcatgtgtggtggtccatggcatggcaggacagccatttctcactatcctatgaccggccgtcgaccaccgctgttagtcaaccggagatcgcgaaaagggagggctctaagcccggcgattacacctacttcgagtctctctgcggggtgatttctttagctctcaaagtcgtccgcagccgtatgctcagtccacactcccaactgagctgggagagtatccaaaactacaaagaccagattcagaagatcctcatcgaagcgcgcccctatctccgcgatcccaaatactgcattactcccaccgaacacctcgagcgcaccgtcctcaaactccactcctcttatttctcttctgagctctgccggccagcgctcaagtccgccaacgcgcgcgacccgcaaaccgctcgcatgcggccngagtgtcttgaacatcttatgacngacagtggccgcngtacgtggagatcacaccggcagtccacacgccgnccgataatggatcacgctacagcgcgcaacagctcatcttccttttgccgtcacagacgaaccaagtcgaacccgcagttctggaccctccttcgcagactcaaggccatcattagcgaacgtgcagaagcagagttcgactatggtgcagacgccactgccgcatccgccgccacggcaccagaccgcagccctatgatcaacagcctcggccagcctattccaaacccggccggcgcttcaccagcggcactgagctcgccagccggcggggtagccgtagacccgcaaacacagtgggcgaagccgttaacgaagaccctccgcgcgctcgaaaaactcgaagccgccttccatacccatacatcccctcttatgaccaccggagcatcgccgacatatctcaacccggtcacggcgatgcatggcaccaccaataacattgttcccgtttcgacgtcagcgtcggcctctgggatgacgccaaacctgggctcgttgccgcctcatacgccagagagttcgacgagtggggagtggacaataccgaacatcctcgatcgggcgcaagagtatatacatccgcctttgtggagttagattacatgaaaaatttctgttccttgagcatcaatggcgtttgattgatttgcatgtaggtatggatggtcggttggttaggctggctgttactctatgttcatgggtggatggtcttcgtgcttgtttgagtgcatggtgcatacctatcggaagacgattatcactctcaagctaaatcgcccgtaattgctcttctcttactgtagtaagcccaggagcgcgtggtgatatgccaccgtcagtcatcctcgccttgttccctccgcaagccctgccttgtcgagcttctctccatggtccccgtttctcctacgactattctttcctcaacgcaatgccccaggtccagaatcaaactgtcagttgcatcaagacatgggaaccggcctcgctgcctttacctccaattagcggtcgcgacacttgacctggtgtaaacagtaccgtcgcaatttatcgccagcatattgcgcgc

SEQ ID NO: 4711 - DNA, 2062 bp, Emericella nidulans
cgtcattcttctttcgctgctccctctccttagcagctttgtaagcctcaaggtcattctcgccagagcctatgagctcgtcgtccggcgccgcatctataggcgagccaccgcggcgggactcagcgaaagctcgattagaggcagcggcttcccgccgcttttctatgcggcgctcatgcgttcctggttcggcgcgcggcgcgacttcgtcttccatgtggcggagcgtggacttgtgcgagcggatttcggcgcggtactgttggcgtacgtcgtggcgagtagcgatggcttcttccatagcagtttctgcgggggttagtccgcggtttgcttcattaatctatagcgtagcatgggttattgaaacgcaccttttcgcaattccaagtcccgcatggttggatttgatggggccagcgcacgcttaccagtcgaaccatactggggcttttgaccgtactcgtcgtcatcgtcgtccctctgtagctcatccgtaccaccactagggctaggtacaatcccctgatgaatttcttctcccacaaccttgtacgaattcccaagtcccggcacaacagcattggcgctccgcgccttctccaatgtagcagggtcataccagccctctgccaattctccacggttcctaatatgtcagcctttgatcttatataaaatccgcctcgccgataacgtacatatatccgcaaagtagaatgagcatgttacttaccatttccctaagaaactcttccaccggccctttacctcctcctcactcaagtcttccaatatcttccccttctggatatcaaggtacatagcgaatatcggctcgtaggtttctagatctcgtttcctgagttcgcgcgcttgaaagggaaggcttatcgcgactcttgtttcatgtcgatgtctcggttcggtgcgccggtcgcggtcgtggcgatgggagtgagagcgagaatgggagtgcgagtgtctatgtctaagccggcgttcgcggtcacggtcatgaccacggtcctgatccttgccctcgtggtgacgatgtctgctatgtccgtttgagcttctcgttggggatcgcgagcgggtgcgtgagggggaggttgatctccggcgggattcggtgggtggcatgatagctcttgtccgaattccctttttggcaactattatatcgaattgtgggaagaccgccctttctgagtgtcggttgaggcgtgtgaaaatgaggtaaatcaagttggagtggaaggtaaggatggagatgccaagaatttgcgatcagatgcattcacatgcttggctaacccgacaactacaatggtattaagagcagggcttcgcatataaatataattttcaatgaactatagtgtaatggtaatgttatcgttaagtcttccagccttcgttaaaataactccctcacaggggaaacttgtaatacactgagaactggaatgtatagaagatacaggagaactcgagctaatatgcattggcctaagaacggactaactggcgggggcgctcgactggtcggcaccagagttttcactggaagcctggtagaagaagatgcgggcttggaccggttcgcggcagccaactgccaggcagggattgagggggacttgctgaaccgtgaaagtgggttggtggggttggcggagttggcactcggggcctgtgcagatccgaacggagtctctggttgggatgcagtaggcgtggttccattagttgcaggaggagttgaagacggcgtggactcagtattgggggcggttgtatcaggcgccctcggggtaaccggagacggagaagcacccccgccgagtctgttacccagaagagtcttcaaactctttaattcagttccaagctcccgcaaacgattttcgttgccctcgcgcgcgccctcaagcgccttcggaatggtgtccttcagtgcattgacctcatcattaatacgtcgaatcacgtcatctcgccgccgcgatgcggtcttcagatcggcgaccagaggttctcgtcagaaaagagc

SEQ ID NO: 4712 - DNA, 3173 bp, Emericella nidulans
tcctctttcaagggggcatccatatcacgtgttgctgcctaccatcgacggttcagtggtcaagtctcagtctcgtattcggctgcatttactccttttctgcgcgactgttggcagttctgccctagcttggcatgagctactccatgttgcactgcagaatcactctaaaattggcaacccatcctagaccaggccaatcagtttttgttacagcgacgatgtcagctggagcctcgaaatctgccgaacctccctgtataaatagttgccaatccccggcttaactgactatcctcatcgaccatcaacatccacctcgaatcagcacttcctatcagaccaccaagatgaagctcaccgctgctgttgtcaccggccttcttgccacgagcacctctgctgcgttcgacaagtgggctcgtaagttggaacctggccagatgctcgttcagccgtactaataccgatgcagcctggggcaagcgcgattactcctgcatcaatgcctactcagggcctaccggtttgtgccttgactttgcttgagatatactctcttactgacagtcttctagagaacagcacattgactacaggcaccccgcttgagatcaagttcaaccgcaacagcggccgctgcgattctttgaacgactaccctacgggcaactacagcctgtggctgcacaacaacccagtccgcaacatgggcttcgtgaactcggactaccaggtcaagatccaggacggaatctcttcggatgcaaccagcgtgaccttcactctgccggatgatctgcccgaggttgccgacgacactgtctggtaccttcgtctggacacttatcttcctactgcgccccaggttcgtcccctcctctgcaatgctcgagtagatgttgattgttttgactcagatgccttcacttttcaatgctctgggccctttccgaatcgtgcaataagtgcgactgctcgtcttttgtatggtagtctgagaatcgtttcttgctgcgcgttccttcagtttgacagatcgatagtgtatgtaataaaaagatcttattatcagccttgatcaagcatctgagcgttcccttgcactgagtgtgtgctcgaatcagctcgccctagctctcgatgaagaagatataatttcacacacccagtaagattcgagtttatcggccggaatttgttgctatggatttccctggttgctcgccagaactcgaactttctactgttccttggcatggtcatgtcctcatcgggactctcgcatgccagaaaggaaatcactgcttgtttcatgttgttgagcatagtatcagtatagttgtatcacgactcgcccacttgtcagcttccagcggaagcaaagacctgatcggtttatctgcttccactttccctgacgatatctgacaatactcagggcaatcagtggaatcagtatactcagctaagtctagtgaagctaatctcagggagcaatgtccataagccctgcttctagtctgtctcctcaaccggatctgagtcgaaggaatgcttgcgaccgggcttctgtcggaacatgccatcattattttactagctctctgtaagtactctgcaaattttcttgcaggttttccctcgaggtagatcaactaagccttggtgaaggaaggtactattgtattgcttcactggtagatggtatcctaaatgtacattttttggcttctttgcccggtcgggacggttaataaatttctataaacacgtgtgctgacactctatatacaagataaagggatagatagtattactcgaggtatagtaatgttgctgcaagaaaaacaaagagtaagtaaagtagccccagagcaagagggggaaaaaaagaactccgatgcggggaatcgaaccccgagctgccgtggtcatcaaatcctaaggaacttgaaagacggcgatgttagccgttacaccacatcggattgttgataaattttcttcatagcttgtaaaataagtggcttcaactctaatacggtctcgatccgtgatatcctcagatatggtttggatgatgttcccgtcatgtccttaagcacaaaagaacaataaagaataatattgtcccagagacgcgatattacgcgcagaaatctctgcaagccacctgattctggacgggccactctatggctcataaccgcaagatggtagtccatatacagatatgttcgaaggttgtagaacctaagctttagaccggcctgtgagatgcacctatgctaagtaactatgtacgagcgcttttttgcattatgggctacatacattgtcataatggtatagcaactaactctctccataggagattatccgtttcgtctcgtattgggctcctacatagcgcctggccggccttttttacctcgctaatctgctagttttcgattacgttcctcttatgaatcttccatagcaacattgaatacgtctagaacaaggcctgttcaactgttgtgggggaacctgtcgctggtagaggcagatgttcaactatatatatccgtgtgggtacgcaaaatcccagcgcagatgatatgaagcattcataataccacacaaatttttcaatatcaaagcaacttcacccacttatttcaagagtgattttcgaacaatcagtatgatgagttatacgagcatggtgtctcctggcagtcagattggtctgtgtagactgcttaggtgtaggcggggcaggcggtgagatcggcaccgatcgcctgtgttccccaggccacgagttcatctgcaagggactggccgtcgatatcaagatgtctggaagactgttcaaaagctgcaggaggtgcaggcagcagaaggtccgctgtgatgcccgcactcatatgccctgctcgcgctgtcgcgcagcagggtatgagcatgaatgtgtgttggacacgattaatagaccacgcccagcggagcggcgaaggcatgcgaatacggcacggtaagctgcttttcccaggaggtcgctcggcgactgctgaccgtcaatactgggatagcagcggacagcttttgacacgggcttgggcgtcagccaagaagcaacatatctgtccaagcaacacctggaaaatattgaactgcagcag

SEQ ID NO: 4713 - DNA, 3121 bp, Emericella nidulans
  unsure (1)..(3121): unsure at all n locations
gccgacttcgaaagaagagtcattcccggctcgattgctttagcggaaaagatcagcccgattgtggttaagggcgacttgtggcggttagctttaccggaggattcgaactggccagcggcgctgttcctttccgagaaccggacacagggcgtgttgttcttcttccaattggcgccaatggtcaaccattccttgccacgggtgagattgcagggtttagaggacggggcgctgtatcgggttgatggagaggggccgtattccgggtcgatgctgatgaatctggggttgcagtattcgttcaggggtgattatggtagtagacttgccttcatagagagagagtaattggagcccgtgtacttgtttagggcaactctcatagtattcctgtgagggggtggctgaaacacgccgcaaaaattggcgagccagggatgatatcgagccgccttagatattcccgtagatcaatacagtagaccaatcacttcgacctctccactgttgtttttctgcgacagacgcactagcagtagacccttgaagaaacggctaggtcgaattgccggaagacaaggtcaagaaatttccggtccccgctgcgattcgtagccgtttaaacttagcggatgaggctagcgttagcatttgactgatcgttgtttcagggcatttgactggtccagacaccagcaggagcgcttttgatgtgcgatcactgcaaggccgttagcctcccacatgctcgccatttcccgaggcgacgtataaccagaccaggatccccttctcgaaactgaaggaagccaccctccaggacagtgcatattgtcttggccttagagagataactagaatgtggatgtttcggttgtacctgctggccttagtctcgtcatcggctgttacgttggccgatggggcatgcgaggcacttgtccagttgcccaaatgcgctgtatgatttttcatggcgtctttattatgccgtggtccttggttctaggctgattatcgacagaaaaattgtcttccgacgtcatttgacaactgcaccggcttagaaaatgcagtctgcacagccatgtatggcagcataaactcctgcttcgaggaccactgtgaactacgcgagtacctctgtaatgctccactcacgtttctcatccgcttttcccttctatactgacgagaatctgcaagccagacgcatggngtgtgacaagcactgtctgcgaaatacccncacggaaccgcaaatncacccagctgggcgtcggatggatcctcaatgtcttgacgactttagcccttggtctcagactcatggcacgaccgccgctgtctgcttcatttggtattgatgatgggattggaattggtacatatgtgcagttgctctcggtgcgacaatatgggacctacattgtatctgaccgagtatagtgcacggcgttggtggacatgatccttatgatccagggtatgtcttcgtttagatgtctgtccagcagcctatctgacaagacaatcaggagcaaacctaggctggggaacagacatgtgggcgctccaggctgaacaaattatcctgcagatgaaggtagatgctaacctccaacccatctttatcctcttcactaacaacagtaccctttgccagctcttctacgccggcatcatagccttctatctctctgtctccctcgcaaaactctccatcctcttcttctacctccgcatcttcacaacagacacattcaagcgcatcgcatacacaatgatcttcttgtgctctgcttatggagtcgggtccgtggtgaccagtatactcgactgcatgccgccgtcgtatttctggactcggtttgatggcgtttcgaccgggtactgtgtcagtaaggcagccttcaaggtcatacctcctgtcaatatcgcactcgatgtggtggttatggttctgccgttgccattgctggcgagactgaatttgcccctgcagaagaagatcagggtgctaagtatgttctcgatgggcgtgctgtgagtttttattctcccccacttattcaaaggcttatgggtgtaggattatcgttgcagatatcctccgaatcacacacctctttcactctatcacggcgtacaatatcacctgtatgtccttctcgtccatatcgtttcacagaaatcactaaagcataattctacattgcagacaatggcggcgagctctcctacttcggtgtcattgagtccggtgtgggcgtcatctgcatctgcatgccagctatcgcagcactcttgaagagggttctaccgcagtgctttggctcgttggcaaaacggtcgtatctgtatcgcaccattaacagtcgcagtaatactgagtttggcgcgtcccgttcgcgctcgcagcggggcgcaatacagccgagtgcatatgcacatacgaaccccaataatccggtttccttctcagccattgcttggggcgccagggaagatgagagggatggagatggaaatacgagtgatatacacctgacgctgttaccggccactgaaattgcagacgagaggatacagaggccgcagaaggctttgacttctagataacttgctatagatcatattctgagcattaatattctgtattttcagtagtaaaactccctaaccagcacattctcagccgcctcctcatcacgatcagcgtcaacttccattggcggcctctgaggcacaagcagtgtctgcggactcttgactttgatatgcgtgttaacccacgctttctgcctctgaatatgctgtgctgcaaatgaaacggcatccacaaactcctggtcccatagcgcctggctcgcaggcgataatgccgtcaagtgcccgtcgatatacgtcaagaacatctcgagcgattggaggacaataagtgtctcgtatgaattatccttgtcgtcttccatcgggaacagagccttccgaagccgctcgcagacccttcgtccatagacacggctttcgtggtaccggtgcaaaaatggttcgagcttggctatgatgtcatccgtgattcggcgcataagtcctagtccagcaatgatctcaa

SEQ ID NO: 4714 - DNA, 1644 bp, Emericella nidulans
tatggatgaaactgggcttttctggcgtatgccgccttttctttgtctatcttccattaataggccaggaatgaggaaggataagagtcggatatctataatatgctgtgttaatgcctccggatctgattgattactactctgggtaattggaaatgcacgtatgccacgagctcttcgcaatatcaatatctcagcaattgggattcggtggcaatggaacaaaaaagcctggatgaaccaaattatcatgcgagaatggctcctggacttctatcaacatattggccagcgatcagtccttcttgcaatggacaacctccctgcacatctttctggcctagagctggcaccaccacctcccaatgtacgcatctgctggctcccaaagaattcaacaagccggttccaacctcttgatcaggggattatccagaacctgaagatctattatcggaaacagtggttaagatatatgctttcttactatgaaaggaacctggatccgctgcaatctgtaacaattctagattgcatacgatggcttgtacgggcctggcatcatgatgtccaaagctcaactatcctagcctgcttttataagagcacgctagtccaggatcctatagagcttccagttgaagcacctgatctaaggccactttatacgcaggtacagcaatctggtaggctatcagactgcatggatatctccttctttctcaaccctgcagaagagtctccagagccaattagctctgggaatgagatatcctcagatgcattacttgagcaactaattgctgaggcttctggaaatgcagatatatatcctaatgatctggatgatgatttaggcgagccagcccctcttccaaagcctcaggatgctcttgatgctgtacgacttctaatctcttatatggagggtcaggatacgtccaaaacacctattcttagatctcttgagcggttagagcgagatatagagggtgaaattatcacggcgaaggctcagggtaccttagatagttggcttagtaatgctagataatgacaaaaacttcatcttggcgataacctcgtttaggcgatattttttgctgggatgacttgtatcgactaaacggggccgcactgtatatttcaagcgggcagtcatctgaatacacttgtaaacttagtgacttctctaatttcgtggacactcctattatgggccacgggagtactagagcgaccctgcgccatatagtgggaaaaaccgtgcaatagatcgactctagccgtttcgacagacatactagtacttcagcttgcattctagtgctttgaaacagggttactgaattctgcaggctcgcagctgacaaattatggtgctattggtgtcaggcagttggtgtcagccagccggtgccctagattatcacgctcaggtctgcagaaaaggggagttcacgaagaacagaatctggatgcccaaggcaactttaagcttttaagcggctgcgatgagcgctttccattcgtggactgtttgggctccgaaatatatatgttgccaaggttactgccgatgcaagggtctcaagcttattcttcacagggctggcgggtgtaacgtggttgcgttgcggctta

SEQ ID NO: 4715 - DNA, 2101 bp, Emericella nidulans
ttaacatctacttgacggtgcatgtatgcactagcgtctcttgatgacaccggcttcattcttcttaatcaatagtgccaaggtaacggatttggcgccgatccgcatcatgaaaggtgcatttaagtgacactctggcatatttatatctgtgagagattctaagtggggaagggaccgttgtaccaggggcaaacgtccttgggaacacgatccttaacacacagtgtctgctgcgctgagatgggcatgaaagtcaaatcatccttcttgtaaccaagagcttccaagaatttggaaaccttgactgtgcactccttgaaacgatcctcactccactcgacagtcggatcatccatcttgttgacagcgacgataagctttcgtacaccggtgtttcttgctagcaaagcgtgctcacgagtctgtccgcctttttcgaaaccagtttcatactcgcccttgcgcgcggagataacaaggacaccaacatcagcttgcgaagctccaccgatcatgtggtgcacgtaagacttgtgaccaggggcgtcgaggatagaaaagcgtcgttcaacgacaccatcgggtgtttgaatgtcaaccttgaagtgagcacggcccacctcaacagtctttcctttagcacgctcctcgttggtcagatccagagcccaagaaagataccatgtttcacgaccagcttccttcgcatccctcctgtatttgtcaagtgtacgctcatccaccatgccggtaacgtagagaatagatccaccgagagtggactttccggcatcgacgtgtccaatgaagacaatgttcacatgctctttcttttcaccatagatttccttcagtgtctcctcatcaacgtctgccttctgctccgcagcgacagcgtctgcatcacgcttttccttggcaagctccgcacgcgaagggctcgatcgcccagggctgttgcgccctgatggtgccggggatgatttaccgctagcggctgccttttgctccgccttcttttctgtcttctcaacagccttcgcggcgggcaccttggtggcagatataacggctgcaggggccttcgcgtcagagagagatccagattctatatcattgcatccacgccagcgacgactctaagtcatgatccaggcaatactccccgctgagttgatcctgtttgtcattgactgtctattgccctcgatgcccccagttgtgttcagcccaggccatgtaatcactcgcacactcctcagcttgacgctagtttgcaagctggtctcgcgagcagcaaaaaaactgctattgaaacactgtctctacatcaactccgcctatcgactgagtctactactgaagaagggcactttatccgcgaacaatagtcagtcctcgtcgacgagactcttcctgtccccattctcagcaaacaatctcaacatcccgccactcgtgcaccaaataaatgagctatcagccataataagcgcgagcctaactagccttatcatcgacatgcctctccgccatctctatcctgaggatgacgtatatcaggtacgcccaatcctccgcaccgccttctctcgtatggtccagctcagagagtttgtttctatccgcgacgagctttacctcgatacatacactatagacctacaagcgcaaggaccaggacaggagcagaaggatgagccagcagtctggtccctctggccgaacctgcagcgccggtcgctgacaacgtcgccgttcacttagccagttcattcagggcctccgacgtgcttcgacctactaacctgtccttgcccaccaatgtctaacgaggatgtttcccgagggaatgaccagagtttgccgaattgcacggttatcataaaataccgttcggctttcgattctttcaggttgttagaaactgcaaaataatattggttgtggaagatccggcttgggttatgccttaggattgcttaatcaaattgggtggaatttttttgcccctttgagaaaatgagatttttttcccaagtttttaaaacaacaaggttttgggaggaaaaacaaaattgggggggataaaattatt

SEQ ID NO: 4716 - DNA, 3534 bp, Emericella nidulans
gccccgtggttcttccagaggtgcaaccgctttggaacgccggtctatgccgtagggctatcagtcattctgcttccgcttggatacttgacgctcgggagtgaggcgtcgacaatgttcagctggttgtgaacatcacgactgtggttgggttgattggatgggttgtggacgaggccacgtatctgagtttctatcagggactgaaggtgcaggggtaaaatagaggtggtatgtctgaatcattatcagttgttgttcagcgtattctatgaaaaaggaaggtgttttgctgataccaggctatggtaagggcttccatacagaaactttatgcaaccatatgcggcgtgggcgacgctattcatggttgtcatggtgcttttgttctccggcatgctctgtccatctcatgtgtatctggtacctctatattgacatctgatcttgcacaggcttcgacgtcttcacgaaaggcaacttcacagcgtctggctttctaacctcgtatctcaacatcggcatatttgcaagtatgccaggctctgtccttccctaatcgggatatcaggctgatttcgactaacaaaatcctcccactagtactatagatcttcaaagtcacccttgagtccaagctggttccgctgagtgatatcgactttcaatccgaactcgatgccatcgagcaggagaagacgagcggggagtacgtggtcaagtctgagatgtggccttggtggaagagggtgattcgttggttctagggttaggtcttcgccaacagaaaagggaaggttatgggtgccatgaatgcttcaggactagctgtgggcagtgcctgagaaatgggacagacatctgcgtaatatgagatcctactgtttcaatcaaatgtcgactgtactatccagactgcacaagtttgtgaatgccatggggtgaggtggtatggctatctggcattttccaggtcttaaaggaacaggtgaaccaaatggccgggtcaacggccatccttgcccattagtagattcatctgtttgcaatgctactccacgaaaggacagaggaaagtgtctcgagcgtaactcgctgccccaggtagatgccaacagtgctgcctcgtgaatgagctcttgagggctggattgcacctttctcattgggtcatggagagaatctccatgactgaaagtaagatatcaaacttgttcgacgcgtcggtcatggactattctactaccgatactccccgacacagtctcccaaactctcaaacatcgcctttctctggctcctctgcatcacaccctcaatcatctgcctatcctcctcgtctagacaccaccccaaactcgccaggttctcagctgactgttcgctgacacccatcctgcatcccacaattaccgcgccgacatacgggaaatcaagaacccaccgcgtgacgactttcgagatggtcacactgtgcttatacgcggtcacctttaaaacacgcagcagctcttggaaaagcggccacgcaccccatgtgcgaatagaggcgtagtactaccacgcagttagctacgtgtcagtggattgaaccgcgggagtgtaccttgcgctgactaggcgttatcttctcgctgtagagatccggtggcgcctgatcgagccacttttcggctaggaggccgccgcagagggttccgtaagtcaaaagtttgatgttgtgctctgagcagaaacctgccattttaacgattgggcgagaatcgatgagagagaactggtcgttgtcagctgcgctcgcttcgatagaagtatacctagtatcggtacgaacctgaacctggttgctgacgatcttgacgccactctcgataactcgtcgcatatgcttcgtgtcaaagttgcagaggccgaggagctgggcccgtgggtcctgctggagatattgtagggccatgatatactggtcgtcttcgtactatccctgtgggtcagtccgtctagtctaacctgtgaggtgagggaggaaagaaaaaaaaaacccataaactgccaatgaaactgcaagagatcgatcttatctgtgtccagccttcgacaccgttcactaacacttgctcgcatggcctcctcagagagagttatcgggtggaacacacagtatttcgtcgctgcgaaaatcgagtcggcgtatgcactcgacgaacgatatcgaccctgaaatgtcagagaacaaggatagacaggagtctgggctgaagctggcgtctgacgaatatgatctccgcatcgccgtagtagtccgccatattgaaagccgtgaatccccgcgagacatagccagaaaaccgcgcgaaaataaatgcacgcgacgcagagccccaagccagactagagatttgcaatagacccgtgaagatacggggaagctgaacgtcggcgtcgagtgtgaatgtctccgcgatccgtacgagggagggaaactggcctcctcggccttcccatacctcacggcaggatggaagggctctttgaaggtcccaaagagacttcgtatcttccaccgtgaggcccttgtccctgtatgcatgagcaaggtcttctgaatcgctgtcagagcctgcacgatatccccatccacagaagcaatctcatcccggaattcatctgctccaacagtgttgagagcccgaattcgctcaacaagctcgcacagtaacggcaaagcctggtagcatagtccacacccaaccattcagcgtatgcggttctgtaagtgcacaaagagcctcgatgtgtcgaggctgcattcgcgatcttgctgtactttgacgtagtctcgtcgaggtagttccgcgtttgctcctcaaagactggagttaccgacgggtgtatagtcaaaagactgcgcattatgctgcgtaattcgtccagtggtaggctggcgacaatgttgtccgtcatcattttgatgtgcgccgtttggctttggtccccgtggcgggaatcatgctgatcggtttgacaaggtcactgtatgtcgataaccagctaatggaggttgatccgtcgagcctggctggatggaggagacaggtgatgatgctgacggatggtggatgatactagcttctgacgccagcaccgtcgttactagtagatgcgcttcaatcataccgatccgtgatttgctagccctccaattcatctcactccgtctcgtctccatcagcactccggattctccaactcaccttcggtagctccagagatccagcttttcgttcttactgattctgagacatgcaaagagccccagcgttgcgaggtcggcaagctagttccaagctacccccgtggctggcttgttaccgacccacgttgtgtagggagccttcaagacgccgtccagtgctcagtaaagaagctcaagaaagggcgctatagcagcttataaccgcaggaactgccgaacatgtacgctgaaggaaggttgcgcgtcctctatgaccaggggcgagtagggttagtaca

SEQ ID NO: 4717 - DNA, 3097 bp, Emericella nidulans
ggcgctagttgtttctgaaatccacctttttcacgaacattagccacgctttctgtgtactgattagctttcccactaagctcagtaaaaacttcttcatatccagaacggattttcggcggctggctcatcaagtaacatggtgggaccctaaactcacgtcccaattctactctacggggtaggcaacaaatcacgtccatggtggaggtggtcagctttcctatttcctggatgcgacaaccaggtatattagagaaagaaggatagaaaagttgggaaggagggaacagacgaaagcaaagatgaggcgcgaaatcaatatctagctccctcacaaccacaaccacaatgaaatcatagtcacaagccaaacaaacgtcatgcagcaacatcatatccagacctcacccgttcactcggtttgacgtcttggacttataatatatgacaagctcccagcggatcgaaactcatcaaataaacggacaacactgaatcatagcatctgcttcctcggtcccttcagcaacacatggcccatatacaccatttgtacatcccccggactctgagagttatcccgaatacgtgtaataggcgtgatgcctaggcgtacccgtgtgtcagtgttctgtagaacactcgggtctgcgaggacccaaggatcacggttgatcatggtatgtggatcaaacggctcgttctgttcagggaactcgaacttatactccagaggcatggagtacatgtcaatagcaagagactgcgcttccgacactatcgcgtgaaggtcattccacattgggccgttttggttggctgcgtcgtgtccgagaggcccaatatatgcccagagtgtgtgaagatggttgtaaatcttttgctggttgtactctgtgaatccggatttcttggtgagctttgctatgtgcgtggctactgcggttagcattaagtggcgcacaaggggagtttctgcaacgaggtcagttagggttaacgccttgagccgaaacgttaggatgagctgggaagacctactggaagtcatttgctcttgaatctgattgatttctaaatcagcagccgcgtcgaagccactagtaacagaagcgttgaggattttctcgactagataccagtttatggcttttgcgacgaagaaaccccgtgtcgccgcgttcccaagaaggtcagatgctttagttcccctcgatattgccatgaggtagtccttgacatggtcgtccatgtggctatccatgaagacatttggcagactcgcatgcgcatggccaaaaatctcagacatccgcatcagagtctgaaatcggtttgagaaatccgccattctcttatggcaatcagctgcgtcatatacggttgttggagatgtatgatctacaccgttggaaacgctagtagagctgaaaggactgaatacatctgatgttcttcccgtattcggaacaagaccaggaggggaaatctgtgcaaaagaggcatatgccccgggagggatttcgaatttcgggggcggctgatcgaatacggtaccgttctgaggattatattcaggcgaatgcgccggctgaggatgaacctgagcctggctctgggcctggcagtcgagtggcgacggagtggtctgcaaaacacacactccactaccacaggaggcgcccgaagccccagagcccgggcactgatactgatggtggacatgatgctggtggtgactaggcgttatagggaacagccccatacccatgggagactgcacgtgcacctgaatctgtgaatgctgctttctcagagacctaggatcagaaatcgtcttgctctgagtattgatagtgatttgctgtttcttgaccagctcctccaggctcgtaaccttatcatgaaggccactgatgacgtctgtatcgcgatcaatgcgtaggagggcgtcgtcgagctcgcgacggagacgttgtattattaaatgagcggaggaatcgttgaagttgtggctgtaatgctgcccgtagtcaatgtctacgttctgaacgctcggccctgggctgccagggtttgaattagaggtgtcggcggccatggttgaggaggggagctgagtagaaggcacctggatggagtgtgatagacaggttaggagtgggaaggaggacagagagggaacacaagcgaaacacccagtttttaccttcctttaaacgcgatgaaagagccttgggtactcagatgggcagtcagaagatatggatactgtggagagaaccagctctgcacagtgtacgcgggagaaaaaccagtaacaacaaatcaggaggatggaagatgcacaaacggtaagaagttatggaggaagcgagaaggacagactggaagaagaaatccaggctttaaatatggaaatcattgatgcacaccctctggggcactgtgagcgcattttccaagtggttttctgattctttctctcctggattcatggacgactgctttgctgtgttactgtcttagatataatgcttcacccggtgaataaccgatctactttgtacccttgactagcattgattcacaggagaatccagtgatatttgatacgaatgcctctacgcatttccagtctgttcagaatacaagtgatatagtcggccatatcaagcgcaaacattatcccggtgatacccttctagaatcttgtcacgaggggttcctgtgactaacagcattaattcaagtttttagagacagtgatggtcgttatacgcatggaccgcagcgaatatttttgagttctgctatgtggaggaaccaggcaatgtcactcgagaagaaacttttgaagtaggcccattcagttgaatacaggtcaagctaactgggagaggatgttagaaaggctaaaaaagactattggcaccagctggcaggctaccagagttgcccctgggattaattgggggaatttattaactaaaccccaaggattgttatttcaagatgacttctcttacgcaagttttgaaaatcttgagaacagggggtctttctttcgatatttcttaagggtatcaataac

SEQ ID NO: 4718 - DNA, 1574 bp, Emericella nidulans
ttcaagttctcacactcgttgtcgaaggttgtgcagggaaggcatattataatggcttttcggcagagacattatgaaatacggagccgaatggaaagtttgaggataatgcaagaaagtggctattgggagttttcgtgccttttgcttatgggtgtatggatggcaggatgagtcgaggccggcttgccgaacagtacggctaatggtaatgagagaagccaatacagatatctcactcactgcgccggtctacctcattgcgtggctgatcacgaagaaagcgagagaggcgtattcccgggctgccgaatgaggaagtttcggctgggaagcccaagtatgcccccttccattcagccaaaacatgaccatggccatgttcatgggtttttagggctccaggctaacgcatctgaaagaattgtgggcctttactattgccgcttgataagcttcctttgcagagggctaccgagctgcaccccgggctgtgagactgtcaaggacggttgttagggagccgagctcgctgccttaatgctttacatggaaattatatgaaggcaggaaatagtccactatcagttccactgcaggataaaggtgatttacgcgcacgttgggtggtatagacaggacttcccacgtcaatctactccctgctggtcgctaccgacaatactgctttagtgtattcctccccagcaacagcaagatgcccgacgtgtccactgccagtaaattcaacagtctgaaccagatcatcgccgctctcagccagtttccgcgcctcccctgcgtgaatctaggatatccgtccacggaaccatggcatctgtccgagaatacagatacgtccgtcccacaccgtgccgcaaaaagcaccctgacgggctgttcagaacatgccgcgttttcgatataacattttggtagagtcgcagaaagtcgagtagcgccacagtcgcaacaacagagtaaattaaaacagcaccgagcagccttaccagaggagatttgggaagtgccaggatcattgcgtttgcggagagtatcgctgatggcgcgccgggacagctgtccaaaatcaaccccgttactggcaagcttgcggatgggtgcacggcagtatatgcttccgccagctgcactgcagcgtggctgccagcgttggagaaagcgtggactaccagacgatggctctggtcacttctggtatctgagaatgcgtcgattgcggtcactgctggtccaaggtgctggagctgtgcgtattccggggtccaaaccatgtcgccgacgacgggctgaatgagcagaatgtcggcctctggaagcttgctttggtagatctggctgttcaagcgagaaaacgcccccaggggcttggatgcctccatatcaacgagcgtgggaaatggtttggcgtttagagaaactcaaaagagattgaaagaggggaggcttccatttgttgggaagcccaggattctggtgggatcaatatataagggacatgcaggggagccgccaatgattaaccaacaccctttttgttgttttacctagta

SEQ ID NO: 4719 - DNA, 4178 bp, Emericella nidulans
atccggatgggacccccttccaggtaggtttccgttggagcccttggaggatctcacgatcgggacgtattcgtcccagttgcgctgggggtggcatttatgcccccaaccagatatgttgcgggggacacacgatacatgaaggtccaaaatttgggtagatcggccatggatactcccactctgttttctggttagcatacgatgaaatcagcatgttgagtttttactcgcccgcaaaacaagatgcacagcatccataaaagactggtaagcacgccagcggtttccggaaggtttatccagaagatggcgaagtgcgccatcgtgctggtaaatagtagataaacccataggaatagaaatacggcgaaaccacggatagcttggtcatcggaggtggtgttctggacgaagcccacagggtaataccagcagaagtacagtaagactgccatgagagtctgccagacgagctcaatgaggatattggagagtaggtatgcttcaagaggtaagttaaaatatgcagaaagcctcaagtgacgggcaaagtcttacttgtccatcgataaataatcgaaggccgctcacgcgcctcgtatagcgctcgttggggtttgtatcatgggcattatttgctcagtaatgttgatgaacaaaatgagcaacataaagatggcccatagttgattctgaagcccttgtatcgaattgttgacattgaaactgaaccctaagtaaagagactgatagtcaaaatatgattagtcccttgcagagagctgacgacgagttccacgtacagaaaggacgaccagtataattttagaccagatgtaagtcggtgatcgccaaaaatgcttccaggtacgttgcaagacttggctgaactgtgtccagaaggaagccacgaactcctggtgctgagagctgttttcaaccttaagaccctctccgcgtgtagatcctaatgtacgaagatttcgaaggtgaccaagcttagctttaactgcctgatactcgggaggagccaaccatatttgatgccaattaagcccttttgagccatagcaggcgggttcgaaaccccaagcatccactctttgggtttgctttcggttggccagggaggggccccaatttttgaaatattgtatcagggttgaggccaccctggcctagatctgaatattatcagatcagccattgatcagaggtagacaaaagaactcaccgccgaagtatacggtctttcctcctggtgcaatcagaagcagccgatcaaattggttaaacagaatggcagatggttgatgaattgtgcagagaactgcctgaccactattggtgagcttcttgataagctctgaaatgacccatgaggtctgcgaatccaaccccgaggtaggttcgtcgaagaagactaagagctgaggcttagcggccagttctacaccaattgttaggcgtttgcgctgctcgacattgaggccctctccaggaacacctataacggcatccgcaaattctcgcatttccagtgtgtcaataacttgctcaacataggctagtttttcagatttgggtatttcggcggattgccgaaggacagcactgaactgtagagcttcgcggaccgtcatggtgctcagatggagatcttgttgttgaacatagccaaccttatgctggaaagacggatctgtcggttttccgttcaccattgcttggccagtcacaacaccggtggtgacacgggttgccagaacgtctaggagtgtcgttttacctgcgccagatacaccctaggaaggcgacgcttagctccatatcccttttatagtgatagttcttaccatgaggatagtagatacccccggtttgacccagccatcaatatggtctagaagacggcgggtcccacccttgactttgatatcatagcagagatcctcccagtggaacacgtccttcccagcaataatcgtgtcagactgcagtgaaccgtgcgttttatctgccactactggacgatccttttcttgactctcagcatccaagggctgttcccttctatggaatcctttgccacgaccgaataccagtatttcaccgcgtgtcttaggtggcttggcaagttcggcggcaagcacataagtagggaaaaagattgctagaaatccgcagagaatcccaatattcctattcgagcgagacccgttagtgcactgtccttctgtatcaatcgtgtttttggaattcactaacctccatttgtgtacgttccaatagtcaaacgacttgctgatgtagctatccccattgacaagggccgagccaacttcagagcccacaacagagcatatttgtgatgccgatgggaggttagcgtatccttgtccggtaggcaccatgctagcacatgggaagtcccgttcatggaattcgttcgccatcaaagcctcaaaaccgtaccatagggggttgatatacgccatccaccgcgaccatcccggcatataccccggcggcgttgtaaatcccgtgtatatcatgagcccaagacttaaaatggcgcttgggatcatagcctgctcggaagtccgagtaatgcaggccaatgtgcgaaagacggctgattgaactaaagtgctgagaagtgtggtgagacaaaagaagaagaaagcacccgcttctcgcctcagattcgccatgaagtaaatgagaatgttgaaaacaaacatattgatgatcttgtagggtagatccatcaggtagctcgcaatcgcctgagcagactggtgatagaaggcatagcgattctgcttctcaacaactgggcgctcggcatagatagtcagaacctatattccagttaggttagaaaagctgtcccaccgtaccgaaaaattgagcttagacggaatcacctcgagctgacttgcaaatgcattgaaaaggagcgaaaagtagataatccctccacggtaatagaagctagaggtatctggcttgagattgtagaacatgctacccaatataagcgccatcacgacgttgaagagcaaggaggcgattgtgaaaccaggatcagctagcagtcttcggtaagcccgccaaagagtcagagaaacttgctgagggtatgatatggtataagcagacttggcgcgctgctgctgagcctgttcagctcgcctggaccggtcgtactccgccattcgcacctctggggggtgtttctgctcgtatgatgccagctcatccagtagcttcctcctttcatcgcttagccgccatcgttctgcgaactcatccggtgagcgaggcgctgattcctcgaacccaggtctcacacgtcgctcctccgcactcgtcatagacgtgagaaaatccgggattgtttgtctagaaggagctttgaaagatgttagcgacctgaaggcacacgactcattcacgctcaagaactcaccaaaaaagcccagtttctcgaaataaccttttgcttcggttatatgaccaaagaatatttgccttccctcatagattaaggtcactcgatcaaagagctaatagaaatgagacgaattttatcagcaagagttggtaccgaaataaacttaattttggtagccttacatcgtaggccgcctgcggtgcttggtacaaggtaaccacagaggttacatcaagaaggtctgcttgaaggcgtaaactgctgcagaagttaatggcattagcgctgtcgagcccgcgcgtagaattatcccaacactggaatttcgccccggcgagagatgcttccgcaatactgactcgcttgcgctctcctccgctgactccacgcacgaagtcatctccaacgcgagtatcgattgtatgattcaagccgaaagtggccatcatgacatcgcggcgtgctgtgtccagctgcctgcggctgaaggcccccggtacgtgtcgtacagagcgagcacgagaagcaaatgtcagagtctcccccacagttagatgcgccaggtgagtatcgagctcatcattgtacaaaacgtctccacgaaacgaggaacggacactggcaaggtccagccctgcacgagaatagccaatatctcaaacaccaagatacgagggaaaaaaaagaaaagaaaagaaaagaaagaaagagatca

SEQ ID NO: 4720 - DNA, 8097 bp, Emericella nidulans
  unsure (1)..(8097): unsure at all n locations
ggccttattatgcgcagcggcttgtcaaagtgaaaatcgagtcaattttgaaactggttatccaactgggagctggacgaacagcataaaacaggccctgggggattctggtcaacatcatcgccagttggattaaacacatgagacctgtccatcaatctccccccaatcaattctcccatcccttcgttcctagactgaaagacacgagtgaggataggcaggatatcaagcagcgcttccaggacaagcggtgcagcagcacttggactatactacaacaaactcaagcataaggccacgagccacgagctaccgctgcaagcgtacagagattgattgttagatgtactgagaatggaccgaaagacttatagatagaccttggatccgcccaatagttcatctggtttcaaaagccctcactgactcgatcggtcaatttccgcaaagtcgctttgtctcttaccatcgtatcataatttaatctgcattttcaggaaacctgcaacatctcattgaaagttccttcttggcaaactgtgccgctttcaaccctcaagggacacccatccgtatgacgatgttttaagcaagctagacaattcagcttgcatatactgcgctatcccaagaaattttacattccttctcaccttctcaagctcttccgtgtgggttaaggataagaatatggacattagaaccctagctgtttccagagccgagtcgtctcaatcatctttcggcataaggcaggagtttcaacgcaacctacataacccaatgtttccctttcctgtgatttattacctccttttgctggatattgtatcttaggacctggtaccgcactgaggcccgacataatccactaacccaaaggttgtgcggtagcaaatccgaaagtatcataagagtatataagctgagagttccagattaactgattccgtcaatgtcagataaatgcatacatgcatttgactcgctggtcgatagtcgttctatgctaatttctgtgtagtgcaatgttggttgcatccggttgcatgtaccttgatatacttggcgctactagtatatgtttcattgagaaagaaaaaaaaaaggataagagaaaacctgactagtttttagtgttcactatcaagaacaacttcgtaatcggacccaataggagttattctgccggccaaaacaacgcctttatacgtggacgtggactggagccgtatagaagagccattccccgttaaaggaaacaacaccagatatccaaaccagcttctgtaagctaagtaatcagatgaacactacgctgatacaaaaatgctatgtctatatccccatatttagctatctgactacagccaagaaaaaccacactcagaagaactggcagtcttctttatctgcgggcacccaaacagaatttccatgaagcagcaacacctactggatattgtaacgggcgtaggcagtattattttcaactggctgtcctgtataaacgagtatcacaagcttagagaaagaaacaaaagacagaagcgcagatatcttcctcctccttttatcaacttttctgacttcccggacctgtatgccgacggatcccttttccaaagttatgaggacggatttcctttcctaagcttcgaggccgcaatttccgaagctgtacactgatgttgcagaaaccttatttagaaccaggttgagggcatggccgacaaccaagatccaggtcatagcctgtgacagggggcactagcactccatcgcaacggtcatacctagcattggttcttacctcccaagaccaatactgccgaaatatcaccctttacgagactggtgaggccactacccaactctacaacctttttaccaagtcgcatccaatcacggtgccgtcaccgagcgcgctgctgtccaaggattgtactgtaaaaacatcatcagcaggcaacagtcatgagatgatcgaacatactatcgattggattcgagccgcattggatttctgcggaccggggtttatcgatgttctctttggggagtttggatgactggctgttggccacccgcacgagattagcaggcaagtactagtagtcaggcggatggtctggcgggacgagagaaacaaggggagtttgaacagtctggctctttgagaaaaagaggcaatggagagggttgatgactggaatgggggccatagcagccaatctgacagtgattaggtaaagttcgagccgatctggacatgcagaagatgcttcattacatttactatatactacaggcttttgagctcgttacgttgacttagggccaattcaatttgccagtcagcgaacccgaacttttgaagcccgaaatgaaaaaaattcgctatcaatggtctcatccagatggagggtcggaaaatatattgaatattaaggcttgtaaaagagaggaatatattcaaagttgaactaattggctttaacctcagttgcgaagtcttcggtatcactttccatttccccatcctcgacctcacttttgtcctccggcaagcagagttctcatttgattctgcccattcctgggtcatttcgagcttttgccaacagacggcctgctgctagagctcgcctctgctggcaagctccctcctcaggaaatccgtctctgctcaattatgcaacattcatacctccttgtcgaaggtattgccacgccggatctgaacggcttccatatcaacctcgagccacgcgcagactggtagcacttctgccgaccagcctgccgtaaatcctgagctcagaccatactttacctattgaaatacagctgaaaccaggcacagggcttcgagaatacattgggagatattcatctttctgaggtacatttgttgatagcgcggcgacgctcaagttgtacccagttactccggacatatcagaaaccctaccaaatactcagtgtattttccattgtaacatgcaagacaacatcgcagcccccgccactctggctgcatcagcgagactgagcccgcaatgtcacagaggcgccttaaaagcgcacactcccgtaatagagcgactggatgtctggggctatcggcgcgagaaagcagcctcactgacttagactgacttcgacgagagttgatgagtcatttttgggacgcctgtcgcccggaggcaggagcttttctatgctgagctgcctgacgaacgcctgcaccgtgaccagacagtcatgtttattggatactatcgctagccgtcagccacggctgcgtgagctttgggatcacctttgtccgccccaactatgcttattctaaaaatactacaaagttgggattgcattatctaagaaccacggcttaaaggctttactcggagtagatatgggatgcgcattggaaagaaggcaccactgacaggcgggctgagctagggcctttttggtgatagagttcttggcaattacgtagccacctgctttgagccgattattggatcaatggtgacacctgggccgctcgtccaacacgttaaacctagttgggctggtaacatgcagactcatgagcagtgccatgcctacagatctcagagtatacttgactattcgtgtagataacaggaaaagggaaagcgattcactctgtaacctaagtctataacaacttaatatcaggacccttatttcagagtaaaaagtacccgttgcggttgttatagttttctgtggcttgctgcggcttgttttcattactatggtttgtgtttatatatatagctacctatccagacactatactgctagaatactaggctgggagtcgctatctatacaacaagctttcgcctcgagaggatcgcacacccctcgttcaactggtcccaaacatgagcttctagacaagcctggcgactcaaccgaacagcaggcgccgtgcgctcgcgcatctcacgttcgtactcatcgatggcgaccttttggtctcccccagcatagatagtcgcgatggcttcgattaggtgaaagatgtcgagaaggccgtggtttgctgcttcgccgcggtctgttcctgtcagcttcacaattgcaacctaatcaccgtcaccggtctgacagagagaaaaacggaaaaacgtacacatgaccatggcgtgtgcggcgtcgctggccaaggtaactttgccatctctgttatcccacggcagacactcccagtcggcgaggctgacctcaacgaccggcgtcccatcgggaatgcgctggacggtttcgtacaggaacggcacaaacccagccgctcgcttcttcataagcgcgagcctctctttgtcagttttgggcacttcgtcgtctgctgtcttcacaggccaggagaggttgatctgtacgcgccagagtccgttgacattgttcgctggtgactccaagattgagaaccagaggtagacccccgtttcaggatggcagccttggaagagcaagggatccatatttcgcagcggagcaacctcatcatcagtcagatcaactgcgaccccaataaatcgtaccggaagctggacgttacggtaggcatcgggtcgaaggaagcgccgcaccgtcgaccggctgccttccatgcccactaccagctttccggcgacatgctcctctacgtcaccgttacagaataagagctgcggccgcccgtcctctgtaaacgtcactccgtccacccgtttgtcgaaatgcacatgctcttcaatcccggccagtaatgctctgcgcattttctcccgattcacgcgccaccttttcgaaggtgggattttgaatttcggctcgccggtcgccagattgatgaagaggaaattgccattgtcgttccgagcaacttcagggtctacctgggcgtcttggatgcgttgcagggtctcagagggaacgagggcctcaatgtattgcaatgcccagtgcagagttatagcccatccttggccacgactgtcggggtgggggtctcgctcgtagatcacaaatgggatgtttttctgtgatattttagcgttcttaaggccaaggtacaggaagagaggtcaaaggatggtacctgtttgagggcctgtccgagagtcaggccgactataccagcgccgccgatgaggactgggtccatgttcccacggtggtgaggtcgcgtaaagtgggatgttgtcagagtgggaggaagtaagctgagacactgctgatatacgaatctctcgcactgcaccaataggacagtccgcgagaccctgcgatatttttaactagacctaatctagcccgtcactatgcaccactcacgcttcgcccgtcttgaccccgctcacgtcgatctggaataagggacaacatgccagcgagtccacctcacagtctgccggccaaactgctccgttctctattcctacggaaccgctccagcgctagacctggccctcgtctacgaataagagggactcgccagcgcgacaattagatggcgcgccgcttttccactgtcgatgaccgcgtcagggattcagtatctgacgatactgactgatagcgttctaggcgtagattcgcacaatgagcagaacggattaaaggatggacaaagctgaacgttaagtcaatcaaggtttattcttgcgaccgataacgacaccagcgtcatccacttcgacagctctccagaagccattgcggtgtttcaaggcttgtgaaattgcggttatacacgaggcgacagtgactaatgaggcggtttacagttgggcactgcgattgcgacccctctatctcgaccagcacagtggaggtgcgcctctcccgagtcatcctataaaatgatgaaaattcggactgacttgaatgctgcttaaagaggctggagccttagtactcggagaagaatcaacttacacacaaaccctcagcgtccaatgagtctgcagttggcattgcctacagcatcaacctcatgtgcccttgctattaggatcctgactcgttccatgcatttaagcatatctagtcagctgaatatgattgacaaacatcgccctaacaaggactcattcggtggttcagacgcacgattttgcgttggtgactgtcatcctccactggatgaaaccagtgtaatggtttggcttcttgctccagaacgtgatttccagaatctcacggacattgctgacgctgccgacgctctcgatgggcgcaatgccgattgatgccaatctatcaaatgcgcggtggttggaaccctttactgacgatatccatctacgacttacggcgcacaagatgcccatcatgtggtaaatggatggatcgccaatgccgaagtagcaggatttcgattctccattccctgagatggcgactcctagggaactaaaaattaagctaaaacaagtagagatgtgctggggaagagattcaaagctccaaaccgcagttttattgtgatccactcgatggaagataggcgtgtacgataaggccatttgaaagcgcgaaatgaggtttagacagggtcaggatgcgaaggcatcctcttgccttccacctcttgatagcagctgatgttagcctgccattcagttttgagatgcggtagaatctggtggttctcttgctgagtccgtatttcggtttgtaaggactaaccaacatgtctgtagttcccgacaagatactcagtctgccaaagcagccatttcgggacccagcaggtattatcctgcatttactttgcgatgcggaagaaaccaagtaagctttttcaggagcccgaatcggaatacacgaccagcagagcacgagcaagcccacattgacaataacaacatatagctgccccaatgccagcagtatagatgattactatcataaaaaaaatgcccgggtattctaggaatgccaacacagttgtcatgtggcaccagtcgtcagctgctacggatagctaccggccgagtcgacagagtcagaagaggcatggattctcactccactgcagcaagcctacaaaatcaccaaaccggatttggaaggaaactcgcagcgatggaaagaatgatgtcaacatgacgatgtacgtttgttgatattgttgtcgacagaggacaaccaataagcacattatagtaatcaaccatatcaacactggatgaaggggacatatatcgcttcgctgaagcaggtagatatcctagaacaccataacctgtcgcgtgggatgtcgtgtccgcagaggtggcctctagtttgattcgcgatggagacttcggcagctgtatgggagggcggcggggtagacgtggcctagcactttactaggagtcacaagtgaactgctcgtaaaagatggccttaatgagccaattgggcgattctcagtataggatcgacagagaaggctgtatactgagaagatgggcgggtaagaggtggatatgcatccggcaggggatttcgtactacgtagctctagtatgctgtctggcgactgtaaccgtcagccatacttggacaaatatgaccgagaaccgtgaggtttatgctttagagtccatacactgtgagcaacgtccattcttccaaagccccaaggccaaggatgtcatgaccgtcagcggcaccatggccggtagacatctcttatctgtcgtgctggaatcgatctccgtactgctcacttgctgagcatcaacgcggattaaggccttccttgccaattccactgatgcagaccaacttgctgttacggtctaaagcggcgtgccctcatctacgatctgttcagcagnctgcacggcggttccctcgtgatgaatagcgggtttctttgttcacaaattgttgcggcttggtctattttgattactgggtactaggcagcaagcccgttgcattagaaattgttggatgtaagacattcatgctcgcgtcggctgatgaggctgcacgtcaaaaccgcggcggcgacgaattgtgccatgactccaacgaataaacaccaaccataatcctaaccttcta

SEQ ID NO: 4721 - DNA, 1762 bp, Emericella nidulans
  unsure (1)..(1762): unsure at all n locations
gcctaggggataaaatacaagtcaaaaatatactatgaaataggaaaaacaatagggtaaaataaaatggttttggatgaacctctaaggggggcaatattgcatggtcgaatattggaatgagggatacctcaagccaggaccctatcacaactagcatccgcgagtacatgaagggcagggggcatattagactcgagagggcttatactgtcctgcatattatagcttcaccgtcagtgaccccattccccccttgaccgagatccctgtgtatcctggaagctgcacccagccgttagacccagctggcgtgtcccaagtgacagtcgctctcttgccctgagaccctaaacgcaggcttgaacttgcccagccccgtggtgaacccaggctgcgctttctcaaagccctggatgccaaaactcgccggcctgaggctccactcgctgcctttgggcttcgngatcttcagtccgaccgcgtattcggtcaacgtggaggtcggaccgctgctccatccgtgcgcatgagacacgtaccgcggatcgttcctgtaccctctgtcgccacggtacccccagcttccgtccacaaggtacccctccggcacggtcgactgcgttccgttgggatgagcgaggtaccacccccagagcatgcggatcagctcgatggcgcggtccgcatggcctgaggcgaaatgcccttctagctcgattgacgagataaacggggagatgttgttaggcaattcgggcacctctgggccgatgggggtccagtttgattcgaggtaggaggaaacgcgggccgcctcggccaggttgaagctggagctgcagttgagaggcgactgagaaaagaacgaaaaggcgagggccatgctgtttgcgtcttgcggatagagagtcgagttggggctgtctctgaaggcgccgacggcggagtcgtaaaggtgcgttactatggcgctgcggagggtgctggccagatcggtgtaattctctggattgtctcctgcataaggagcgaggaatgcggctgtcgtgagggatcggtaaagactgcgtctctattagtgggatgctactgggacgagagcaggacaacgtacagcatgttcgcagagctggcgagagtaccgtagttccagcgaccccagtctgcagtctgggtggcattcatgattccaaggggagtgattttggccagactgtagtccagcgccttgacgtatttctgccagatgccagccaggaagtcatagtcctccgtgaagaggaagtaattgtacgttccgataatcgtccacaggtggtacgctgcaaaagatgtcctaatcagtaatctggacaataatcatctctgcagctccaccacggtctgctactgcaaggcgaaaatatgggggaagaacgtactgtcactgtcggccctcaagtacggcggcccggcttttggcaacagcccgctcggtgtctgattatcccagatagcgagtagcgcattcttcgtactctcggtatccccagtactgacggacgcactgggcactgcaacgcccatatcgccgatccatacccagcggtcacgcttcgccccatcaagcaagagggtctcgcccggcccgcagacggcgttgttatttcagcctgtggctgaactgactgagacgcggcacgttgtgcgcggtacggagttggtcttgagggtgtaggcgcctgcttaccagcctttgtgagcacagatccgacagtga

SEQ ID NO: 4722 - DNA, 3277 bp, Emericella nidulans
gcggtcccgtgcgcagcatccaacaaccaatatcgtcattcttacaggcaatggacgaggttcttaaaatatccttaaatccaatccgaggttctctcttctctttcgtgttgactcaaatttggaccccacgcgactccgccaaccttgctggcgattggatcaggcccagaaaaaagcagaaacaagctctgggctgcttgctgagtagtgatggctgtatgtcagcggaatgtttccgatgcttcataatcaggttgcctttattcacccctggggctaggtgcgtgcttcggttgccgttagcggctgagtccatacttcccgcctgcgccagcatggaacggctaatcggccacgaacaactgttgaaacctcgggatcatgtagacaccacgttgcaacccaactgctggctcccgggcatacagcaggggtagggtgctatacgctgtacccgtgcgtatgccactcgattcgaggatttacaccatactatcagtcatggcttagaccactcagaggaggatcagttcgtcataataagccgagacttccacgcgtaagaaatccaggaattacgtgagaatcatgggtccaggttcacggatagaatgttattgacacttgttctcagttgtatctccgtattgttttcaggtaaccaaccaaaatctaacaatgcagtttgaagatatacgggtcttaagttcatcagccgtcacgccatctttccattgctaaaacgggcccttaaccaaaaatggctggttggtgtagttggttatcacgtatcgttaacaccgataaggtcgccggatcgagcccggcactggtcatgaaacttatctagagtggtctctggatggagttttgttttttgcccctcatgcacttgttggaagacctcccgataacaaggggctgtacatgcttgggccattgttcttgtccttgttttcagcatctcggtagagaatataatgttgcaccatgaaaagcagatcgaaaaagatgctgacattcgacaggaggaacttgataggattaccggtgacaccactccagtcatcctgaaaagcagagtcgagaattagctgagctagcgaaacacgcccccagtgaaatcgagcaaaatctggacaatattccagccacgtgtggattttcgcttatgattgacccacgcttgcggcacgtacttgacaaccgtgattacaagcttcacatacgaaagagtgtaaatctgcggctgtgtcagacctgttcaaaagtatgctcatgtttaggttcctatgggctgtacttacgacgtcgatccaagcccagcttaacggttcgtagccatcgtctggactcttgactaagataacgcatataaccatagcaacggcgacaaaagcgccccaaaacagccctgcgatgggcttactgaccctctgaaagcgggatactctgaagccccagatactgggccagaactgtgagtagaccaacccgctcaggacgacggcatgcagggcaaaggcaaaatcattaaaccgcacagttggttccggcgccaaaggatgtcgagcggcgtactgatgacgaattacaggagagtacaagaatgtccctgtatagacggcatagcagacgaagccgaggacattgatcgtggggaaatcgatagccagtccggtggtcgcttttcggcggtaattgtcaataggctggggataaaaggatgcagaccaacagaatgtacttgacaacgtcattatcagactcaaagaaaaacgcttgttgagacttactagatccatccaagaaggctgcccgttatcgataccagcagttagttatcaacctccaactgtaaaaatttcgcaactcaagttatatcaccacctaccgcgagagagccctgataaatgcttcgagttgagacatcgcgctatttgtcgtcagtccatgaggggttggttaggccggcgtcctggtcgggcctctcagttggataaataaggccaagggaatggtggatcgcgtgattgtgagtgataagatagcaattctgccgaaacaaaaggcggtagaagagtggattatgactcagcaatggttgccctggatatgatattttgcgctaagccacaaatggcaaactgtcggctcccagcctctcaacttctgcagcctgaacccagtctgtctcgatcgcatgcttttgcagctgaccttctttcatctctttgaaacttctcttgccatttgttgttgttgtctttttttgcggctgaaagttgtgtctcttttgcgtggtgatttcgacattccacctcttccccgcctcgacattattctactaccagctattactatccaacggccagccattgattactccaccggtagcatcgatcgcataccagacatcggtacattccttaattaacctacacaatcacgagcagatatccacgtttcgatcgagagaccaaatcctgtccgtttagctttatcgtttatcatcgcatggtgcattccacaaagcggggggtctccatagatctccttcagtaatatcgcctgctgccttgaatcgtctgaaggaatccagctcgataaatcacagtgcaaccatgtcggacaattctgggctcacgtctcctggggaggcctcctattcttccaatactctgcatgtgggcgatggaacatgggactcggaccgcgacaccttccttttgcccaatctcatgggtgtgaacttcgagactatgcgatacaatggtatgtggcagcagtaatcactagctttctttatctcactaaccgtcttacagggatggggaacagatttcgagatatgccccattaccataccctgattgttgcccatggtgttatcgcgacaattgtgtttctggggctggttcccttgtcgatcttacttgtgcgatattactcgcttcgaaatccataccaggccttcaggtaccatgtgtggtgccaggttctcactctatttctgagcacagtcgtgttcgttctcggttggtttgctgtcggtccgaaccgcagccttacaaacccccaccacggcatcggtctcgccatctacgttatcgtcatttttcaagttttctggggctggcttgtccataagatcgaacggaataagaagaggtccatgtgcctctgaagctagtggtaagtaattccgccatgctcgttatgccagccctaaccgtactatagcttcatcgttggatgggtcgggcactggcga

SEQ ID NO: 4723 - DNA, 5692 bp, Emericella nidulans
ggtcatgggccgtaggccacgatttgcggcggcaagccagcgccgaggccaccggattccacgttcccattgtccagtgccccaaaccaggagtgctgttgccacacctccaaggagcgcgacccgttcccacatctcgaccatccagtataccgatcctccaactccacgtccgtcctcacgcggacgcaggaacagcgcgtagccaaagtatgtaatccatgctgcgagcaagagcaggaagaatgtgttctgtcgccggcgttcccgtaacgccagatactgagctctgagtgagctctcgagaatgagcaggttcaaatagatttgcgggggggaagaaggcagtgctgaaagaggatcgttggcggttgtagacgaaggtgtcgatgaaaccgatgctgttgatgggtacgaagaggagctagacttcaatggctctgcagacggggctgacaacgaacgtagacgattgctgggggctggagagcccttgactagctgatccaagctcggtgcagccatgatgagtgaagagaagtatggtgggttaaggccgggtctgggaagacagctacgcgacgacgggaatttgtacagaggaagaccagctgatgtatgtcaataaaaagagcatggccgctggacaacgatgagctatattatcgcatggaaagggaacttgaagcgaggatgaggaagaggatgaggatgaggaagaggatgaggatgaggaagaggatgaggatgaggatgaggatggaagtgaaagtgggctgccttcccagagtttcaaggctggaagtaggaaagttggggaggaatcggaggatcgtcttgttggcgggcaccaccgtgacctctaccatcttcaatcagtctcgtgtatctcgacagcgcatccatactctctctagcgtctctatgtacaaacgatagacatttagtccttatcgccgcaccgccgaatttcgctcgtttgcgctctgacgttgggacattccattgggtcggggataatcgggctttggcgctctcaaatacttttctccgtcaccttcgcctcctttgttgcctacggccattttattatacgaccgagagtaacagacggagagctcttctcccctgttactccacacatttgcgtgacaaagtgccagccgcccgacttctttcgctacccattcacgcgccccgactcagggcccccattaccccgaatatcgttgtttctcgacgtctgacgtcgtcgatggcatcagaatcattaaactcgtctcgaggcgagttacaagatcagaatcaacaaagttcttcagcgaacactatccctcacgccgcacgcggagccgtcgcgactccctcgccaatggcttggtttcctctaggttataaggaagggttcagtcagtgggtatgatctccgtgaaatgcagagttgccacttgctgaccttcatgtagtggtcttctataccggctgccgcggctgaacataaggtcctttcctacttaccgtacctccaacatcaacccgctcactcagttgcaaaccgggaagacgaccaatggctcgagcggtgaaaccccaagtttacaatctgcggatcagagccaactcggccaggtggcggctacttctaccggtgacccgtacggccctcggcgatggctttccagcatggtgcagctcagtggcaagaaccgggctctcaatgaattctccgtcgacagagtagggaagaggcagatcagcacctggttatgctacatggatatggagcaggcttgggattcttttacaagaatttcgagcctttgagccgtctccccggatggcaactccacgcactggatcttctcggcatgggccgcagcacccgcccaccctttcgcatcaaagctaaagagcgcgaggctgcaattcgagaggctgaagattggtttgtggatgcactggaagaatggcgcgtcaaacgtaagattgaacgcttcactctgctgggacacagtctaggcggctacatagccgtgaactacgccctcaaatacccgggacgactgaataagctcattttagcttcacctgttggtataccagaggatccatacgctatgtcttcggatcttcccgagaaacaagaccaacccagcatcgccgccgaggccgcaacggtgccactcggagatgcgcccaagggcgacaacaacattcttctaaagggccctccggcagatgcctcgagagaccggcctccccgtcgcacagtcccgaaatggtttgcatacttgtgggaggccaacatttcacctttcaccctcgtccgatgggctggaccacttggtccccgcctcgtctcgggctggacatcccgccgattctcgcacctccctgccgatgaagccaaagccctccacgactactcatactcaatttttagccagcgtggtagcggcgagtacgctctcgcgtatatccttgcaccaggcgcgttcgcacgcagtcccctcatccgccgaattcaggacgtcggccgacagatgattcccgcctccgtaccttcttctccatcctcctcttcctccacgacaacttccacggaggtggccaagccgcgtcgcgagaccggtatccctatcgtcttcatgtacggcgatcacgactggatggactaccgcggcggccaggccgccgcagccaaaatccgggaggagaagcgccgtatcctggaaaatgctacgcccgaagaacgcgcagcagatagtggctcagccaaggtcgtcatgataaaaaattcagggcatcatgtctatctcgatggatgggagcagtttaatgacactgttcttgcggagatggaagatgtcgcgaagagagagagggcaaggcggtgattattctcaacatgctgtatatgatttgttttttttagcgttgattctgagcacgggttttggtattgataaggtgtatagatcagcgaagcatcagctacttcattaggagtagttttgaggcttgcctgttaagttaggtaggcgacagaagctccagcttctatagaagtacataggtatgaaaaccaatagaaattaaaatttcttagctttattttggtcatcactcattatttaaaacgactcggtatatcggaacaaagccaaaatatttcttgcatagatgtgaatcaggtcatcatgtcgttatgtctcttaagaccgaagatatatcagaacagtcaagagcctacaaaggcttgaacatcaactctctttgggcaatcaaggatagtctcagcgactccctaaaccgtggacttggtgaacggggctttcctagtacctctacattcttgtgcagcattagcaatcctagccggcttgcgctcttcatttggggtcgtattgctggtcgtctgagccccagtgccaccgctcgcactcagcggctacaaggcaaagtaaccacctgtacctacactgggtcctctagcccaagaactagacattgaggcaaacccggtagtctgattctgtctccagtgctcagagagcgaggtatgagactttgaacgcgaagtgtcacttctggactgtgtagccatctgtgtttgggtccgtcctcggcaagaatccaaaccctgactttgattttgattctgagcttgacggaggtagacctgcgaggctgaaagcatcccaagtcgaggcacagatcccgacagtgcaagtgcggaagtcgttgctgacctgcgatgatgccgcttctgacccttattcttgctccatttagagtctgtcactgctgagactgtagacggcatcccgatactattcttgctgctgcgagtccgccaggggaggtgcggctgtggatctggggagatcgaggcatcgccgccactgctactgccgtgcgtagcctgcgcaagagtatgcatacttgcgctgttgctgtggttgctatgacggagcatcagagggatatgttgtgaggggagttcgaggcggctgttcatggacagccaggcgatatcgtcaacttcatcactgatgctgtttgacttggtcgaggacggtgtcgtgtggccggagcggtagcccggggatttcgtgtacgagggtggacaacgccagcctcctaggccttcgaagtcgcggtcttcgtcgccgtttatgaggccgaaaaagccggaggagcttttatggtgtgtggtattggtactactgtttctttgtttgttctcatggttcaaattcatggtaggaagggcatcttggctatctataagcgggtttgaggagcccatgcgcggaccaagagtaggacggccactccagctctgactttgatcctggtcccgaagggacgcgagcggggtgcgtaggatactatagtctgacgagcggcgtctaaccggggtgttgggccccgagacgctgaagctgaggagagaccagtttggggaagggggaatggtgaagaggtttgtcacaagggcgtagcatagctcgattgagatgatagcgagttggatagagagcgctgccacagagaagaagacagtgatgaaggcagttatgacgagggggatagagattaggatgaggaatgggagggtcagcagcgttgtggtggtggacatgtaagcggctgtctgtcctaaaacgttgctggttttcaagttgcacagagaagctctgtagaagaagcaggccaaacccaatgcttcatagctgtatcctaacgatacagaatcattgcagccagaaatcagtctctcgtcgccttcgtctctgcagcattaatatatgttcgatgaccgttagagatgcggagaaagcatgtgatcattaaatgcctcaggcaccaacacagtctcaacattacatcagttgcttctcattatccggaagacattctatccaaaactgttccaatcagtataacgacccatgaaccagtctgaatctcaatatgagcccgactttccttggggaattggtgtcttcgacgctcattgccaccctactgacaccatggcgagcatcgccgatataccccgcatgaaagcaacgacacttacaatcatgtccacacgagctgacgaccaagacctggtctttcaagtcgcaactcagcttgccaaagaatcaggcgatgggaatgaggacgcacggcgcgttcttccctgttttggctggcacccgtggttttcgcacctgatcatggacgacataacaccgtccaaagatgatcaaaaggaaattgacgagaacaccaaaaagtcacactatagccgaattctaaaaccatccccagatgaggctttcacatcttctcttccaacccccatacccctctcgcagctcctatcagaaacgcggtcaagactacaggccttccctgctgccctcgtcggcgaaattggtttggatcgagcctttcgactaccccagccctggacgcaagaggagcacgacgcccgagatggcgcgatgacgcctgggtcgcgcgagggccgccggctttctccctaccaggtcaggccggagcaccagaaagctgttctggaagctcagttgcgtctggccggagcattgcagcggccggtgtctgtgcatagtgtgcaggcacatggggccgtgattgaggtcttcaagggcctttggaaagggcatgagcggaa

SEQ ID NO: 4724 - DNA, 4496 bp, Emericella nidulans
tctggcttgataatctgcttgatagagagtatccttattctaccctatcactactctgccagtaccaggcttgagacgattgttatgttacgaaattccagggcgtaggtcatacgctgtcggtgcacctggacgttgtaggtatcggggacttgctgaaatgaataagcagatgaaaccggagttatagacttatttaaaacaatcaataaacaagcattccaagtacctcgcagttgcagtcgtattgagaacgattctctttaatcgaccggtgttcaggctcgatagtgttgggttactctcggagtccagagtaacagtaagttcaaagcgagacaggctaagacttgccgcttcttttaccatctgggcctcagggactggcgtgacctcccgcatccatgttaggtcgtcgctgtcccgctgattctccccttgactaccctacccttcaatctttctacatccaatactcctttcagttcgcctttttacctggtctacgcttgtctaatctggtaccgggaccagcgccgatcttaatcttttccgactcatcaaaatagtcgctcgctttttgtttaccgcagcctttccgcagtcctgcttgtgattcctgttgccgaccgtcgttttgagcgcctgagcatttttgccctcaacctactgttagaagatcgttttaatctacttaattttgattacggtactattttcgatttcggacggccatcgaagccccgcgcgaacattcggtgcccacattcctcgggaggggttcatcagcattcattctagaacgtcgctcacgtttcgctatcgcctatgctaatctaaggtcagtcggctgagatctggcggtcatgagaaagctcgcttcggaactccagttagtggtgggataaaggaaggctttcagcttgttccccggaggagttcattccacctcgcttgaatttagtcgctgacaatattcgcctattgaatagttatcatgtctttgcctcagcggccggggaagacttccccgcgaagagaagagacgtcggccttccgagagccttcgcgcagacgacggcgcgaatctgacagtctaagtaacaatgaccccacgagtccacggcatcacagacatcaccgttcgcatagttcacgacaccaacatgatatagacgaggagcgggctgaagagggtgggataaggcgaaagaggagtttggttaagccagaaagaggtcgcatggatccgagtcacccaaattacctttaccgccaaaaaacccaaaacatgcccacgtacaatccaatgacaggtaacgaaccgctgatacatgaagagggagaagcggagacaaacagtacaccgagtatggattcgaagcgcaaagatgccctgtacggtgcgcatgggaatgtcaacaagcccatggagcgggtcccgacaagacaccgatcgaagaagaggaagggctccagaaaaatctccaaacgcgaggcggcggcggagaagagaaggcggaaagccatggagcaggtgcgacctcccagcttatggacaacatactgttcagtgatcacattttgggcgcccgacttcgtcttgaagtgctttgggatgccgcaaaaagcccaacgaagcgcgtggcgggaaaagatcggtctcatcagtataatcctgatgatcgcggcatttgtcggtttcctcacgttcggtttcacggctactgtatgcggaactcctcccacgcgattgaaaatcaatgagatcggcagcggctacatgatattccacggtcaagcatatgatctgaccaagtcaacgcatcctgcggccgcgggtataccggacatgaccaatgtcctttatgacctgccgcacaagtatggaggccaagatggaagctttttcttccaggaggtaaacggagcttgcaaggggttaatcacgcggaccgagaattctgatattcccactaattccaacggtgaccttgcctggtatttcccatgccatgctttcaaccaggatggctcatccgagcccaacacgacggtctcttattacaatggctgggcttgccatacatctgggtcagcccgtaagtctttttacagcttgaaaaactcgggtgatgtctatttcacctgggaagatacaaagaacacaagtcggaaacttgcagtctactctgggaatgtgcttgatctaaaccttctgaactggttcgacgatacccaggtgaattacccaacgaaattcaaggaccttcgtgataatgatgatatacgcggagttgatctcacatattacttccaaaccggcgaggacaagcaaatcggcaaatgtttgtctcaaataatcaaggttgggagtatcgacaccgacacagtgggctgcatcgcctcccaggttgttttgtatgtgtctctgatcttcatcctgtctatcgtcattgtcaagtttgcctttgcgcttctttttcagtggttccttgctccaagatttgcggcacagaagactagcatgggcgcggtcgactcgaaggctcggaatcaacagattgaggattggtcaaatgacatctaccgacctggtcctcgtcttgcggaccccgttccaggtgatcgaatgagcaaaagggccagtttcctgccgaccacttcgcgcttctctagcccgtatacagtgagcaacggtggaaagcagaaaccccaatgggtaaccatggcaagccagaattctaccactcgattggttccccctgccagcggcactactccgtccatatacaggcagagtcacaacggtagcggcaacgtgagtgtggataactcacgggttaacccatctgctagcagaacaagcttggttcaggattcacgttattcgactgttataccggactctgagggcattgggtcggccggctacgtgcatgagcttgttgtccctcaaccaccccctgactggcagccctatggctttcctctggctcatgcaatgtgcttggttacctgctactcggagggtgaagaaggtattcgcacgacattggactctattgcgttaacggactacccgaacagccataaatccatagtcgtgatttgtgacggtatcatcaagggtaaaggtgaagagttttccacacccgatatgttctccgcatgatgcgggatcctatcatccctcggaaaaagtcgaggcattttcgtatgtagctgtcgctaccggttccaagcgccataacatggacgaaggtctatgccggattttacgactacggagaacactccatcatccctgtcgagaagcagcagcgcgttccgatgatgatcattgtgaaatgtggcacgccggcagaagcaactgctgcaaagcccggtaacagaggaaagagagacagccagattattctcatgtctttcttgcagaaggtcatgtttgacgagagaatgaccgagctagagtatgaaatgttcaacgggctcttgcacgtaactggtattccgccagatttctatgaggttgtgctcatggtcgacgcggataccaaagttttcccggacagtttgacgcatatgatctccgcaatggtcaaggaccccgaggtgatgggcctgtgtggtgagacaaagattgcaaacaagactgatagctgggtgaccatgatccaagtctttgagtgcgtacttatcctctcatcatgtccagtcgggcgctaatagtgttacaggtactttgtttctcaccaccagtcgaaagcattcgaatcggtgttcggtggtgttacctgtctcccagggtgtttctcaatgtatcgaatcaaagcacctaagggtggccagaactactgggtgccgattcttgcgaaccctgatatcgtcgaacattactcggaaaacgtcgtggacaccttgcacaagaagaacttgctgcttctgggtgaggatcgttatctgtccactctcatgcttcgaacgttccctaagcgcaagcaaatattcgttcctcaagctgtttgtaagacagtggtgcccgacaagttcatggtgctcttatcccaacgacgtcgctggatcaacagtacagtccacaacctcatggagctggtcttggttcgagacctgtgcggtacgttctgcttcagtatgcagttcgtcatcttcgttgagctggtcggaactgtcgtactccccgccgccatttctttcaccatctacgtcgttgtttcttcaatcatcaaacagcctgtccaaatcatcccgctggtcttgctcgcccttattcttggacttcctggagtcctggtcgttgtgacggctcaccgacttgtctatgtcttgtggatgcttgtatacctcatttcgctgccaatctggaacttcgtcctccctacgtacgcatactggaaattcgacaacttcagttggggcgatactcgaaagaccgctggtagaaggacaaggggcgttctccccgagtagaattg

SEQ ID NO: 4725 - DNA, 4587 bp, Emericella nidulans
caaccagctcccaagcacttaccacagaatactcgtcgggatgccaatggttcaatcactccacattcttctgtttcttgtaaggtctcattattgaagagttcctcaagaaaccccaagtctatggctgcatggccttttactgttcctcgatagtgtttgttcaacagcccatatgtttcattcacacacccaatatagggtgtattttgaccaagaacatcctgaagcacttgtcaactggtttctaactgcttgtctcggagtcactaaactcactgcatttatatatctcttaaaagctggtttgcatgtaggaagctgatcaaggcaggcatggccccgcttaaagaatttgacctttgatcggtaaagactaaggtagttagcaaccacttgccaagtggttaataattattacctatatgcattccgcttggcaacatccagctctgaaatctgcaccgcactctgggacctctggaactcctgccaaagagtctcattgactgacgtatgatggcaagttcgaagagaaggttttaggtattcacatgcataaatacctgagcacttccaggaccatttttttgcacggcatagtaaaaaaggactgtatacaggacgtttctgtccctgggtttgtcttcttgcgtattgtatctaagcgcttagtaactgtttatcaaccactttccaagacttacttcatgtgcaatctgctccatttcagcctgtgagcgtcctcttgatgcaacaacataggtatatccttgaaaatggctagttggatactccggcagatcatcaatatactcaatatggagtgttgtaagaggagatgttttcgcattggttaggggaatcgggatcctatgttcctgtaacaatatagtagtaagcaactgctagataaccagttagcaagtagttacgtacctcgatttccgggctagagctcccaatatccacaacaccatcaatatcaacaatatcaacaactggctggttagtatccatccttccatgagatggttgctgactgcttgggagattaagcaagaacaagaacaagaacagagaagaagaaaatggtaaatgaatttcggctgttctgtaagatactaagcgaggtcgtgcgaccctaaatgctgactaaaggtattagcagtcacatgataccaggtaagggtcacgtgacccgtaaaaaagttcgcgtgacctatgtactccaatcaagcctgtcgcgcgacgcgttaatgctgactaactgtcttggcagtcacatgccgagcggtaggtgtcacgcgcgttttgaaacagctcgcgtgatctgagtactcgtgttctccaaagctatcgctagtgatatcttttattattctgccacagccgaccgcttgggtcacgggcattgtccgggcatcgccaggcgtcgtctttgggatagggcaacagtacttactagacttgttaaacccaacccacgaaacccgccccaacccgccccgacccgccaagaaatgggttgggttagaccttctaattatccattgggttttggatattttggctgccccaaagcccggcggagcaacccgctgggttgccaagatatctgaataggtgtattactgtatttagattatattttcttacttagatagtttataatacagtatttaatacagtattttattaactatgtagatcacttcttattaaagtaatgatatgcataactgggttattttgggttatttaggttgggttagaattatttgctaaacccatgggcggtttactgttcaggtaacccaccccaaaaaccgcgtgggcagatcagctaggcctgaaaacccgccccaacccgtggtttaacaagtctaagctttctgaatgcctcggccgtcaataaaccttgagccatacagggaggagatttctaccttgtataaatcaggcaagtctcctccccccattgctatgatactaggggatcgatatggcattcaggttagcgaacgaacgatcaagacccaccttagtatatgggggattcggagggcaaatcgtacagcttcaagtgatattgttcttcatgcccggattacagttcttctatttcaagttggtctttcagaggacgagattgtttatattcttcagcaagaaggctggaatattcagcctagaacattaaaacacgtccggtatcaacaagggctattacggcgtacggtaaatccaactgctgatcaagctgaagttgaaagggtcctgaatcaacttcgtgcggaccttgctactggtcagattgaaggaaatggcgtaggaatagtttatcaccattctaaacaagggtttcaaattggcaggtatctatgcaagaatattttatatattcagcaaactgactgacttcgttcaagggaccgcttgttctctgtgtataaagagcttattcccaactgctgtaaattgacgctggtaagatattcaacgccatcaaggagcttatatcactccaggtcctaattttatctggtcaatagatggctatattgttatgggtcctttgcctatacaaggaccttagaccttagtgactcggccaaggcctgcgctgtcctgaaggcggtgagccacctacaagacttcctcacaacaacaatccttctttctcctttcttctttagcgattccttcttgtacgtacggcacgtctagataggaagatccatctaaatacgtcccttaacaacagcccacatccaggggttgcaggaggtgagataaatgaggaggcatgcagacggggataatgttattatccttgcatgtagtgtcaaaggccggggtcaagtggcttctatggctgtccagaataaggagtatatactccccccttcgccgcctctgtatagctggaataaagcatttttgaagccagcgaagcccaattatatctgtagtccatccattattactaacctcaatcctccaggcatgtggaatagagagttcctcaaaccatccctctctatagcgctttcccttaaagataatggttgatggaactgaccatccagttgaattgatgcattcaatggtggtaacccactcgcgatcccccggctgtataagccatggtttgcctggcatttctgctcaagataccacttttgttgttgcaattaggcccatagcaaagccagtttcatcaaagttgtagatatcatcatctgatatcccatactcaactttaatcctctgtatcttattgaaaaatgggcgaattatcttaggatctttacaaagtgctctctgatgattgattttccaagcaaacctggttttgatttcagggcgcctttttgtaaactctgttacccagttctttccgatcggtcgagatgaggttgaggattcatccaggataagttgtgccatctcacgtacgcgcgagggcctgggagctgctccacgaatgtcaagtgattctatccatcctatcaagacctcttcttgatgtagggatagcctatgctggtggttgcggagttctgcttgagattggcggccatgaagtctccctcgaagtgtattgggatgaattttgtatgcacgcgctgcgggcgcaattttttgaaattttccatttttaatgtcttgaatcgcgcattggatcctgccctcttgctcaatcaaatctcgcttttgtttacgcgcttttggtggcatgatggttgttgaaagttgaggtttagacttgttaaaccacgggttggggcgggttttcaggcctagctgatccgcccatgcgggttttggggtgggttacctgaaaagtaaaccgcccatgggtttagcaaataattctaacccaacctaaataacccaaaataacccagttatgcatatcattactctaataagcagcgatctacatagttgataaaatactgtatttaaatactgtattataaactatccaagtaagaaaatataatctaaatacagtaatatacctattcagatatcttggcaacccagcgggttgctccgccgggctttggggcagccaaaaatatccaaaacccaatggataattagaaggtctaacccaacccatttcttggcgggtcggggcgggttggggcgggtttcgtgggttggatttaacaagtctaagctccagtacccttccaactttagagagacttaggcacgcctccctaagatatacaaattatagagtacaaggctataaaagaacaagctgtcaggttcctaattatccttagtttatttagtttagataagaattaattaagttatcaaaattaaaagttagtatagcagtggggtagatgagaaaactaccttccgcccaggacgcacctaccgcccgggattcacattagaatgtattaattaggtaatcaaaaactagcttctttataagagaaaaaaaatctaatttcttatttttttctatccctttaggaggttggttttttattattattaataatacagtttataaataattataaataaactagtagtagaaattgcagaact

SEQ ID NO: 4726 - DNA, 3282 bp, Emericella nidulans
gaattctggcgtttcttcgttttcttttaactacaatcagagacttatcatctttcgagttccaacggtgccgctatcctcgtaatcgattcccttctcatgccatcgcttcgaattggatgtatatgagtaaatacgcgatctattggtggattggaacgacacttttctagcagcagctttcgcgagggtggtaatattggataacgttgcttggcttcatgaatggtcaatcagggaccatgtcgcccgtctccgtagacggaagtgactggtcagggcttaatcagtaccagaagtcggatgcgcctttttcgccaaccttctcgactcgcagcaatttggcgacgcctcctacctctgggataccggcgcctcccaacagtgccggcctgccaaatggctcatcgcaattgagcgattcgggcaacccatctccgcccaactccattgctgcgagatctagcgatggcacattgggcgatcagcgtagcaggcgacagcgacaggtggaggagatcctggcgcagcattattccgcattaagaaggtttctatatacgagttatcgggacgagcggtcgaacagaaagtcaagcaaaggccagaccaaattgttagggctctcgccaacccagttttcatgacctaagccattatggtttatgccaagctactccggccgccagcaggctatccggtcttcctaatcgaccaccctcgcccgaagtttccaccttttctcccgccgcgaagcgatttcccgaaaaagcgcaatcaagcgcgccagaagcttgcctcgctgcagcatcaacgctttagggatctcgcttccgatgtctttaatgaactagaacggcgttttccccaattccctacgagggaatctcgccgagctagtcctgcgcccagccttcggggccgccctccgcccaatggggttggccctggaggttaccctccaccgccgaatagtcgacgttcccaatcgcgagggccgcctcgaatgggaaggggctatccttctggtgggcctcctggaagtccgatgtatcctcctcggaaaatgtctctcagcggagcgggtatgaatggtgagggaccaatggccaaatccttccagagcaatactattgttcccaacaagagcaccatggtggaagatgatgatgatgcggctggcacagaagacgattacgactcgagaagtgacgcctttgctctggattcatttatacggagtaggcgcgggactggaacaacaattggtgatggagaaagaaagctgctggcagaaacgcaatcacaagtgtcaacgctgcaggagaaggtcagcaagctggaagagttactcaaaacaaaggacgaagaaatcgacaagtatcagcatgaccggcaggaagtgggcaagttggaggagttgctcagagcaaaagaggaggaactcgcaaaataccaggaagatcaggataagtcacaggtgagccttcaagtggtggcatgctatttgatttgctaatgagttacacagataagcaatgccgagcgacaagagtgggatgaaatcaaatccgagcttgagaataaaatacacaaagcagaagacctaaacaattctttgcagcttgagcttgagaaggttcgggcagaacatgaggtcatggaaagggatcttcaagcccagctttcagggacatcgaggcacgaaggcgaggacgccgagctgcaggctcaatttgctgacctcgagatcagacaccagaagttgcaagctgagctacaggagcaacgccaggtgacagaagaagttcgacgggaggctgctggctttttgatggagatgagagagctgtcggaacagagccactcaaggttggagcatgaagagcgattatcagaagaggtccacagattggaagacgaattggttacctggaagggccgatatgccaaagccaaggcacaactgcggcaccttcgtgcatcctctgctggcatcccagaactacgttccgatgttaataccgtcgcgaaagacaacgaattcctgcacgatgatggcctcatcaaagacgtccatgtcacgaagttccaactttccattgacgagctccttcgcgtcgcaagatccgacgatcatcgccatgttatgcagcagatcaatgccgttgtgatctctgttcgccatctcttacaagatgtccaactttccaaatcctctgattcagctgaacgtgctaaagctacacgcaaagtctctgcaactgcgaataatctaatcacagcctccaaaaattttgccagttcgaatggtctatctcccatctctctcctggatgctgcagcttcacacatgtctactgctgttatcgagctgattcgtatggtgaagattcggccgactccggctgacgaattgaatgacgatgacgaggagcagttcatgcagatgaaatcacccgactacttcagtgtggctcctagccagagcaggttgagcaatggatctatctatagtgccatgagcccccctcctgagtcagagcatgtccccaacggcttgaaaaatggttattccgtggaacaagaaaaccacgaacttcaggagctcagggtgagtgaattgttcttcattgttggccctactgttcagattctaaccatttgccttcctgataccagttttacgtggaggatcaagccgacgggctagtccagtcaattcaatctctggttgcaagcatccgtggagaggagagcatgaccacaattcgcacccatgtctcggctatcgcttcaatagtcacgaatgtgtcctcatctacagaacaccttatcagcaggccggagacagctccggctcttcggcaacgtgccggcgctagcattgaaactcttgaataccaaaggagccgtcttgtcagtgctgctgctgagggcgagggtgcaactgatgctggacagctttgcgttttcacgaaccagctaccacctattgcctttgaaattgcgcgcgagaccaaggatctggttcagcggctggactcgactgatcatggcgacgccgaggacgatgacttccgatagacgttgtttagccggtgcatggccaccatacttatgctcgcttatatcttcatttctttttcttcaatgcccagcaaaaccgatataacatcatctgtgtcagcgccaacaactcgaacttgcggtttcgaatattttcgcactgatcatgcatgaaatgagcacctatgtggaacgaaaagttagacttggtgg

SEQ ID NO: 4727 - DNA, 8143 bp, Emericella nidulans
ttttttctctgaacctgttgaacctatcgaagtacccgagccagttcaaaagcctgagactgctacatcgcctgaacctgttagagaacccgagccagttcaggagcctgaggttgctataacgcctgaacctgttgaagaacccgaaccagtccaggtgcctgaggctgttacagcgcctgagtctgcgatcgaacccgagccgctagctacagtcgagcccgcgatgggagctgaacacaccatggagccggcacaagaagtcactccgcctgcatcgaaaccccaatcccctgcaccagcaactgcttcaccgtcctacaagtcggcttcacctatgcaacgcgcagtttcgcctgctgcgataagtgtcgccgacaccgtcgacgcgccacacgctttccctcccccgcctgctgctcctacaccaccaccagcatctcctaagacacaggatgttccaccgttgaaagatgcatcatatcccactccaagagcggcaccaccaacgccgcctagtgcctctcctcagtacaactcatcgtaccctacagaccaggcttactcaccgcggcaaaagtcatcaccgtcgcataacactcgcaagccctcctcgcctattcccaaaatcagcagtcctctggcacatgcttacacctctccggtgatgtctccacatactacgtctgttccgccaatgcctccttcttttcctccatctgtctcccacagttacgccactgcttatcagtcgcccgctatgagcactgctgggtactttcctcctcagtacggctactatcaaccaacttcgcatccacaccatactccccgaggacccatggccccaaatggtccgtacccaggtttgagagatccgggctatcccaacgagcatgatcgctccggacgaggagggcctatggtacctcctgatcaagaagatgcacgggagcttctagatagaattcaggacgcgatcccggatattaaccgccttctcggatcgtacaagcatacaaagaccaaacttcagtcccgagaagccgagtttaagcaaatggagagccaacacaaacaagcgttgatgcataaggatttcttcatcgaggcgctccagaaccagctgcggaagactgcgaacgaaagtgctgaggaagccacaaagctgaaaaacatgatcaacgaattgcgaatggagcttggcaacatggaggagaagcggaaggatatggaggaaaagctcgctgactccgaagcctccatttcctctctggaggaaaagaaaaccggactcgaagagcagatcaaaaagctgaacgagcaaattgaggaagaacgcgtagcccatagccaggaattggacaggcaacgagcagagatggaagcagaaaaagaagaagctctcaagacgcagaagcaagagctaactgaactctttgaggagatcaaggctgaagacgagaaagcagcggcagaggctttggcggctcgtgaagctgaattgctcgagcaacaagaggcaatgaagatcgagtacgaacagcagaaacagcagatgcaaaactcgcatgataccctgcaggccgagttcgacactaagctggcggaacttgcaactacccagggtgatcttgagaagaagcaccaggaattggaagacactcgacatgcgcacgttgagcaggttgaatcacttgagaaccagcaccaagagaaaattaccgagatggaacgagcttggactgaggagaagacgggcctggagactcagctttctgagaaatccgaagagcttgccaacagcgagcgagagaacaaacgactagaggaggatctcctttccaaggagaaacaactccagctttcggtggacaacatgcgtcttactattaacaatttggacaacgactgcgacagattgaggaaaactctccacagtcttggagaagccactgacctcaagaacacaaaaggcgatacattcttgtaagttgcctaggctgagatctgttcgggtctcagttgttcattccttgcattctcgaaataatcatctacgaccacatttctatttgtccatatttccttttctctacgacagcattcgccgctctttatatttttcctttgttttcaccatagaatgacacgaagaccatgatcatgttgataacgttataaatgtacctgttctgatacgtatgaatctagtctggactgcttcggccaacttcaacgtctcatcgtgacgctctctaaggaacacttttcgtatctaccaattgaccctcctcaagaggtcctttccaagctcccgccagagcttccttcgttccttgacaacaccccagcgtctcgcgaactccgctccgcttacgtccagcacgtcgtttccaaaatcctaacctaccgcatcttccacccctttctcttcactctcgggcgccgctacgacaaagcagacatcctcttccagatgctctcaatggacattcgccgcaagtccgttcgtcgcgaacgtttctggcgccagaaaccctcaaagcagcctacaccacctctgacgcaaaggagtccatcaacgttgtcgccgccgtgatcgtggacgagatcagcaacagcctcaagcactttgctgacccgcgccgtatggatggccttctcacaagcatccgcaaaattgtcaaacttgccgccgaaacatggcgacacgcacgagtcgagcgcgaactcatcatcgctgcccttccagcccccgaagacggcagtgtccccggtgaggactgggaagagtacggcgttcccaaagagaattcctcgggtcgaacctctccgaagacagcagattttgcccgccatgtggtcttgcgtcccttccctcgcattatccgcgaagcagcccacgaggactttttaggtgacgagggcaaggcgagcccgtgtacgtactctcgtggctccgtcctgtactctgactcgccaattattcttgcaagactccaggaattggcgggaaagactacagatgcacctgtgcgaagagaggactctccggcgacagggagactctcgcgagcatcgacttattatgaacccccttcgcctcggataccgtatgcccaggatacccttattgagggtgcaacaggacctaactttggaaccgcttaggtagcctctttacctgagattacgacagtttaagacgttccgacactaaactttggcactacgacacacgctccttaaatatttcattcgtgtacttgttagcgatttgtccgtgagttttgttttccagccttctcatctaccgttccttctctttctccaaattgacacttctatcatccattgatgatttgatttaatattttctttccacctgcgtgtttgtttcgccccagattgattcttatctgcattatgtattcgttcatgacatttgtctttgcttcctcttcttgatcttgtcttatgtcaaccacatccttgtttttgctcagcagttcagcgattgttatcataatgggtgtatcagggcataggtaacagatggagtcgattgtgtgttaggactacagatctaactgagtgtttcatttggaatatagcattcaatcaatcttgattatattgacttcataacccttctagagtgaataatgattaccaataaaggaaataggaggcccatcaagtaaaagaccgttaaaatttagataaacaccattcataaaacataagaggaagtaaagttcaaggaggtgaaaaccatctaaaaccctttgatgcatcatctatatgcctcggaaatttattcatttcttccccttcttcttcttttttcctccaccaggactcttttgtcctgcgctcccggcctggtcatcagcctctacaagcaccgcatcatcgtcactctccgtaacagtcggtgcggggggagccgcagctgaagcagatgccttcgacccaactgcaacctgcgtaccttcagcaacctcaggcgccgcggtacagcagcagcagtagtgacggtgcccggcttctcagcatccagctccttcatgaacccttcctggatactagccttcttcttctcccaccaagccttctcctcatcaagtttcttctggtgtttatctaaccgctcgcgtacaatctcgttgttaaccatttcgtttgccgactggaagattacctggccccagttgggggcgtacgcgtttgcctgttcatcagtaacgtcagcatatcccatctactgaataaaattccgagaaaaagcgaaaagggcgattacctcagtaacaacatcccgcacttcatcctccatctccttctccgcccgcagaaacctctgccaaaggtcgtcgcccacacttccccgctgaagaagtacggaaagagcctgcttctgactgcgaagggtcatgacgcggcgaatgtcttcttgagcgcggcggagtagcgccgccttgaggaccgactcggggaccgcgaccttcttctctgttgctgaggcgggcgggtcaaggtgcagaagggaaaagtagatgtctcgttgtagatgtgacggaaaccatggttctagggatgtggcctttcctgtttgtgggggatgcggttagtgatttgatcgaatttgtttgagagtatttgacgagacgtactggccttgcgcttgcggtagagggatgagaaagttgcaagggagccgattagaacgctgaggtacgcaaacggtacaataagtgtgacccagtccaccattatgtgtctgtgtctgtggacgggtagaattcggcgaggttgagttggttgttagtgttggaagtgactgcggtgcgggtactgtagtatttttggctgagttttagttggtcatagtacgaggtttgcccgctgtgtacgttaaaaggatcgacaaaaggtttgggctaaaagaaggtacatgaggagaacgaacaacgctcagggagtgctgtgtatatgatgtggtgatgctcggacaatgaagcagcaaaggccaggctggtgtcttggccgcgtcacatgtctagaccctcagacccttactctcaagtacattctccgcaggtcgactacgatcatttttatcttatatttatattcgtccagtcactaaaccaaaaatacataatgacagacaacatgaggtaacatgagcccggccagcaattcagcctagcggaaagacctctattaccagtatcggacgagcacgtctacgtcttgccttatgctttaacctggatatccgacagtgcaatgatattccgtctcctttccttgataagtcaactggattccagcttggctcctatgtactgacaggctgatctcttgctttgcgtctaccaggacctttggcggtcaacagctcgtcgccgccaaggtagcagcaaaccctacctcacggccgtagtggccttggtgttatgatgcaaggctcgccgttaagcagtgtcgcctgcaaatgaagattagcgtgatgaatacctctgggagacagattctgctacctatacacgctgtgctctgaaaaagggtcccggctgttgcaagcatcttctagccgctgctctaactcctgatgttcagtcagctttcaacccttgcgtcggcaaatcaacgtttgggcagagcgcaagattgtatcaaatctcagtcacagtcggcctgttgattgcgccatcgagccgcgcgctccatcaggcgcgccagcggctgttggagcatggcattacactgcatctctcgcgcacccactgatcgtacaactgcgtaacgacaccccaggcataatcggtttccggcgtaatatgccgcacgcaggattcggaaagtatgaacgccacgacgtgccgctgcttgtagctgtcgcaaagccaggcccactgggttgtggtctcgttgtgtcccattaagatcgcgaatttgacaatctcgacagccatggtgaagatctcatcgtttgtagccgcggagctggggtcctgatgcgctgctgagttgctgagacgatgtatcaaccatgccttggagagcgtaatgcgcacgataacagccgtcaaccattggattgggatgtctaggttgaaggtttgcaggtatacagtctccacgtgagttgccaaacttgagaggagctcctctttcttggacgagaattgctgtcgtgtattatggtctaaagacttgccagcccagtgcaataggcataatctcgcattgaattatataatgtggtatcagtgtatccccatcgcggtagaggcaaagcaggcatgtctgggatgaggtcttcaccatcgaagttagtaggaagcttagtgtcaaacatacccggccagatctgcgtgtcaattccctggtcctccgagcagagcatgtcaagaatacaaatgtgctaccacagccggcggcgcatctcgatctcaaaaggagtcagtccttaaagctgttctacctttgaactacacccacctatagattattccaatataatctttaataattaacattactagcctatagtaacgttacttatttagattttgctttttcatctaataactcctttaaactaattaatctattataatgatagatttacaaattactaactgtaatatattaatcaaacaggtttataaatactaaactaggagcagctttagataacatattaaaaggagtcagtcctagctgttgaccatcacggtgcagcccttggcgttgcgcaatccggactataaccgctgcttgagcccatacgagctgtgaatcagcacgccggcgaagacacagcagaaacaagactgcagcctgtaagacatgcacgtccgtggtgccagttaagttggcttctgccagggtctgctccacggcaactctgtactcttggatgcaggtaacatgatcctcgtcgaggatggactagcactgcaccggcgtcatgctcaccacagcggcaaagctcatagccagaaccaaggccttgtacgcaggttccaattctgattcatcgtttggcacagtatttgcttgacatgactttgaccgaggggacgtgcagaatggcgatcatgggcgcaacattttctggtagacctgccatagcgcttggatccgccgcggctgcacatatttagaccgactctggcctacactatagctcgcagattgatcaaacccttggattccaggtggcggcaaagccataggtagcatatctgtaccggagacatgcgccgtactctcctcttcaaaaacatcgtcacataattttcgtagttctcgaatctcccatttcgctatcagcctaggacgacacggcaacggacaggccaggccataccttatccccaagaacaaccgaagcctcatcaccgacatatgagctgcggccaccgtggaccaccaatcttcctcatggagtttccaacctgtcggtgcccgtttgctgattgataggagatcctgaccgagacgtcgcggctgattgactgttagtatcgagtgagagcacactagacgccgaccgcagccgttcaacttcctcttccatttctttgagatgggcaagaatttcagagataggaggacgttttagcctgcgcggtgctcgcttgtttcctgggtagctgcattcggtcccaatcctgaagcagcggctacaagggtattgcggtcgcagccgatctttcgctgatgcacctagtgcagctgcgcttgaaggcattgacttgtttatgagatgattgtgcagctagctgagtagcatcttccgcagtcgatgaagcatgcattgtggaagggtgagctttgtggaattacatgaaaattcaggaaaggtatcttagttgactatatgggcaccatgctgatgaatcgattgattcttgatcaactagcaaggcgcacaacgatctatgctcaaagaggtggagtaccactatacagtctatcttgtacttcatcacaataattttaatatgactccagcatcaccgcttcacaaaatcactaactgtctccaaccacgttctaaagtctttcaagccaggatgaatccgccgcaacttagcaataaccgccccgtacctgagac

SEQ ID NO: 4728 - DNA, 5927 bp, Emericella nidulans
  unsure (1)..(5927): unsure at all n locations
gtgggagacattgtccgcgtcgagtccgaacagcctttcccggccgacttggttctcttggcctcttcggaaccagagggtttatgttatattgagacggctaaccttgacggcgagacaaacctcaaaatcaaacaagctattccggaaacatcgcacctggtcagcccggctgacctcagtcggctcagcggacgcattcgctccgagcaaccaaacagtagtctgtatacgtacgaggcgactttgacaatgcatgctggtggaggagaaagggagcttccgttagcgccggaccagcttatgctccgaggagctacgcttcgaaacacgccatggattcatggcgttgttgtttttaccggccacgagacgaaactgatgcgaaatgccactgcgactccgatcaagcgtactgcagtggagcgtatggtcaatatccagatcttgatgttggtcagcattcttgttgcattaagtgtggtcagttcggtaggcgacttgatcatccgccagactgaaaaggataagcttacctacctcgactacggcagcaccaaccctgggaagcagttcatcatggacatcttcacgtactgggtgctctactcgaatctggtccctatttcgctctttgtcaccatcgaaattgtcaaatactcgcaagcctttctgatcaattccgacctggacatctactacgacgttacggataccccggctacatgcagaacatcatcgttggttgaagaactaggtcaaattgaatttattcttctcggacaagactggtactttgacgtgcaacatgatggagttcaaggagtgtacgataggcggcattcagtacggagaggatgtggccgaagacaggcgggctaccgttgaggacggagttgaggtgggcgtgcacgattttaaaaagctgcgccagaacctagagtctcatcccaccaaagatgcgatacatcacttcttgacgcttctcgctacttgccacaccgtcattcccgagcgatccgaagcggaccccgataaaatcaaatatcaagcggcatctccagacgaaggagctcttgttgaaggtgctgctcggatgggttacaagtttagcaacagaaagcctagatctgttattatcacagtggcgggacaggagtacgagtatgagctattggcagtttgtgaattcaactccacaagaaagcgcatgtccacgatcttccgttgtcccgatgggcgaatccgcatctacatcaagggtgctgatacagttatcctcgagcgtctacaccaagacaaccctatcgttgaagggacactgcaacatcttgaggaatatgcgtcggacggtcttcggaccctctgtctggccatgcgcgaaattcctgaggatgaattccagcaatggtatcagatatttgacaaagccgcaacaacagtcggcggtaaccgtgcagaagagctcgacaaagctgccgagcttattgagaaagatttctaccttcttggtgccaccgccattgaggacagattgcaggatggtgtgccggatactattcacactctgcaaactgccggcatcaagatctgggtcctgactggtgacagacaggagactgccatcaacatcggcatgtcctgcaagttgatctctgaggacatgactcttctgattgtcaacgaagacagtgctgaggcgaccagagataacttgacgaagaagctccaagctgtccagagtcagactgaagccgaacaaatggcccttattatagacggcaggtctttgacgtttgcactagagaaggacatggaaaagctgttccttgaccttgcggtgctgtgcaaggccgttgtttgctggtatgtttctcactcgcttcccgaaagaaaggcgctaacagttgcagtcgtgtctcgccccttcaaaaagctcttgtcgtcaaacttgtcaagcgtcatctcaagtcgttgcttttggctattggcgatggtgccaacgacgtgtccatgatccaagcggctcacgttggtgtcggtatcagcggtgtagaaggtttgcaggcagcaagatctgctgatgtttctatcgctcaatttcgttatcttcgcaaactgcttcttgtgcatggtgcttggagttatcatcgaatcagtcgtgtcattctgtactctttctacaagaatattgcgctttacatgacgcagttttgggtaagtctactacttgttcgaattgtctcaagctaatgttcccagtactccttccaaaatgcattctctggtgaagttatctacgaatcatggacactatcattttacaacgttttcttcacagtccttcctccattcgccatgggtatttgcgatcaattcatctctgctcgtctcctagaccggtatccccagctatatcagcttgggcagaagggactgttcttcaagcgccacagcttctggtcgtggatcgccaatggattttaccattctctgctactgtatatcgtctctcaactgattttcctctatgatctcccacaagccgacggcaaggttgccggccattgggtctggggctcggcgctgtacaccgccgttctggccaccgttcttggaaaggcggcactgatcaccaatatctggacgaaatacacgttcatcgctattcctggctcgatgattatttggctcgcgtttcttccggcctatggatatgcagcaccggctattgggttctcggaagaatactacggcactatcccccggctttttacctccccgatcttctatntgatggccattgttcttccttgcatctgtcttttccgcgattacgcctggaagtacgccaagcgcatgtactaccctcagcattaccaccacgtccaagagatccagaaatacaacgtccaggattaccggccccgcatggaacagttccaaaaggcaatccggaaggtgcgccaggtgcagcgcatgcgcaagcaacgaggttacgcgttcagtcaggccgacgagggcggacagatgcgtgttgtcaatgcttatgataccacgaggggaagagggcgatacggagaaatgaccagctcgcgaaatttggtttgatatttttgttttctttttgttcaagtgcattcggtactgcatctttgttatctactcttctctgatttgggaactcttgtgagcgagttttcagcatgtatgtacctaatgaattgattactaaatgaactgattaacattacaatacctgcaccagcgcatgcactgccttgaagcttggtgagaagctgagtcttaccacctatatctgaccatcgctatccatccgccatatctgggccaggcaaagaacccctctgaaagagttgatgcattcaagacccactcccccagaacccaactcaaccccattcgatctctatactctactccagcgagttgcgacttgtgccgtgctgcaatgtgggtaacttctccatcatgtgagctcgaccgatgattacccgagaacaacacctggagctgtccaactggaccatttcctgtccctctctcccctttctctgaccgacttctattaccctcaccggaccccttttggacatataaagctcctcgatccccttcagcagccactttgattaccttgccatttcattcttacgatttatcacccataaactgtctcccagagcttcggactaaccccgataccacagtgggtgccaacgccaaagcccaatcctggcttcataagctagaggaacaaggtatgctctgcgcctttcatgaagagggaacaggatccttgactaaccagacaatgccagttaacgtcgacgtcgatgccatggatccagacttcatcaagtccctgcccatcaccccgcacgacatgacgagcaaccaaatccacgtgcatggtcaaataagtgagcccaagaacagacagctactgcttgatgtcgccagggagtacaaggaccgtagctggtggatgtctatacgcgtgtggtaagtcactcactcggccaattctgtttcctctcagggccctcgcttcaagaatgatagtagcctgacaaacaattgacaaaggccgtcctcctctgcaaaaagaatataaacctcatctccggtcgtgtcctcctgcaaatcctcccttcgtatgcctacgacagggataaagtcctttcccatgcacgactatacgcgaaagaattcgaatcagtggagattaccaaggacagattctgcattaagattccgtcaaccggccccgcgctcagtgtctgttctacactcgaggcggaggggattcgcactctgggcacggcggtattctcgcttccgcaagcgattgcggccagtcaggccggatgtctctatattagcccttatttcaatggtaagtgtctagagaaagcgtggaagctcaatggaagtggtaatacgctaatggatgaggagaatagaaataagggccaacttcaatctatccctctggccgaacgtcgaggaccccgcgacgcagcataccatgtctgcacgactgatgcagatgctcgagatgtataggaaactatacaaagaaacgggaaagacacagccgctaattaagaatgcgaagtacgcgcagccccatcagtgttctgattttcccaccagtcagcatactgggttgagttgagctgatacgctaacgaggacgtctggttgcagcttcataagccccaaggaagctctcgcccagggcgaattcggtgtagattccgccaccgtctccgcagaagttctgtcacagcttgcaaatatcccatatgacgtctctgtccgcccatcagggatcgttgacatccccaaaccgcaataccccgagcaccagaactctgtgtcctctacccccaaacgtctgcaacatctcgcaactacggatccgttagctgcggcggactgggatggaagtattgcgagcacggacgtggattatctgaaacacaacggcgcggaactcgagaaggctattaaggctgatcccattgcgagtgcgaggatcagtgatgccctggacgtgttcttgaaggttgagggggaaagtagggagttgatcgagggggttatgaaggagcttgcctaaggtggtaacagctggtttggtaagctaccaaaccaggatacggtttcgtccgtgcatttgcattcactgttgggaaggaaagcatagacagatggataatagataagtagagaatagatgtcgcaggatgctggacctgtgtcagaatctagctcgtaagagattggcatatatatctcttcttgctctgctgaatgaacgaaagctatccttgtggaattgtaagataggtatgattgccttgagtgttcggcgacccccttagtatgttagctgtcgctaaagcgcctgggacagaaatctttgaagtaggacaaggcgacatgttaggctatccttgcacatcatcggcctatggactcgagactcaggccctacaatatctagcttgcatgatgtagatgtgagagcccagtagaggcgcaagtctacctgggtagttgcttatctagacactgtcagccccggtggccgaggctttgctcagtcttgttgggtcagaatcaagacgggctagcagctgcatgtccagagaactcatgctgaaccaaaattatgcacgaagtcaactaccgcgtacatctctcctccggcggcctccacccgactcccaacccttccattaccatcctctccctttcttgccatgtctcgcctctagcctcaagatcaatgacctggccgcccgtcacgcgctctctcacgccagacgagtcgaacttccagccatgcgccttctttgcgtaccgccttagatcccgctcgaaagttgtatcgc

SEQ ID NO: 4729 - DNA, 7997 bp, Emericella nidulans
tgtaaaacccctccacaagaagcatttcgacgagattcttggaaacccctcgcttcaaaaacttgtgacaagaacatgatccctaagaattgtgcagcagagagtgactattcgagacaatgcaccccatcatggcactaacagagtaaccgctgaaaatacacaggcccttagcggatgatttataaagtttaataactgtctaacatagaaaacttttatcagtaggattctgcaagcccccaaaatattaactcttcctggaattctatctgggctcttccagcttgcataaccttccttgaccgcagcggtgatcaactcaccaaagaagcaattaattttgcaggatagtctcagtactaagttaattgatgacttccattgacccgtcaacttagtaaggtacttatagttggaataaatgcaaagagagctggttataggcggatcaccgaaatcacgcccagagcaatccagtggacatgcccgcgaccagctggcactaatattataagctctcggtgctaagggcattattcttaattctgtcatttcaaagtatgcattgctgttgatattaagcttcttatctaagtggggcgacatattacacggacctggataaatatagaaagataaaaagaggttatagagtaagtactataggtcacttgacatctagcatgatgtttgactcgccccgctgacgttcccctctagttatgagagggcacactaatgattgagataacgtggcctagagcagatggttggaagaactggctagttatataagaaccccataataggaaatcctttacatcccaaggcataagctctggcgactctgaataccaccaagtcgttaaccctttcaaatatatccaggataatgcctttaccaacctttggtctccgcatgagtggcgtctcgagtgcttaattcgccgccgaaggggctttgctcctggaaaatccagtttgcagcattatgtatccagtctcggtagccgattatgagggctctttgttaaggaaactctcaaagatgtttttctataagataagtattctcctttcaacccgcgtcaaagctgatcgcaaactgcatcgcagtcacctcatgtccgccctcgctttggctcctgctattttatttgcatctactaccgagatcctactatatgatgctttctgtgctttttcgcctgctgtttgattttcttacgtatctaagcagcggcatttggacgcgggaagcggtttttaaagtcttcaaggcgattgtggctggcgcggcactgatttgggatcggtacatgtaagactgagaggcactaacaacgtgaagacactttattagctaaagaatgtatgtaaaataaaatattgaaagagaatgatcattgtatctaccaatctggaatatctgggcgtcgctaagagatgatgggagccaccatctatgtaactaccataggctgcagcatatccacggatatcagaaagaaaatggtaccgtaacgtaccctagcagataccagatactaaggccctatatctattccatctaagccatttggataggatatgatgatacgatatgaatactttatccgtgataaaaaatagtggctgaagtacagccgagggagcgagaagccctatcctcacaccctgtggtggtaagtataactcttgtgagaacgcaacatatattaaggattttctgcggtatgcccaactctgtcaacgagaatggcaagcttactgggttgattactatgatgcccggattaccagtatgtatgcagaacagcctcaatgtgttctgcctatggagaacgtaaaatcgaccagcagcgccgcacagtttggcgtgctgctggtatgtgtgaaacttagatatggaattgcatcaagtcttcaaagcaatgccgtatcggtaagtctagaagcctgacgacatcacctacaattaccttgggagactgcacaatgtttcccctaccaccacagcctaattgaggcttacagagtcatgagctaggaatcttatacagaaatccaaagtggcttcccaacgggatctagagtcaatccttgctgtcggcggctatccgtggcacaggctcaccaccacctgtgccctgacaccaggtagctgagtacggtaacagagacacgcggacaaacagttcgcccgtaatcctttggcagattcactgatccttctttaagaattggtctgaacttataggattttggccggctcgggtgcgtttcgcgctatctcttgaaatagcattgtgatagagtgtttcgagaatagtgagatatataagggcgactgagtcctcactatcgtcatttatatcaagctgccagtctattcattttacaaacttagactagttcatatcaaaaaacaagatgaacacgaccgactaggcttcttcggcgccacggcggctggactctttcatgccttgtgccggctggataccactgcatcttgtacgcatccaaccccttctggggttccaatatctctggaacctactcaaattctgaacaaaacaagtgatccacgggccagaactaacccagctcctccttgcccggggcatttcgccctccaccctctcattgtattaaccctaatcggaagctcagtctccgacttcccccccatcaaggccactctctcctgccctcccgccccaaatcactgagatagtactcgttggggaggatgtggtgggaatagattcttgtgtctgcttatgttatttgcctatacattccaggaatgagaggaaaaagtaagaataaaaaagaccaaactaccctgccactcactataaccagagtcagagtttaggttctgtggtcgagggcaaatattccaagaccagttgtcctggcgaacagcatcagcaacatctgattggaatactatgaatatgattatgagcccttcctgtgcaatgtcccggccagcaacttacctaattccgccctgtgtaggctccatgactcaaaggctttaagtttacaatctacacgagcaaatttgactccgtctttgttctccttgagacgtaaagagggtgtaatgttgattttgcttagaactgttaagctaaatcctttatggccaattaagtactagataaccagtcagacctcctatcttggaacaagaccgataggtagttcaatccaccccgtaagcagcaactagagaccactgaaaccttgccatactgtatcaagcttgatgctcccgagtcctccctcaggccagtgcataagacgcaatcacgtcatattcattaaacctacacagcacggtctatatcagcgccaatgactcaccgaacacgtattacgtggaagaaggcttggactggaacgactggtgatgtcgcaggacaagccctcgattctatcagaacgagatgaaggaacaaccgagacaattgtctccattttgaaacatggaagtcgaccctcgaaagtagtagccgtgtttgaatatgccactccccttccaacccgcgaagaccgcgaatactacgtatggccgggtaaatcgcggagaattatatagactaaggaatatttcgtgcctgccgagacccctgccaagcgctgtcatattagggccgggcgttctgcagtctgcaagtggcttatcatggcttgctcttgaagaaagagtggagcgttatctgatcatcggggcttgaccactggctctaaaaatgctgagatgtaacagccaaagtgacagaagttcttggtcatgattagcaagcattagcagagcagtgagagtgcggagtatacggaacatccgagttctatatctactgacctgcattttcagacaaccatgctcagcactaccagacaacctttaccatgcgtctttcggaagggttggcgttcctctccgtcctgccggccgctcttgcggcgcggccctttctcaatgagcctgatacagcgtacgttggtatacctatcatgacgaaaaataaaacaaaacaaaggcattaaaggaggaaaggcctgaggacagcctgctaatcatacttcctacagcattgaagaggttctcggcgacacccccgagggcactctccctgacctagagagcatgctcggcctccctgacttcgaatgggcagccaaacgctatctgaatgcctcctcatacacgtactaccgcaacggtgcagccggagaatggtcctacaggaacaacctcgaggtatatggccggttccgcttccggccacgcgtgatggtcgacatcacccagatcgagaagacgctaccgaccaccatactcggccataacttctctgcgcccttttatattagcccgtgcgccagcgcagggctggcgcacccggacgcagaggctaatttcgtcaaggccgcctatgaggaaaacatcctctatatcccggcccttttggccacgctatcaatggacgagatcgccgccgcaaagccagaggacggatcacaggttcttttccagcaggcttatctcaacagcaatgacactgcgacgcagcaggtcttcgatgacgccgaacgactgggtgccaaagctatcgtctggacgatcgacagtccagcagacgggaacagacaccgcgcgaaccgatacggcgtgggttcctcagactcggactacacactatcgacttgggaattttatgcgaagctgcaaaatatgaccacgctacctattgttctcaagggcattcaacatgtcgaggacgtcaaacttgctattaaacacggtgtccctgccattatcctatctaaccatggaggtcgccaactcgatagctccccgtcctcgctagaggttgcgctggaggtgtatcaggaagacccggatctcttcaaccagattgaaatctacgcggacggtggcatccgctatggcgcagatgtgctgaagctgctctctctgggagtcaaggctgttgggcttggaaggagcttcatgtacgccaatgcttacggcgctgagggggtcaggcacgcgatccagctcctgaagcatgaaatcgccatcgatgctgctaacctgggtgttcctgacttcaagaacattgacgcttcctatgtgagacaccatcctaagcaatttgattctgtctcctactaactgtcttgcaggtcaaatgggccaacaatgggtggttcacttagcttcgatccagggtcgatccagggttccgtgttttctgtctagcttttttcctcctcctgtacaaagtctagagtttggtcaacttctgtggattatcgtattcagatgcttctaactcaagggattgcctctctttgcttgtctgcttagatcaggtttgctgtcaacggtagagggctcgatgtaaaatgaaagacttgaacactcgaaaaacagcctatttttggcacattaacggattcagggcgaaagtatgcggcagacatgaactgctaagctgcagattgtatatatttggctaattttgggttggggctctgtgatcgggagtcacggatcagtcattcctcggctggatcctctacgaactgtggaaatgtctcattttgaagcatccagtatcggatcataacagtgtaggctgagatgaggcctttaatccaaggtccgcggcgatctaccagttcatacaatatatcgggtacaggctgcccttccgcgccctatcgcgtactcttcttgcattccagcttggccatcgtactctgatccttcgtcatctgtcatgaatatcagcatatcaaagtttgcgtcatttctgatagccaccgacctgctgggcggagcttttcaggcagagacattcgactacgttgtcgttggcggaggaacagctggcgtaaccctggcggttcgtcttgcagaagcctcgcatagtgtcgctctcatagaagccgggacatactacgaagacagctggccgttcgctgctattcccggcgcagatgtcatccctgtgggatcagatcctgatgccaagtttggtgcggattgggggtttgtcacagcaccgcaagctggtgcagatgggcgcaggatacattttgcgaggggaaagtgtgtaggggatcgtgagtctgcctaatgcaagttgagaacaggattggaatgctgatagtggagagaagctctgcgtctaattttatggtatatcaaaggttcgtttcttgcttgaatgtgactttaggtatgtgacagcatggtttaacgttccgcaggccgacaaaagactccatgcacatgtgggcagaagctgtgaacgacaccagttacacattcgagaatacccttccattttatttacggactgtcactttcacccccacctgataagagctcaaggacggccaacgcgagtgtccagtacaatgcggaatcctttggcgcatctggcgggccgctccaggtctcatattccagcttcgtccagtccttttccacctggatgaaacgtggaatggctgccatcggattgtctgagagcaacgatttcaacaatggccgactcatcggataccagtactgtgcatcgacaataaaacccggcgacaaaacccgcaacagttcccaagcagccttcctttagaaaggcaaggctttaccggacaatttgacagtgcacacccagcgcctcgcaaagcggatcctcttcgatgagcacaagagcgcaattggcgtagaagtagcaaacggctttggttacctttcaaacataacggcatccagggagtcatcatctcggccggcgctttccaatatccccagctccttatggtctctggtattggacctgcggagcagctggcgaaacatgggattgaggttatatctgacttgcaagtcggacaaaatatgtgggatcaccccttctttgcgctgagctaccgggtaaatgtagaaacgcttaccagggccgccaacgacctcctctacctcggtaccaccttcctcgactatacgacgaagcatacggggcccttgacgaatcctgttgctgatttcattgcgtttgagaagattccttcgtctcaccgtacggctttctcggctgagacagagaagcatcttgcgggattcccggaggattggcctgaggttgaggtatgtggctgcatgaccaccctacaatcacatttacatcgaaccaagactgaagccatccagtacatgtccggcgcagggtacgttggatcattcactgggctcatgagcacccagccaaaggacggctaccagtacggctccatcctcggtatcctgatcacacctacctcaggcggtaatatcaccctcacttcagcagatacttccgaccccccgtcattaatcctaactggctagcaacggaagcggatcaagaggccgcaatcgccatcttcaagtgcatccgtgacatcttcgccagtgacgggatggctcccgtgattctaggcgacgagtattatccgggtaatgggacgcaagctgatgcggagatccttcggttcatccagaagaatgttatgacactttggcatccatcttgtacgaataagatggggacgaaggatgatccgtctgccgttcttgatagtaaggcgagggtgtttggggtcggggggcttagggttgcgaatgcgagttcatttccgtttctgccgccagggcacccgcagagtacagtttgtgagttaccttgccgttgtcttttggtatcggctcgggatgctgaggattgtagatatgctggctgagaagatcgcggacgatatcatccgcgggtgatacctggccgtggtctgcctcatttgacagttaagcaattgtactgctgtttcaacgctgctgttgaaaataagggcggattgaatatctataatcgttccatgaatccgttcctggggtgtgggaataaaaaagcggcatgcaa

SEQ ID NO: 4730 - DNA, 3416 bp, Emericella nidulans
aacatcgccactggaactatcttcatttcaccggaagacgatggggatgtgcaggagtggagtgccgagaagcttacccattactccattgaaggaaagcacgttttcattgatctcgtccgtcctagcaagagtgtggatttccatgcgggagccaaagacacggcgcgcgagattgtctcggcgttgggtgagatctccggagcattccgcgcagaaggcttgcgggaagtgatagcagcaggttcaggcggcggtggcgcacagaagaaaggaactattctttacgacttcatggcgcaaggcgacgatgaggtaacggttggcgtcggtgatgaggtggtgattgtagatgataccaagtccgaggaatggtggatggttcgacgcatcaagaatggcaaggagggagtagttccaagcagctatgtggaagtcaccggctttgtctccccaccttcaaccaccactcctgctgagtccggcttgtcggctgtggagaggaacaggcttgaagaggctcgtctagccaaggaggctacacgaaaatcggtatcagaagcagctgcaccacgcagccctacggtatgtcctttgcatagcatgtgaagcaaagctaacagatcaagccgcagcaccacaagaaagacagcaagagcagccaaagatccagtaagcatctacattgaccttgtctcaagcatctctgacagcatatagaaccagacccggccaaggttaggacgtggattgatcggtccaaggcattcacggtggaagctcagttcatcggcttgcaggatggcaaaatccatttgcacaagacaaacggaattaagatcgcggtgccaatccctaaaatgtcgtttgaggacttggaatacgttgagaaggttaccggaatctcccttgacgaagataagccgttgtccgacattcgtcgccgttctcaacgtatcgaatccgacaaggcggacaaggctcggtcctcgagcgaaggaaagtctggcgctactttccagcagtccgactacgactggttcgactttttcctcaaagccggtgttggtcctcatcaatgtgagcggtatgcgcagaatttcgccaaagactcgatggatgaaagtatccttcctgacataacccccgagaatctgcgcacactgggcttgaaagaaggtgatatcctgcgggtcatgcgctatctggataacatgttagggcggacaggcaacaagtcgaagctgcgaaatgtgagctttggtggtgaagaggtcatgggtgatggtgaggaatctggtggtctctttgctgggcctggcggggcattgcgcaacaacacccgaaagagccgtccagcaccagctgtccaaaccaacgacgtggttgacccgaaagtgtttgagcaaaaagacacggcaaaaccagacaaaccacccagcagcggcacccctccaccggcctctgccgctgccggcgacaagcctgtgcaaaaaggattcgacgacgatgcgtgggaagtcaagactcccaagcaaccggcagcgccagcgacagctgtcagctcaccaccaccggcagcggcacccgccacgaccagccctccggctcagccgtcaattactggagccatggccgatttatccctccttcaggcgcccctgcaaccaacacttgcgcagcccacgtctacccctgctcctgctcaatcaccccccgctactcaacctattcaagcccagccaacggcgattccagcgccccagccgcagcagccaggagcctcacccaacttttttgcacaggtggcacaggttgggcaacagcaacctatgcaaactggctttcagcagtcccgacagcgcccacaggcacctcaggtcatggggcaaaattctcttatcccgcctccgcctcagcgacctctctctgcgcctcagaacatgcctcagcaacagccttttggcctacctcagctgcagccacagctgacgggtctacctcagcaaggcccccagatcgcagccccagggcagagtctggccgaaataaaccaacagcgcttccagccttccttccagccacaacaaactggattcatggctccgaaccaattccagatctggctaatgccgcaacctaccggtttgcagccccaatcgcagtttgggattcagcagcaacagactggattcggcctcgcaccgcagccgacaggcttcggaggctttggtgcccctccccagcagcccatgccgactggcatcaactctgttcttcctcccccgttgcagcctcagcctacgggtatgaatggttcgggctctatggcttactccccgtcccctcccccaattcctcccattccccagcagcagacattggccccactgcaagcccagaagacgggtccagctcctccggtccgctttggtgtcaaacccgatgcacccaagaagcttgctcctcagccaacaggtctgaaggccaacctctcgcaagccagtaagttctacgtctttccgcgtatcgccggtagctaacctgtgcagcacccaccaacccgtttggcttttaggcgaagcgttgtgtacataggattttcttcgcagcacatgacccttttatacactatcttttgctcattctgctggcgggattgcaagcatgtctgtcctgacctaattccctttcctcacttaagcacatgatacatgcagcgatctaggcatgaccaaccaccatctaccacgcagcaagcgccgagtatctgttacgcggcacaccttcagcgaactagacttcgatattccttctttcttttccttttcctcttctttttcaccttcgctctgactgacccgatatacgtaattttggaagaccacgctacgctacgctctcccgacattttccttgtccgttctgttcttcacatttggtctgtgcgagtgcaaaatgcactccctgctgcgttggctagtcgtgtctagcattgtctttactcaccgtctgagcctttgttttgttttattgcatgcctatcgttactctcctattgtgtgtcttggccggtgttggactttcgtctgtcctcagctgcttaggtagtttttatcctcgacgtcaataagtaatgttgtgttatagctggagtggtgccgcacttacttcatgtaaggctggtctgcactaggagagccgataggcaccacattgtgcagtgtattccggacttcttcccagccattctcctttcagattctgagcaatcagctcaaaatatatgtctgcagtgtcttcatctgcctaggcttcaacactgccacgtgcaaaccagcgcaatgaaaaatccatagcctaggcggcagcattaatcaaatcaagatataaataaaagaccaccagcatagacg

SEQ ID NO: 4731 - DNA, 4336 bp, Emericella nidulans
atccttcgcccagaattccacaaacgcacattctcaacagttcaacaccacctttaagtaatagaaagggatcacttgtatatactctgtttcaactactagtactttgcatggcgttggcattacggcttcatatatgccagggatagatttgtatattacctcaacgattatatacggcgttactaggacaaaataattcgtttatcgttgcgattcctacggactctttatataagctctactagggctttctcactgtatatgttgacgaagatcccttatatctttcctgacctctttctcagatacggtccaccaccacgagacgcaaatccccatcgaatttggtttgccattccgatttcaacacccagctcctcggcaaacgcccaaaccagcccgggattcttctggaagccacggccgaccaaagtaagatccagtccctctttctccagcaatgagttcgcgaggtgagcgctgtcgatcattccgacagtgcccacgagcaacttatctcccactgctttcttgactgcagcggcaaagggcgcttggaatcctggcttggcatgaatatgctggtctgcatgggtcccaccgctgctaacatcaagaacatcgatgtagccgctctctgccagggctttcgcaaatttgaccgtgtcctctaagcgccagcttggcagatcagggcgggactcctccagccaatcagtagccgacacccgcaagaagaccggcaagtgatcaggcaccgcttctctggtgagcttcgcaatctccatgctgagacggatgcgattctcgaagctgccgccgtactcgtcagttctcgtattgacggcaggcgacaagaaagacatgaggaggtaaccatgtgcattgtgtatctcgatgaaatcggccccagcgcggacagcccgcttgactgcagctacccaagcagtcttcagattctcgatatcatccctagtcatttgcttagggacagggaatcgcgacgtaaacggtacgttggatggacccttgacccgatctggccagccgcccaccttctcagtcgcagtgtcaccggaagacaaccacggtggaacagtgctggctttccggcctgcgtgggctatctggactccaataatttgattttgactgtgcgcaaactcgatgacccccttcaaaggctctatttgcgagtctttccatagaccaaggtcttgcggtgtaatacggccttctggctcgaccgcggtcgcctctaccatcaggaatcccggcccgcgctgggcgattcctcccagatgggccatatgccacgcagtcatatggccatcgtctgccgaatattgacataggggtgacagctgtagacggcaaccaatgtcagtaacttctattgaccttccaagatattcgcaaacgtaatgagggcagagggtaaatcgagcgatgccaaattgaaggagcaacgaaccccaatacggttgtgcaaggtgatacctctcactttgagaggctggaacagcttgggaattggcgctccatcagactgcggatcggctgcaagtcccgccggcggttcttgagctggggtaaagtaggagatgccaggagcaggcttgacttcaatgtcgggaatttgctttgatgtcatggctaggaatagctaggaatagcttgggctaaactttgattcggtctgtgtcaattacactgaggagcagaccaaggattggggggtttaaatggactccatgacctagcagctgcttagaaatcatgcagtgatgtcaaccttattctacccaggagtactttagatagcctcggtacaacaatactccaacagctgggatccggatacttcggccgagattgaatgcggataagctggactggttcacgctggaatgctgctttgatctcttttccatctctaacagtcagaagataccctctcagatccgcaactgtatgcgatggaggcgatgcgaggaaaccgcccactgcaaaatgcagcgtagctttccaagtccagaccatgggatctgcaactaaaggcatagtcttactctgaagtgctatgcggttcgtagcatcaatcggtgatggtacccggcctgagcttcaagcggtcaagggggaaagtgttgaagtactctgagtaacataaacggtttgagctcctggccagggatcgacgcttatctgtgccaagaaaccaagccatcaatcagtgtccggagtcggagtggtgtgcctccactcccggcctccgtccattccaaaactttttcttggggtgtagtgtgagtcaatcctccttcatatttcccctccatcttcaattcttctttccaaccctcaattctccccattgtcatcactacatcctccaacatgggcaaaggaaagatctgtgtcgccttcagcggtggtctcgacaccagcgttatctgttagtctttccggttctgtcaattgattccccgcgtgctccaagctgatcgagaacacacagtgaaatggctcatcgatgagggctacgaggttgtcgctttcagtaagtaacatcttcaattggaacttgattgtctgctctgatactaacaaattatcagctgccgatgttggccaggaaggtaaagcgatcactttgaaatgcccaccgctacttgcgctctgacactcccgccttctagaggacttcgccgccatcaaggagaaagctctgaagctcggtgccgtcaaggccgaagttgtcgatcttcgccgtacgtgtttcgaaaaactgctaaatttcacaaagaaatagaattaacgcagtggtaaacaggcgagtttgttgaggaactctgcttccccgccattgcttgcaacgccatttacgagaacgtctacctcctcggtacctctctggctcgtcccgtcattgctcgtgctcagatcgaagttgctaaggttagccttctaatctgcaatttatttctctaagcattgacttaccaattgtaaacagcgggaaggatgctttgctgtctcccacggttgtaccggcaagggtaacgatcaggtccgtttcgagctcgccttctacgctctacagcccgacatcaaggtcatcgctccttggcgtgacccccgtttctacgagcgcttcgccggtcgcaacgatctcctcgcctacgccgctgagaagggtatccccgtcacttccaccaaggccaagccctggagtatggacgaaaatctggcccactgctcttatgaggctggtatcctggaggaccctgacatcactcctcccaccgacatgtggaagcttactgtcgacccccttgccgctcccgacaagcccgaggatttcaccgtccacttcgagaagggtctccccgttaagctcgagtacaccgagaacggccagcagaagactgctacggacgctgttgacatcttcttgactgccaacgccatcgctcgccgtaacggtatcggccgtatcgacattgtgagcctgctctaaattgattgggtcgagcctgaggctaatatatactaggttgagaaccgtttcatcggtatcaagtctcgcggctgctacgagacccctggtctcacctgcctgcgctccgcacacgtgtaagtgaagcttgtgcgttttccgtcggataaatctaacctgccgttcatagtgaccttgagggtcttgtgctcgaccgtgaggttcgtgctctgcgtgaccagttcgttactatcaactactccaaggtttgttcagcccttacatagctcagtcagtgttgcttacgatccgctagctcctttacaacggtctctacttctctccggagcgtgagttccttgagcaggccatccctgcctcccagaagtcggtcaacggcaaggttcgctgccgcgcctacaagggcaacatgatcatcctcggccgttcctctgagaccgagaagctgtacgatatgtccgagtccagcatggacgagattggtgactttgctcccaccgagactaccggattcattggcgtgtctgccatccgtctgaagaagtacggtcagatgaagcaggccgctggcgagaagctgtaagatgtgatatcgctggtacgaattacgattgtgaatatgaaaagcgccttcggggaaggtttgtgcgatttatgagttttgtatggcaagtttagaatatctctgtaatggaatagaaaagtgatatggaataacacgctcgagggatatcccgcaacaacagcccctgtttctctccgcattcagggcggccaggcatggtcgtgaaattcaccgtaagactcggt

SEQ ID NO: 4732 - DNA, 2548 bp, Emericella nidulans
aggtgggtgtaatacctaatctcgcatccatgcaggccacacggcgacctttctgtcgacagtgtccatcagcgcagttcacgaaacatgatgataataacattgccgttggggaggaagctgtaggtctcccttgttgaaagacgcacgtacttcgcattggcagcctcaaattcctgtgcggcggtcattttgattcaagggatgttgtcgtccatgattatagtagatcagagaactggcaactgagaccaggcgtggtttctctcttctttattatgaatttccccaagcttgattgcgtgttaaactctgtctaaaggccgcgccaaccagaaggcacctttgatgcaatctgagtgattgttctggtgttcaatccaacccattctttcgccgtttaccccgtgtgacgggcaaggaggatggaggatcgattaggtacagtagagaatcaccaggggatcgaaggctatcaatagtctgaagctagctgtctcatattgactagactaactcttagccatcctcttacgaggttggctggtatattatgtacacgatatcaggagtcatgacatcattctcttctgacagattgatgatgtggtcggtaaccgtctggttccgggctcgatcccgcgctcggaccgaaccagtgacaccccgccgatggcctcatggccgcgatccgaaaatctcgctcgtcaggaataccaggtgatttgataccccgaccacatcgaccgtcacgtttggccccgttatctctgtttttccagcctccatttgtttccatggccgaacgccggtaggtctcttgtcagctgtgagtgtctcactgcacagctctccaaaaagtagacggtctgcgtagccagggagatctcattgctcgaagacgtctcgtggcggttaaaaaatgtctgctagtcacaagctgtcggctgctgcaagaagccagtaaaccactttgctggacacaacgggagcgcctcagctagcaagaacagttgtaggtgagtcgcagcagaaataaataccgtgacgcgttgacttggtggacttgttcgtaataacgcatgcatcatattcgggcatggtgttctatcatacaacgccgttggtgggaagacgaccacgaccgcaaggaggtactaaatgcccataagactcgctcaactacagttccggtatctggtcacaataaaccatatgatgtggctttcagcaggcttgattgatatgcaaaagagtgtccgtttctgctcccaacttcttgggcctgtcactttcctccttgtgtcagcaatgctacggaaactcctccccgacgcgcaaatcggtttgttcttccatgttgctttcgcatcctctgaagttccagtgctcgcgccttgcaaggagtttcttgagggcatgcttgggctcaatcttgtcggcatccagacggaggaatactgtcacctttcctgcaacatgtagcagtattctcagtgttgaagctaccaatgacgactttcagctgaggaccggttgtgaacttgactaagtccccaatcaatatcgacctacttccatggataagtgccgtgaaacggcagatatcgagcagtggttcaagtccgtttccagatcgttaagcggaaaagagactgtggttcacaacaatattaaccaggtgcgcggcattcggcagagattactcaattattcttcagctcacaatgtccgaatgggctcttacggccttcttctaatcaatatctggccgacgatgaatcattgaatccacgaacattggcaggtccgctcacagaggaatgcctcgcgtaagatactgagctgtgaccagtccactttcctcagcatataacctgcacgcattgaaatttagccagcatcaagtatatatgtgcagagtttagagcttcagtagaaacgagaggcagtccatcagttactctcagtccttagctttgttcgaaaagcagctgcctctaataagaaaaaaaaattggtcagttccgctgccaaggctacatagaacttgctgctccttgctcggatatgatcgatccactacgttccgataatccaacagcacttattcggaaaggtgacgacgcaaaaaaagtttgacaagggtgggattcgaacccacgccaaattaatgacgcggaaacttgatagatcaagagaaggttctgatagataccttaaccgcgcgccttagaccgctcggccaccttgcctagatgatgtaatatatgttggtttttataccatgtttactttcatatggtcaagcaccagtggtgggtaagatatacgtcgcagtcgcatatggagctgttttgaggtgctgttgtgatttctcgttttgcacagctggactgctcaaggttacagtatcgatcgtagacatggcagttacggcatttaataagacagggtctcttctacaaacgttaaaaatcatgctaagacagccggcccatactgcgcgttgtttctggtaggatctggcgagaaacgtgagctggcc

SEQ ID NO: 4733 - DNA, 3377 bp, Emericella nidulans
tcaagggaggggtggaagaaatgaattgagacagttactgaggtgatgaagttgaaaagtgaaggaagagggactgcggaggaggggcgcaggtgttacagctgccgagtgaactccaccaacggtcaccagtgcttcagttgtccagcatcatggaaaacccagggacgaaccagcggccttttatggacaacatctgccgcagctactatcatctgcggtcgacgtaagaccatcagcgcaagaccatccgttggctgatacgcgactgttggaatcctggcgccaaacatgtcagtggggtatgcactcgattaaactataaggtagccgactatacccagtaaccaaggacataatagttgcccaggagtgctttggggctactggtggcaaggcaagtactttccagttgacatcctagatgcatggaccactgaaataacatacacaatatgacaacggataaccaatatccaagccctaactcggcctcttctagaaggacatggctcccccagaacatacaatgaaccagtaaataacaccaaacaatataaacaacaaggtgatatattgcacagatagataaaaacaaccactaaaggtccttggaaaagcgcgactcccgaattgcactattaacgctgccccggcgtttattgacaaggtcccccatagaagggggtggggccagaggctctgcgtcttcgcggtctactttcttcactttctcaaccgatggcgcaagcagttcgtggaccgggacttccttctcctgctgttgtgtgctgctttcagcaactcccctcgagtctgcttctgcagtgggctcgctaggcttcttccgcatatcgtcagagacgctcccagctcgacggttaaggtcctctgccgtgacggggttcgacctcaacggccctctgcgcgactgatcttgatcgcttacaggtccatgcgccggttgtctatgtacctccgcagtctctgttctgccaatatccgtctcctgaggaatattagtatgctcggtcccctcgccctcagagatggcagcagtaccctgcgcaggctcgggtgttccgttgggttctttcgacggtccactggaacgacggccaagtttttctttgaaccagttcttgaatttcgtttctcgtctcaagacgctgtcctccgaagctgtcttttcgagtcgaggctgagcagcctccacggggacatcagcagcactgctgtcttgctgtgccacatgtgccgctggttgctcggtaggacgagcagtttcctcagggatattagcagcaccgctagctcgcggttccgtgggttgttcggtaggatgagcagcttccacagcgacaacagcagcaccgttagctccctctttcgtgggttggtcagaaacctgatctgctccagactcagcggaaggcagatgtcttgatcttcgtttccagggccaagccttttctcccttggatcttgcattttgcctcaggtattctgtttcagttagacacccttctcaagaaagcaataagaagaacttgccttgatgacgttcttcctccgctcgtatatcagcttcgcgctctcgctcgatggccgcaagacgctgcctctgctcctcatcaagacgcgcctctaactcccgagctctctgagtttccgcaatgtcttcaatctcatcaagagtaggcttaagtcgggagcgagccacgtcttctatttcggacatatccacgtacctacgaccgccgatattgactttatttgcgagcatgtactgcgtgccaatgtcccgaatacccttctgcgcccgctctgctgccttttcgtccagatatttctgcaaggcgaccgattgttcagcctcaccactatataaacgcttgtccatatcttggatcgctgcgtcgacgttttttcttgcaagttccagaagtgaagctcggtcgttttgtctcttctcattcctcttctcgtcgactgcattaagcttggaccgcagagtggacatttgacttcgtatctccctggacctttcctgatcgaattggtccgtttcgtttgaaaccctgcgtctgcgaagagcaagactcgagcgtgtaccttgcggttcaaccccataatagcttcgataagcggctgcctcatcttcaaggtcagccaatttctcagcagctcgtttctcggcgacaccatgcaggttcatcgcctggccgagcattaacatgcttgcctgtcgcaaagccgcagagtctcgagtgggaaccgaagcagcccgttgagagcgagtagtagtgccactttgaagtcctccgtctttcgcctccataactccatacatatcctttgccatcgacatggaggctgcttccaatatactctttcgccggagttcttccaattctggggccacaggtggcgtggcggtgaagagctttcgatcaaggtgggcattttgaatcctgctggctctcatagctgtgtctaaatcgtcaaagggatcgcccgctccctctgtcgccgttatactcgccctagcacccacactcgcacgcgcagcttcggatggcgcagattcggcccttttcctgttaccatgtgttgccggcaaactttgatccttgagagcatacatcgcagcctgatagggatatcctccttgcggtgacgactctgtttttcgccggtcggtggcgcgcgatactgatgcggtatgtctgagtccgggtccctgcttccttgcatgcgccatcagcgcggcagcagccgatgcatcactaagccgaacgccaaatccagccgcttttgaaactgtaggtgcgaactggagtcagatccgccatttttcacaatattatataggtgtcgcctaccggctgggtcagattccgatggcggttgacggagagcaaggctccgctccggatgggtgacatagagggcggcagtcgcagctgcaattgagtgtacttattagtatggacactcttgtagatagcaagagttgaaagttaccttgatccgctagccgggcggagcgggtgtgcggaatccgctgctggacggggttctgctcgacagtggccatgatatgaaagaaggattaggtatagccgagatagtcattcctgagcgaagccagagagacgacgatgatagatgaaagagaagggccgctgtagggcagattggatggtcgaaagtaaaagagcaagcagtcggtgatcggtgacgtagtgattcgctttcacaggtaggttgcagagcggcagtcgtcggatggcgagaaagggctcaacttcaagttcagcggctgaaccttatgcagtagtaggattaccagcatggcgaaccgatcacagcgt

SEQ ID NO: 4734 - DNA, 363 bp, Emericella nidulans
acgggtctgtcttttaatggccgccccctcgacgggctaaacacgccatgttcaaccctgaaccaaagacctttattttttgtattaagtggagccagttcaggctagccgagaccctctgtgaccgtgcgcgccttgcaatagtgcattgacggaggctgcccctgaaccacatgtgtatgccattcggttaagaaccaactaaatggaccgggtgcacgtgtgcacatatgctgaggagcccccgatctatatgataacgtcagtgctctgaaatgctccgaaggacccactgatcatgatctacatcctgcgtatacagtagtaatgtgatcttcacgagaactgccaccaagtgcatga

SEQ ID NO: 4735 - DNA, 5087 bp, Emericella nidulans
tgcccatagggtatacacaaaccttctcaacataataccccgtcccaacatcaacaagcactttctctcgatccgtcaaacgccccttaacatacagcgaactcgtcagcggcacgaggatctcatccttcccctccgtccccttctttgcggacccaatcacgccctcattgatcgagcgcacgcagtctcggaagcgcgattgtgcggcgcgcagctttgcgtgtgaagaggtgaggtgctcgagttccgttgagaggcgggtctgtaaggcgcggagttgcggggtcgagagggaggagatgttaactatattcgtatcatatgtcagatttactcaaatggaaggagggtaatgggatgggctgggctgggtatgaggcgtaccggcgccgggaggtgcatcggagtctgatgcgggggtgttttgggggggcattgtggtttttcttctcgcttttcgcggttttcggagtagagtccgagggcgaggactggcgaagatccaggatagatttgttagagagattatagggagaactgaacccggaaatatcgagagggtgtaaaggaaaccttaagtctttttagtcgggaataattgtgataaagtcgaagctgtccatgtgctgaaagctcgggccatctggttgacgctgaatgcggtttagcgtggttcttatagccctcatgcgatgctgcctacattcagagtggactacttcaagaccgtttagatatggtctgagtcgtgtcgcactaatatttaactgtctaactagtacaaattgcatatgtagtgattttgacaagttgagcagccataaaatcttgcggatttgactcgatctatgctacgctgcttagcgcttgccactgcagtgaggatcactgaataaatcatctcctttcatacctagatttagcattttactcacagaaaagataaatctctaactagtatcgggagaagttagggtgcagtctgtcaaggtcagttcaggaacacgtcaaggctcacctacaccattttactccagtgattagctctgatagtgactagggtgaacaggatctattctacggtgatagcgatcgacagcaaggtagatgactagtgcctattgaaaatgacggagtagcctgtgcgggaatggaaagttatcgtgggttcgttttggatgaaatcgaattacctgatcgttgttacaggggaaggctctgtatcgacagtgtcggtagcccgagaatctggttatctgtagctatcatagtggatgttgatcatgaaaagatggacatattgtaattagctttgtatttgcatgcgtgtaactacgaaatattcagtcatgacattcatgctcataatatattaatccccccgcgccatgtttactgatgtcgacgattctctcgtgctcctcaaacatttccggtgtaatacttggctcagtggaagcattctggaagtcacggtatttgcagaccaccaaaggactctccattccacgcctccctaacgcaagtcggctcgcgtgcagcactcgtaagaggagacgggttatagtcatgaggatttgattctcatctgttccggccatctgaacatcttcatcaaaaatccctgcttggagaacaaaagcacagtcgactaaaatccatagtcgatgatattgaaacttagtgcgcaagtaatgactagagtgcactacatagaaggtaaggcttcgattctgcggcaaagcgtcctttataccatcgttagcaggtacgctgactctccaatgaagcacacatggcagacacggcggctgtaataggttaggtagcctcctaagccgctacaactgccacattagactttgcaaagctcattgtagggattttggaatgagtatatatctttcgtatggacgctaagggtaccctgtatgacaacttgagcctgaccgatgatatagttagaacttcgatcgacaacgtttctttcatccattgacctgtttattatctgtcagagaccgtattcgagcttgtagcatggtgtttagtcccaatcagcatatcgatccgtcctcgctcagacagcgatcgtctgaaggtaggtgtctggtggcactcccagaacgtagcctgaggccctctgaaccaactagagacgcatcggacggctagatggtaagctgcggttcctttctccaagttaggcgtcgaattgccaggatttaatggagtatgtgcgaagctctgggtgaggggtatctcggaggtaaggctggcttgttggtgaacgaagaatgtgctggaacagcggaaatgaaaagactctgtgattagctagacgtgtatatttctagattaaggaacaacagcagcgctgtaggtgtaggttgatggaagctgtgttgaagtcgcaagcaccccacttttgtgcgtgcgtgcctacaaccccaccacgacatcatccagcaatagcgtcaacctcgacgttgaaatcaaaacgacttcctctttccacattatatccatacactgaattcaaccgccaatatgcccatcacgcacattgttatgttccaagtcaagcagggcctcagcgccgaaaccgtcaacgacgtaagccaacctctccactgacccaggatcgattctcacactcgatagctgtgtttgcggatgctgtccctcaaagacaaatgcatccaccctgtttcccagaagccgtatattatttcctcatccggtggcatagataactcccccgaagggatgcaggtacgccttcggcaccccattacttggtccattccatcgagaacgctatgctgacgaaagaagaacggtatcacgcacgcttttgtggttgagttcgccaatgaagaggacagggcttattatctcgagaaggaccctgcgcatctggaatttgtgggcagtttgaaggtcgtatctgagaaggcgcaggtcgtctacttgggcaggggtgtgttttgaatgggtcgaacgagctgctttttgaagcttagtttacgaatataacgattgccctttgaatcccatcctccgccaacgcgagctctgagttctctgtagagaaaggatttagtccggttcccgccatagctgaagtcagccagagcggtgtattctgtatggtctgttataaaggagtgttgaggacattgcgccttcaaattgtttgtctcgtcaacgctgcgccgacaattgacgctctcgctttcttcctataccccaattctgtctccttcagattgtttcagagtaacgtgtttttaccagacgtgaaacatttgcggtctgtggttcgttctggaaccttaagtgcttgatctctggtaactaggctataggtacggaaatctcctaattgacacctacagatccccaggctcgtcagattcaactcctttctccagtacttcctcgatagtccccccccccaacaagtcctggtcgccgagacagtcaagctaaacggcgcgtttgaggccagaaagataatcttgtatagtgtcatggttgatacattgctcaagaaggatgatagcataggatctatcatccgatagccagcttaaacatggattttataccaacgctggtggttgagaattcatacccaaaactgatggtggacattaacggagatatctgacaaactcacccggccaaactgctgatggtctgacgaagcggacgatttatacctgattacgacaatttgcccagacttgaaagaacccaactacgcattgccgttttttgcgtcgtagtgccagactgcgacgcactatacctctttgaacgaccatatccgaaggccatggtgagactgatgttctgcaccagcccttactgtgccaaggggggaaaccgccagcccattttagccctgacggtcttcttctagacaaggatgagcaaaggtcatggccgccaaatatgcttcggaggtcatcattgcagctttctctctacctgataacttacttggatacctatttaggtgcacaaatggacacgggggtgtccccggaagtcttactaaattctaccatgaaacaacatacgccgtccacgcttctctgccttatactttcatgatattgccagtgtttaattacggtacaatatatcttgagagattcttgaaagtacgagcttctaataacttgaaagattgcaagctatagtctcctcgttaaagcccggtgggttttcgagtctgaaagacgaaagtttcgtcagtaccacctcaagcaaggagcctagtaaacgcgccactgtcggagtacttaggttgatcattgagcgcaatggggactcgtatgattgcgcatggtttaaactcagtggccgttagccggtaggtcttagggcttggcggttatcactaccagctggagcagggaaatgccttcgtttggcctgggcaaccctggcagtcgcgaaaaaccgactaaagatagatgttctgatatggaggcaaagtctgaaagggctggcatgattaagcatgcagagttgtatggaagagctcgatgtaatcggcgtacctacaattgatcagcgacctttgttctcctaaatccgacttccagcatctactaagtttcccaatttttgaggctaatttcacccccccacgaaattatattgacagaacctcatcagccaatcttgtattccggcagtgcaatctcgagtgcggcgacagtacagaaagcgtgttcgccccgtctcctgcggtgcccacaagctgttggccaacacgtcaagctcgattgagtgcgttctgcctgaaatagggtaagcgaggttgggcttaactatagtctcaagacagaccggcaaggaatctggggatggatcccagagtcgggcagcacagcgcgaaaagcgccagcgggccacaggcttgcgccataacgcttctgattgataaccatgtgccgcaccccgtaagccctaagccgtgcatgtgcatttacatgacaaggattgctttgtatcgcatacccagtgacagcaggctagggcacaactggtatgattgaatcaat

SEQ ID NO: 4736 - DNA, 3594 bp, Emericella nidulans
  unsure (1)..(3594): unsure at all n locations
gagccgaacctgatcattgtggagtacactggcgagattacgttccaagctgagtgcgagaaacgtatgcgggctatatacaagaagaacgcggtacatctctccctatcctcaacgccatgctccaggcttgattctgactgggcccgcagtgttattaccttatgcatttcgaccagaacatgatcattgatgctactcgcggatccactgctcgcttcgtganccatgnctgtgagcccaattgtcgaatggagaagtggactgtggcagaaaagcctcgtatggccctcttcgccggtgatcgaggaatcatgaccggggaagaattgacgtatgactacaacttcgagtgagtatattgataaggcgtggcccgcagaacaattacactaatttttgccccagcccatattctcaaaagaacgtccaacaatgtcggtgcggttcgtctaaatgccggggtatcttaggccctcggaagagagaaaaggaacaacgagcagagttgagagcagctaaactgaaggaaatcgcagacgcgaaaaaggcaaaagcagcaaaacggagaaaagagaacgctctgaagagatctcgtccgcgcaataacaggaagggaagagccctcgccccatcctccattaaatctggcgtcaaaaaggcggcgtcaaaagcgcgtggagctgtctcccgaaaaatgcctgctactacaacatcgtccaagaaaagcgcatctaaaaagtcctcgcgcgcctcgaaactaacgtcgacgaagtcaaagcgtaatatcagattgcctacaataaaagcgccgaaggtaaaagcaaagatcacaagtcgcgtccgagcgccagcacaaacgacgagaaccaaggtgaagaaggcttcaacttcaccacctaaatcacgcagccgagtgtcggccacgaaaaccaccaaggctgccaccgcagcggagagctcacccgcccgaaaacgaccattgaaagctaaaaaggacattctgaatggggttcgagaaacgatcaacaaggggaccactaagcattcccaaagagcgaaatcttcttcatcccgtacaacagggcgctctcctagggcaaggaagtagccacaatacgtactacagactgtgcttgatccttgttctaggaagccctcgtttgacaagggcacctgcctctgagagcaccttctttggctacttcctctctaagaatccatttttgctatatttctgggccgatatccgaacccggctgcttggaaccttgtcttataccccaaccatatccttgggcctttggcgttatggcattctatattggatcatgttcggcttatgtttagtctcttgtcaacttgtatgcgttgacgcgtatctatgacttctcttggtgtttgttggttctattgcaggaatatcaattgcccaaggcagggaacgaggacgatcatactgtcactctaatcaattgcaatatacgtgattcaaaaactctggctgtcctcaatatccttctttactatacaatgggcatccatacaagcaatggcttcaaatagacccttaacaagaagaaacctggaaataataaaagcccaatccagactcccgcccaccgctagagaaaatcacatagaagggcacacttagcccgttaatcgaaaagccatggatccaggtaccaaagtgcttcactcagtctgccgttcgccgttcggtgagggtccatcgccagacgtcccgtgttcgccgttcatttgtgcttgagtagcttcgccttgtgatccttctccaggctcaacattagaggcgggagacgtttcagtttgtggccttgagagttccttgggagtatgttgggcggtagcctgtggttgtggttgttctgccgcagatgtcgtagcaggctcagtaggacttggtgtagtactcgtttgctgttcctgttttttctccaccgcaggttcagtcgagtgttgaggcgagtgtccctcaacagtgggtgactgtggctttgcgattgcttcagctgacgtcgtggcctctgccggaactgggaccagcactggtggtctttctgcctgtccttctggtgcaacattaaaggctggggtcgctggaccgggctctggatgtgtgggggtccctgccaatttctccggttggtattgctcaatggtgggaggtgcttgctgcggcttctgttctgaggtttccagcggggtgatttggtctgctcctggcggcgtcagttgctcgacaggtggcgccacagggtcttcgcgagataactcctttgtctctgcgcttctcgtggtctcggcttccgttgatgtctccgttggcccagaagcagcctctccaggtgctgttatagtttcttggctaggcagaacccctgtcttttgttctgaaatagctcccttctgcacgtcgcttagggtttcctgacggggattgtttaggctcgcctctaagttgtccaagagattgaattcgcttccgctcggctgttgatctgcctctggaggggtggattcgtttgctgaggcttgaccaggtaatgaagattccggagcgactgtttgaagattcgtgttttcaggcatggcttccgaaggttcaggaactgattcacgcgcttcctccatggtcacgtctgtttgttcggtagctgggggctgagcgttctcaactccaattcctgatgcttctaaaaccggagcctgtgaagtttgctgctgcgctgatggcgccttctctggactcaggggttgagcaactcctggtgctggctgcagttgggtttctaaagatggtttcggagaagcgcgtaaggtagtctcggcggtcgtggcgtccgcatatgaacgtcctctgacaaacgttctgtagatgttacttgagtatcttgatccagacgagaagaatcagtcatactgatcggtgcgactggcacatggccagagggctgtaatgacgcagcttgttgtgctgatgcttgtgaaggttctgtatctggctccgacgcctgcgatacttgcggtgcgtgcgaatcagcagtcgttcctgtcttggctgaggcagaaataggtgtcagctcaggttccgtgctgggctgtggtccaggtgtctccggggttttcgcatcaaagccagactcgtctccctctccatcatcgctctcctcaccctcatcaccctcctcatcctcctcatcctgtgttgtctgatctacagacatacgcgaggaatccgtttccttgccatagttcgcagcgctgtcgccagcgccggctccatgaacaagcgctgcgtctgcgccttcgcccggagcaaacatgaccttcttcctccttcctttcaaacctttacccttacgcttgggaggcggcggccgtcgtttttgtggagtaataacggctggtgaatctgctgctgcaactactaccccctgcgcatcgacaacgccaaccccctcaatgactgtacctggggcgggagcttgaggagtaacagtaacttggttgctctccgcggttacttgactatcgccagtaatttctccttcgatcttgtgtccttca

SEQ ID NO: 4737 - DNA, 5565 bp, Emericella nidulans
ttgtatttccttgtggtaagggtaaagctgattcggcttcagttaagggagataaagcagaccttcggcgttttcgacttcctaaaagatagtagtaagcaagtggtaggcaagtagtttgtaagcacttgcaaagcaacacctgaatacctactttcctaacttatatgctgaagataattagcttccatattagaggtttgatataaatgatgaatattgaactctggaagttattatactataagatatcatccctatctagctttgcagaactaggttatcttagtagctttgccagccagtttgcaagtagttagtgagtacttagaaacttacttcttgactgcttacaccagactcaagtacttgccagatatatataacttctgatgggactgttcaacagcatttgtatagttttgtaataaatcaaagtaataaggctgaatcttagagtatactttatttaatcctgccttgatcacagcccctttcttttgagatgcccaattctggacattagcattttcatactctatatcagttagtaactggttaccaagcagtaagtaagtattcagtacttattaagagatccaataaagagtcataatcatcctcggatttgcagtctagaaggcttattattcggctccaaaggggagaaccatgcttattagttctaatatattttaagattgtcctttggaaatggactctgcagaagacaataatatgctgtaaatactatgttatatctcaatattgaggattaatttcagatagatagtgaccaagtccttggcagttagtaagtattttggaagtagttaataagtacttactggtatattgttttgagtctatattaataataataccatagatcccagaaccatggataggatcaaaatatattagctgatgggaaatcctctgaacaaggctgaaaacctgcttaaaaagtaaataataaccctcagtagaatcaatactggtaaatacttggagtaatgtgataactagtacccaggtagttagtaattgcttgccaagtagttaataataatacttacttttgcattggtctggcaggaatatagtaaaaagcactttattaatatcttttgactgtatttgtttataagacatatcaaccttaaaagatgacagctgtaaaagtagttaaatttgctctttaaaagtacaaagtaccatggtaccctgagaatcataataatattcttgaatatagtcctaagtacttgatttagtatctattaactgctctgcaactatatagcaagtacttaccttcaagttctggtcagtattctggaggaagataagaccattaatatcctgtctgtttagataagatattagatgttgcttttgaattattgctgcaattcagtccttattacaaaagctagaataaatctctgctaatgtcgaagcattgtactggtgacagaaatcttcaagttgcggatttcaaaggaattgagctagaactagttaccaactacttcccaagtggttggtgagtacttaccagttgttagattagggtcccgaatctgttcaataattctcttcacacctgctagaattctttcaggtgccttgcttggtagtagtggtggatgtttataaatcccgtgcgatgtaaataatatataggggcataggtctgtatttataggtactagagtattaaagaccacatcacaggtagtgtgcttcaactgaccagacccctgaggatgatcttgatctggtaattgcttaataactggttgcaaattagttaggaagtgcttaccacagtatttttggcaacttgacagaggtttaaaaacaccacattcttcagtagctggcagaatctctttattaaagagatcctctagaaactccaagtctattactgtatgtccttgaattacgcccctataatgttttgttaaacctctataggacctatttatacagccaataaatggtgcatattctctatgaatatcctgtatatttattagctgcttcttaagtacttagcaagtacttgagatatactatctagttatatcttttgaaaactgctttgcatgttgggagttgatcaatgcatgcatggcccttttcgaaaaaggcaactttggaccaataataactaagattgagtaagtacttagtagccggttaacaagcagctttaatacctatatgcattatgctttctaatatcagactctaagatctggatatctttctgagatctttggatctcttgctatgtatatttatcaacagatgtataataataagactgcagggctggactgaggaatttatatgcataaatcccagagcatctccatgtccattttctgacttgacatccaagaaatggacagtaaacaggttgtttttgtccaaaaagctgttgttttgcatattagatctggaaatacttagcagccagttaccaagtacttgacatgcacttacactatcagcaagatattccatttcaacctgtgttcatcctttggacacaacaacatatgtatggccatatatatgcgttgtgggatattctggaagattattgatatactcaatatttaatattataagactggaggagcttttagctcttgtaagcggaataagcatgtctggttccttttatttagttagcaagcagtttaaaactaacttgtaagcagtggcgcaataactatacctgtatttctaaggaaacatcagcagctggctcaataagatcatcatccaaataggttgaaatgttctcaattgaaatgttcccggagtctggacactccattgttctaactgcttagcaaccaattgctaaatgctttgatatttgtgtaggtcaagtatcaataaattggaaaacagaaattgaattacaagtgtagacaccagtatttaaagacctcgtgcgggacaaacttgcttaataatgatcttggcactcacgtgcagggggtgtaggccgcatgagctcaccgcttggctcatgcggcctgtgtacacaccttcaatgaaatcgttaactacggatattgattacataaccaccccaataatccacattaagcactgacagctcaactgacccacttaaaaaaattactgaaatcgcttgaatcgagtaatttctcctttcttttttcccccaagcctgacacaacatcaagtacttgctaagtgcttgagggtcatatatcattatggaatctgacagtctgtcaactcttaatattgaagatgaagatgatgaaaatattggaagtttctcgcgagacgcggaaccagaagaagtaggtacatctgtgacttacagctccacccacaccgcttcccgctgtgggtgagccacaccgtaatttccaaccacaccgtaattgccaattttctatagttttactattccatacatttcattcacccaacatgccggaaacctctaattttgatgaatcctgcatggttgaggcctgcgaagccgcccaagccaaagaaaaacccaatattgccttgatcgcgcgtgaatatggcgttccgcgtcggacactacgaaaccgcgttaggaagggcagccagccttgtacggcccggaagccagttaataaggcacttgataggtatcaggaggaagccctgatatgctggatagcctttatgcgtgatatcaacatgccagtgatgcctaggatactagaagaatgggcgaatcgggcacttaagtgcgctggtaagcctgaccaactggttagcaagatatgggcatattactttgaaagatggcttccaggccacctcaaacttggcccagtgaagcaagagacaaaggaatcaaagtatatccaggctgaggatgcagggttgctggcacactggtataatcagctagcaaatgtggtcaaagatacaccagcctggctggtatataactttgatgggtgtggcttccagcctggtgaaggtaaaccaaggaaagtaattggtttaaaaggtactcctgatcttgctgaatctgagaagggtaagaatatcacagctattaaatgcatatctgcagatagctgggtaatagacctattctttatcttcaaaggtggtggcatcttcatggaatcttggtttaacaagagtgaggctttaccactatatacagtaatagctactttacctaatagctgggttttagatgaactagccctttagtggcttcaatgttttattaaggcaacaaataagcatacaaagaggggggagaaatggatccttatatttaacggccatggctcacacctcactgttgaattcttgcaaagatgcgaagacaatggtattataccttttggattccttcctcctacaacttatctctgtcagctattggatgggaagctgttcctaagttataaacaacacttctaatatattaataatgatctatcttactgggccggtgagccagtagggaagtcagagttcctacaagtgatcagtccagtacgggagaaagcctttaaccaacaaactatccgtagagtattcaaagatcatggcatctggccagttaatagaagtaagattgttgacaatcttactatccaagcatgggaacaaatcccagatatatacatgcctgatttgtcaacaccctctccgccaccaacagctatattatcatccagcattgaaatttcacctccaaggacaattcaggatcttgagaagaactaggcaaagttatctaaacatgcagatcttctcacaccaaagttacaacagaaccttcaacagatatttgaacataattgaattgctgctgagaaccttactatggcaaataaaacaatcagtcaaatcaggactgcacaagctcccctacagtgccaactaactaagtaacaagttaagctactcagtcatgatagcatactaaaagtatgtgatgcaaactgattaattgcagcaaggaaggctaaggaggctgttgcagaggagaagaagttataaagacagtggaagaaggtgcatggtaagaaaccaccaccagcatctatacaggaaaataaggtatcagaagaatcagtaaaggcagcggaggagaatggtgaggtttttttcttagatagccagccaatgcattgagaatagcttcaaatatagaaaattggtaattacggtgtggttggaaattacggtgtggctcacccacagcgggaagcggtgtgggtgggctggaagtcacagatactaagtacttttcaagcagctactaactacttggtgtaaggaagatactattccaattctactcacccaagcaaagggcaaatctcttaccaccctttatttagagtatatcaatgatctccctgaatatcctgaaagctatatacatggctatatatatattatccagcaggcatgcagtcacaggcagagatagaacagatagtacatgatataagtaactaaaataactcctaccacttactaaccagttta

SEQ ID NO: 4738 - DNA, 3818 bp, Emericella nidulans
aaaagggcttggtagaaagacggatctaaaaaggcacgtggatagtgtatgcctccgaaccctcacccggctcccttcgtgtcgctaatgattgagcaggtccatcgagggattcggaagtatggatgtgaagagtgcggaagccggttcactcggcaggatacgcttgcaaggtaggccaaacactttatcttcgtggacacgagatcgcctgtagctgacaatcaaaaggcatatatcagacggatgcagacgaaccggtcggaggtcaagtgacgcgataagagccaccgatgaccgtcctccatgcgaacaatacaccgcctgaaccctttgaatcgcgaagcatcgttgaataggacctatgttgacgttcatttcatttgatattgggaggcccgcagtgtacatttcatgagttatgtacggtctagggaggcttttttgcttggcttgcattctgcgtcgcatggttttgtgtagcaccagccttgtttgctttgagtcatttgatataccattagaaggggccagagcataaagggctgcctatagaacatggtatcaacatggcaggcccatgcaaggatacaacaagcacgtttcggcgccatcgcgttgattggggaatataaatctatctttttgttcttcgagcccatcttacttgctccataaacgcatatttgaaggttcacttggttctcgcctacttataccgcgttgaaccgccctttccccgcctctgcagtcgaatccaaaagcggagtcattacgagcggcgaacacctggaccgggacggagtaactgggaatacgaattttgagaaaaagaaaacctccaagcgcataagctgttggtcggtctccgaaaaatgtccaacccaacacggggatcttccaagtcacaattccgctagcaacccctctttgtcagcttggagatatgttaaaaattcccacgagtacggggtaaaatccagcataggtcgattctgctgggattcaccgctttagagggagtccctgaaatatcgccccgatccccgatcgtcaagttttaagtaaccgtcaggaggcgaattattcccaattgctttgagcttgaagattaaagacgcagcgatgagcgccacagagacaatcaccaggataacggccgacaatgtcgctgatatctttcccgacgtcgatacctcgctagcccgggaagttcttccccaggcgacgactacctcggtcgcgaacagcaatgatctcgctggatacgatgaggagcaggtccgtcttatggatgaggtctgcatcgtcttggatgacgatgataagccgattgggagcgctagcaagaaaacatgttcgtgtccttccctccaacccctcaacccctcccttccccgctatcataactcataatccctaattataatggaagcattgtattgccgtcgccgatctaatattaaaattgtgcaggccatttaatgacaaacatcgatcgcggcctcctacatcgcgccttctccgtttttctcttcgactcccagaaccgcctccttctacaacagcgtgcctccgagaaaatcacctttccggacatgtggacgaatacctgctgctcgcacccgctagggatccctggtgaaacggggtcgcagctggacgcggcgatcctgggtgtaaacgcgcagcgcagaggaagttaaaccacgagctggggattaagccggaggaggtccctattgagaaatttgagttcttcacaaggattcattataaggcgccgagtgatgggaagtggggagagcatgagagtaagcagtacccggggtgatttcgggccggattggctggttggtgtacagtggctaacaaaacgctccttgctagttgactatatcctctttatccaggcggacgtcgttctcgagccaaatctcaacgaagtccgcgacacgcgatatgtgtctgcggacgagctgaaggagatgttcaagcagaccaatctgaaattcacaccgtggttcaagctcatctgcaactcgatgctgtttgagtggtggagccaccttggttctccttcactggatcagtacaagggggagacgcagatacgtcggatgtgagggcgaaggaaagcgaggcgaatggacataacttcatgatgatatagcagcgttattccccagatgcatatattggctagcataaacgtcatcttatttccggcttgttctgaacatagcagatacattaatattacatcgtattcggcatgtgctcgtctacttagaccgactacgcgaccccgaacccgtctaagtcaatatctatgtgcatccgtaacgagcaacacaatacagcttcccaaaatgacacctcccacaacaataaacgtcagctgcgtcttccacccactctgcacaagcgccgccttgcgactatacttcttgaccgtgcgcacatagtttgccagcccattactcagactcaccaggctcagcacccagaagataatccccatcggcagggccatgcggcgctccaacggcgtcggctgcgccttgaagttaaaggatataatgagggccacggacacgatgccaaggtacatcgagaggcggagccaagagaggaacgttcgttcatttgcgcagtggtcgcgtgcatcggaggcagagttctcaaagagcaacgcgccgaggtatgggcgggtcaggaagatgtgcatgtcggattctaggtgcctttcttgttgttagtagagtcctggataggctggtcggcaatgaagggaagggtgtcttactcttcgactaggactggtttcgcatttgctgggttgatgagaggattgtatcgtggtcgtctgcgggctggagctggctctggacctgagggtgtaggtgtggtgcccggcatgttgattctgtgattctgttgagcaatggccctgagacgttgggcaatacagctcaagaggctaaataagccgccttctggagcttcgacccgaagattcgctgtttatgcagacctcggatgacgagcgaatcggtgagcattttgtggctggaagaatgcctcaaggctatctcttgagcaagatgatgctgtatgcagcttgactggtgaccgcagagtccacgtgataccctaggtacatagttcttagactaggccggtttggtaaatcttcgtcgaagctacagccctttcctgaatcacgtttctcaaacactggaagagacattaattgtgatgacaaacatcaattgatcaacggccagaccatgaagcagagacgtcgtcctgatcgtgatgatctcagacccctcccccggctcagcctgccttttctggttggcgagtggtggatccgatctgcggggcatgttctctctcaccgtcaacacgagcgaacagaattgcgcccataaacagccatgataccgcttacgcttcagatgaatgctcattggcgcccttatcacaggagattgcattgcaaataacccgccgtgatgtgatggtgctgtgagtcatggctgcgaattgtatatctacatgcgggtggatccgtcagcccagagcccggtctaactacggaaacggtcgaaggcaaagtcttgtcgagcgcgatgcaaatactggactatcatttgagcttaagcgacatctttccttctccaactcccctctgtctttgactctttaacttaggtggtcctgtttcgataccacccaaaccggtgcattgcaccaccgcgatgaggatatcgcgacaacagtgactaacgaccttgaaatcaccttct

SEQ ID NO: 4739 - DNA, 5731 bp, Emericella nidulans
gctccgacgctgcatttaatatgttttcaatgaattggaatgacgagcagcagtcaccgcactattccatcgtggttgatgctatgtctctatctcctgaacttgggccgctcagcaaaatcaggccttctctttttatgctcatactcccaacaagtatcgtgatgctcaatcaaataacagcacggttaccaccaagctcggccaaatccaaccgtcgatagtctactggctcttaagccgttatgaccaacctaatcttatttaaagtaaaagatagttatctacaatgtgttggaccatggttactcaacccacgagacgaaactggtgcggagtacagtcagcagaggttctggcagcatgagtatccaatcgcgcgctagtgatgttgacagctctggccgcccggcccgatgcatccagtacatagcactacacctcacccgccacagagctctcctttgaagaaagatacttaaaatgcctgagggtatgttgttgcatagatgatattattgtctcgctttttttcgcagccatgctccttctaactaacgttcccgccagggggaaaatccaagaacaagaacaaggctcgccaacccgacgccgccgatgtgaatacttcggatgataataggagtggtctatcgggagcgaatgtaataatgcgatataaatggcttctcttactcgatgctaaatatgagtgctaggacgtacagccagacacgacggacagtcacacgcccgaggagactacaaatgggaaagagattgatgccaattcgactgaccatggacacgccgatattgaatccgacgattccagagcaaagtcgccgattttggaagctctccgatccaaggaccgctttgacgcccttgtaagagaccgagattcgttgcgcgccgaggtgaccgatatgcggaagtccttggaagagatacaatcgaagcaccgtacagatatgcaggctttacagagcaaactggatgatgccgagagtaaaaaggagcacgcggagtctcagtaccgtggcttactcgaaagggtgaataccattaaagcgcagcttggcgagcgtctcaaggaagatgctgtacgtatactgctggaccgaatccttgatacttgcgctaatataacataggaggagatttcccaggcgaggtcgaggatagaggaattggaggaacagaattcaagcacgaaagaagaatatgaggctaagatctcggagctgtcggaggaaaaccagcgcatggctaaagagctttcggaactacgcgaacgaacgaacctctcgcaacaaaactggcttagggaaaaagatgaccttttagagcaggagtcgtacctccagtctgaattcgagcaagcaaaggaggctatgcataattgggaagtgctcgccatggaggaacgttcgatcagagagaatcttggggaaaaggttatagacctagaggaacagttgactactctgaaggacgcgtatgaaagaacttctgctgagcgagattctcaagcagcggctgtggatgggttacagcgcgctcttcaagaaatccaggccggtgggtgcttaaccgtcatagtccgcgagtctataaaccgctaatctgttgcagcacgaaaacaagagcttcgtgaactagtcgaaagctctgatgctcagctcgagggactaaagcagtcacttaatgaggccaaatcgaaagagtcagaggcaatgaagtctctacaagacctccaacaagagcttgagagggtccggccattcgaaaaagaagtcagggagaagaacctcctgatcggcaaactccgacacgaagctgtcactctgaatgaccacttgacaaaagcgctgcggttcctcaagaaggggaagcccgaagataatgttgaccggtgagcatgaatatttgaattacctcttgtgttagtattttgctgtcaaatctaatggtgcacgaacaggcatattgtcacaaatcatttactccacttcctggcgcttgaccggtcggatccaaaaaagtttcagattctacaactcatcgcggcgttgttggggtggtcagatggtatgccccaccaagctttaaacaagagcgacattgacatcgttcagaacagcgtgagcaggcagggttggctcgtccaggagcgtctggagcctcggctaggctccgggttcctggctcacccatgcatcgtacgcctagtacgccaagtttagcgactgaatttcgggataatggggcagcaagcaaggaatcacttgcagaattgtggtccaattttctcgaacaagaatcacaagcctcttcccatgataatagtccattgacgaagtgaagctggagatatacagcaactcctaccatgtcccttcaacgaacttagacaacatcataatataacaacacccatagctcccattggttgtacgaacatccacgcttttccttatctgtgctgaaagcggtcagattcacttaccgcctcaatcaacttagatatgtgcaaaagaagtcatagcagaaccgcaacgtctctttaatataccagtatatgcataccttttcgaaaatttgtggaacattgtcagcacctgtcaagcgcccagcaatcttattccacttccaaagatatacaatggctactagtgcaggtaatctcaggaccctatcttcatttccttcaatttacaaacatccatattaatatgaacggacaatctagtacaaaaattccgccccgtagtagtgtcgggtccctctggaactggcaaatcaaccctactcaagaggcttttcgccgagtatcccgacaccttcggattctctgtttctcgtctgtaaaccccgctttcgcccaataactggagttctcatgaaggcagcgtttctgacatactgtcagacacgactagagcccctcggcctggcgagcaacatggccgtgagtactatttcacgacaaaggaggacttcctcgacctagtgagcaaaaatggctttatcgagcatgcccagtttggcggcaactattacgggacaagtgtgcaggccgtgaaggatatcgcggcaaaagaaaggatctgtatcctagacatcgaaatggaggttggttactgaaaatcatcctgcgaaagcgaagttgtggagtctctcagttggtagactaacgcctgtacttgattccaaatagggggtgaagcaagtgaagaaaaccgatttaaacgcgagattcttatttcttgcgccgccatctgtcgacgagctagagaggagattgcgtagccgcggcaccgagacagaagagagcttgcaaaaacggttgacgcaggcgaagaacgagcttgagtatgcaaagcaacctggcgcgcacgataagataatcgtcaacgatgacttggagtccgcgtacacggaattgaaggactatattgttgatggtgggaattttggatccgaggcatagacggcgttgaactcttcaagacacaacatcatcgtcacgctttttgtacaatacctttcaatgcatgtgccagaaccagctaccatgtattgaaagcgctaaatgagacattcaaggatatatttcttttaaacctgaatattaaggaaattaagtacatgaaatgacgagatcgacgctgatgctcgcatgctagttctcttttcgggacgcacaaaacgaaatagtaggaaattgaggtaaacccagtcattctcccttgtaatgggaagaggataacaataattataacgaaaaaacaacaacctagagttaaaaagggatatctgtaagagcatgctgataaggaagtgggtggtaatacggagtccggaggtagagtatagaacgaagcaaatattcgcgagagctaaagtcttgagtcgttcgcctgcggagagtagctggccctagaagactaagctttattttaaacgggttattactcctcgcccagctagtagccgttcatcgtgacacgctgcgagttgcggcttagttccctgtcagcggagggactaatcggccggctgccgctagtgtgaccgcccgcagcgctgctctccttcaatgccagaagctgcttggcacggaaggtctcgtaatggatctggcttgtcgtttcgataagatcttgaagatgggtacgggtaaggaagttccgcagtgaaacaaattcgcagtggctctcatcctccacattgatgacaccccagcggttttgacgcccacggacaggttggccgttcacgacgatagtcttctcacttccaacaacggcaaaaggaatgatgtcctaatatcattagaccgagatacctcaattagacgccagggaaattcataccttaatgcgggcatttacagcacgttcctcatcgtcaagctcatcattgtcgtacgggtacatcttgaggttgtggaaggcaaactcctccttaattcgctccttgaacgcctggcgttcttcgagggtgagcgaatcggctttggcgatcacaggcacgacattgacaacgtcggacagcttcttcagaacgacgatatcaataggtttcagacttttcagaagcaaataagtaattagctacgtgtacacaacacatgccgataggtcttctaaactcacgcatggccggagggctggatgaaaaacagacagcagtgaatgcgggtatcttggatgtagcggtcacgctgcgcagtaagctctttgcggaggtatgccgagtgctggtccttgatatatttcacaattgggtcccaactagtgacatgttagccagaatgaagtcaagaagcaacaggtgtagtcttataccatctgtcattattgacttggtcaccatatccgggagtgtccacgatgttgagtctaagacggacgccattctcctcaatgactgtaggtccgttaaagaatgaagttcctgatggtacggaacgtccacctactatgggaaacagtttgaatctctgtggtcgaccgtacgggttcgttaggggtcaagcgacctttcgagtcgatgaggtgcgaggcgaagatagtgttaatcagagtggatttcccaagacctgtctgtcctgttcatgggcttagtatcaagcacatcgggccagctggaaggagatagatggctcttaccaacacacatgacattgaactggaagccgcgcttcagcagcttccgttcgatctgagacgtgatgctatcgaaaccgacatggctccgcgggaagacagtagacggggcggaacttgtagtggccatggtggtgaaggggatgagaaatgtcaagtagataggtggtcaattgagggaattaaatgcaaaaggtgcaagaaagaggatatagaagtgcagctcgcagaggaaacctacttcgggaaaaagatcgagacttcacccaaaaaatcgagctggtctggtatcgatcgagagggagagagcagccatgatagacccctttaattgttgtcacaactccagtcagggggattctaatcctaattcggcatagcgcctctccagatccaaacccagcaaaccgcaagttgtcgggaaaagcttcaatttgccagttcctggtaaccgctgatgcacgtcagctctcgcaccatctcagttgcccaatttgcgccgaacgcctctacgccttccgcaaatttttgacaggatacatagcccacaaaat

SEQ ID NO: 4740 - DNA, 3933 bp, Emericella nidulans
taaatatagaaagcaaataaaattagtaaagattgcgagaaaatatgaactactataattggcaaaataaacattaattaagaaaccgcacacatgagtgctaaacagagtggtcaccagcccacccaaataccaaatcatatccggatacaaaaaatgacacctcctcggtccaaaaccgataggattcggccaacatctagaccaccgactcccaacctcaatctaacctacaagaagaacaaaaacctgatccaaacgccctcatcaaatcccagtacgataacgatcccctactgaaatcatatattccatccgccccctcggaacgcatcatgcgcgctctcctcgcggaacctccactctcgtataatgcatcacgcgcgggtccgcccttaacgggaaaggcgccccgaaagttctgctgtatatgcgggtattgggggaagattcggtgtcgaaattgtcaccagcgaacttgtgggatcgagtgttataagacgcacgaggattcaaggtgcggagctttcttctaaggagctctggacttgttcatctttgtgcacagtcttgttcctggacggttgaagtctgagcgcaagaagcagcgttgggctaagaagtgggcagtcattacaagaatctgaaaaaaaaaaaaaaaacccaataaatggatagtggatgaggactagagctggaatctacttcttgtcaaataatgaatatacccgttacttactagtttgactaacaactaagtaatttgtatatcacatttatatcgggatgaatctaaccatcccccgtcccggcaccagccctagcagaaattaacatttcatctttattccggctcttaattcttcctcccgaatctcaaacatcacttgcacacctacaaatagcgcacagcatgccgaaatgagatacacaagtccggcgtagtccccaatagctcggacaaaagccccttgattccatccaagcccagcgcaaacccaactagattggcgatcatcatcataagcacattgcctaccgctccaatgccacagatgacgcggtacgtgttcgggcgcgaacgccatcggctaggagggaatagtaaggtgcccacgacctctggcaggacaaagagggtgatgagccagccccacatcaggagtctgaggttgatgtcgtgccagagggcaatgaaggtgaatacgacgaggaagttgaatatctggcggactttggcgtaaaggggagatgacggtggtttggtgccgcttgttgatgatgctgggctcgagatagagcggttgctgccgccgcccagaggaacgtagagatagcggacgacccaacgattgagagagcggtgccagccgcgccagaaggcgaaggcggagtagttgtttgacacacagcggaccatgttttctggcgggtcgatgccgtcgacgagagcccagaggcggaagaaacgccaggggatcagaagcttcagccaaatgatgtgcaggttgaagaaagcgagcatgctgagctgggctggggtgtaaagcgaccagtttggatgtgagttggagattgctacggcgtagatgaagtgaaggatcagttccatggagagcagggttaggaaaaagcgagttccgtagaggattgtgcgggttttcgtcaacgattgtggtggaaatcgctgctgggatatgtaatcgttgaacgtgacaattgggcctgtgaggtataacggagagtagaggatgtaggcgagatagtttcggccgttgaaggctgctttttcggcggggatcttgacccggtcacgctctgaaagcgattccggatcgagttgcttcttcttatggtcgtcagagggagttggtttatcctcggaaaagagacttacttcgattgggctgctagtaggaaagtcgaaactccagtagtaatccatattgaaactgatcagccgtaggatagtgatcttgaacaggacttcccatcgtggcattagaccaccaaagctgtccaagtgccgcgcccatagaagtagagcggactcccgccctgtctcgtctgctgcccagaagctgagaactcgcgccagcgggtatccgccgcagaactcattggcaaacagtatccctatgccgaagctccaagtcgcagcagggatatatttccgcggaagagatttggcgattttgtagttcaagtagagaatgataagaatcttgatcgccgatataccatggagagctgtgatgaacaccagggcaaagtaatagtcgaatcgtatgcgtcgcgcagctcgggcgtctccggcggcagtgacagagatggtattgttcgcattaggtgtactaggggtgcgagtaaagtgctcgtagacgcgtcgaagagaaggatgggcaaccaaaaggatgaggaggtaggggatattatcgcggaagccagaatattgcgcgtcggaattgtcctgagaataagcaagtgtccgttagccattgtcaactggcagcgaggaggcaaaactcacgactctccgccctggaatccaacctggagagagcaaatgagagtatgtagcgtaggtgggatgcgattctgaggcaggtggtatcagctccgtttttgacccagctccacgcggacgcaccttgcgaaacatcaatcacggtcttgaacatcagaggaacggccacgataaagaccacgtagtaaacatagaattcgagggtggcccatctgggaggagaggcgctgttggtgacggcgttagagcgggcatccttcgcggagccagatcgcgtgtcttcagcagcgatcttgacggggacattggcggggacagtgaagcgcgtgtccaaagtatcgagcgagtacagccgccgcagccaggaaagaaatgagagactcattttactaccagcatatctctatggacagccaggtaagagctggtggacaaattgcggagagactgagatgagatcgaaactgaggatcaggggccgacggaatccgaggccactcagcttccatcataaccattggcacatgagattcatgagattgcattcggttattccaacaaaggtaagtctgaacagtgtcccttcgtcgagaatctgtactttttaactagctaaatgaggggtgcttttgggaccttctccgctgtccacaacggcctcgcccacttgggatacagccgtatggcacctagtggaaacttggaattgcacttgaatcttgcgttaatgcagactaacgtcagccagctatctccaagcctatgatttatgaagagggttcactgtatttctcaatactggcctaagctaacaccactattgatacggttgtctgtctgccttccgttggctcgctttctgtcgtatcgaaaataaaggcagagaatccgtccctaagtctgcagctggtcgtttactgagcctatcaaaaatctgtcttttagctggagaatatttttttattttttttttttttttattttatttttatttttttttttgggctccatgagtttgactctcgtccgctctgtgatggtctatgaacacatgaattgcctctgcccggactatgtctttatgcctcaagacacatcgcgaccagcatgaggttcactagcatcagagcgccaaatgctagggaatcaatatttcttaccatcaatagtagggacgagaggacgaagtctcatcataattcctcgagaagcggtcaataccttttacagctgatacagttctctcttagactgaacatcttactgacttcggttgcttcggttgcttctcttgctgcctccagcatctcaaaaaaggcagtcaaatttccaggaaggttggagcgagctccgttgagccgtgagttcattgggcttgtcttgtattctattccaagacagagtgg

SEQ ID NO: 4741 - DNA, 4931 bp, Emericella nidulans
gcgtcggatgttatctgagtcctctaccatggcggatacgtcgtcctatacgtaggtaaggctcgtcagccagagttggaccacaaagggcagtagactggattcagaaggactcactgggtgcaggtaagagaagatatagtagaatgaatcgtattcctcgtactcgtacccggcgcgctctatcgcttcacgtacaactaagtccttggtgatctcggtccagaggcgatctcggcggtttttgacgccaatgtatcgcggacctactttgcctcttgggatatcgcccttgtgtctgggctctctaatatcgtcaacgggtactttggcaggacggtctctgtatcggggatgtcgtagttcctcgcggacgtccacaaatggtgattctatttcaggactgtatttcgatttggaggatggtgttcggacaatggcccagtcttctgtgctgtcactttgaggcgagctgcgcatatgttgtggttcttgccggtattcttctccgatgaactcgcgctccttgtacgcaaccctgggggtaactcgctcgtcttctatgaggatttccctgtgtcctgcagcttctggctcctcaattatggctctctgttttcctttcttccttcgagcgtgaggttcagacgacagttgaagtgattccctactccgtcttgcgacctcaatctcttcggctgctttctcttgcttccgcctattatagttagtttgtaagagaggaaaatggatggtacgctacatacctttgacgaatctcacgctcgttgagaaccgtttctacactcggcactcggggtggactaggcggactgggagggctaggcgggctaggaggtcgaggtatctgatgcgctggtgctgccgaagacccaccagctgcagtaaagccccagtgggaaccttaccatggccgagaggtttaatcctcctgggcgattctttgtagactggcggaacgggaattggcaagggtactctcggaagttcttcttcagacgatccagcagattcgggcgacgacaaagacgacgtgctcgctcggcggcgcgcagaatacttctgctcgagatgagttctccgtaccactccctgtcggccgggtgtaggagcgatatccacactctcgtcgctttcagtggtctcatcctctacgaggtcaatatgataatgtgatcggtggcgtgggcgcagaacactatcatggggtggaccctttctatctctcgcatattcctcaggcgcgcggctgcccttagggtacatgtcctcatcgtagctcgattgccgcgttcgcttttcctctttcaggtttttactgcgctgtagagcctccttgcgtgcgtcgagctcatgtcgagatattgatcgttttgcttcgatatactcatccatttcatctgattcactttccgtaatgccatggtgtgaatcatcatgagaatagtacacttcatcgacatccgagatctttgaacgccgtctgccgcgagatccaggttgaagctgaggctgagacttgtgagagatatgtctctcttctcgatactttctggctccttcggcgcgatatgcatccaggtctaaccgcgcgcgccgttcggctgccaatacgtcgtctcgaaggtactccaagtcttcgtgcgggtaccccgcctttgagcggcctctgcggtgtcgacggtctgggagcacctcagcgaccggtgctagaggtggtcctggcgcacggggcattcgatgcccatgcccatggccgtagcgtacatctcggtcgatcaggacctcacccttcattcgactgggatacacttcctccatgtcttcgatgacatcgtcgtattcaactagacggcttcgacgcggcatatcggggtttaggggacgttgagacaatgtgtctaaggcgaattgtagctaacatgcgggggatgcttcgtcggcgcctcaagacgcacggttctgaggctgtggggcggttctttgatggcttatcacgatctcggatggtaccccacggtaagaaagaaacgattcgcggaatgattatgatcactgtaccattaagcgtgttggtaggcagaagaacaggagaccgtggtcattgtactgcagtggagagaaggtatcgtgacaactaagcaggtggatatactggtgcgctggtgagctgttctgctgaatcgaccccgcggctgtgccagctgatgtcacaccgcagcagactgtctcctgagtttccattcgtacctacagggtacaaactcagtacgcggcgtctgaatatgcgcagtcatgcaggcttgtgaccaatcatgctccaggatatagcaaaattcttggggagaatttgtggttgcaggattgctgcgaaccagatttccagcgtttgctttgcccggattcgcgcaggatcacccactaattagtgacaagaaacatatttcttccacctcccctcacgacattttcacacgatcttccagttcactaacactcttttgatgtcctcgcccttctctacagtgtagctgaagatcaagtggccatactccgatccaagttttgaaagaatccggctgttgagacatagacaggcgccttcaatttgccggctagtttagccactcgtctaaagggcgtcctgcattggtacaatgacagagatgtgaacgcctgaagtagcggaggccagtgaaggagcaatagcgctgcaaggatatacaggattatgatactcgctaaggcgcatctggtcttgtaagcagtgcttgcgcttgtacatccaggaacgatatctcttggtctagtacaagagcttcccaccgcttcatccttgtcctcagttggcgatagcgttagggtggcctgttgtcaatgaagtcgagaataagacggtatgatggcatcgcggcccctatgatggtagtagatggtctgcaacgtatacaacgctgtggaatctaggatggtctcgcttcggacgagttgggtgtcaatgtgaacttcggcgcaaccgacctccgtgtttagagataaaaaaggcctgattgattacacttctgtgagactgctgaatggccttgccatcgccagaggtcagattgtcgtatcgtagactgagtagcttgatagtgccagccacgtgctttagggtcaaaacacgtccgttgaccctagacttattgcattcagtcggttatcatacaaacgtggaagtactctgaggagacccatatcataaatatagacatatatgattgtcattattaatatagtgtcgagagcgtcttggttgaagcgcagttgcacatgcaacgtttcactcccgttcctcgagaatagtactcgaggacaaatcttacatgatgacggatgttgctgggcgcgcgcgtatctagtttgatgctgaactggccagaacagcccactcacgcatcgtccggagcattgtatctgagagtggttccatgaagtgggattgtcccaagttggaagcacgagcactggtagattattttcagcatgtggtaaaccagcccatttcagcttggactaagagacggatggctcgagcttaaggcgaattgcccttctaatccgtctagggtttgtttcttgaggcataaggagctgaggacggctgaggcgggcttgacgatatcgccagtcagagagctcacttgcagttggccaatacactgatcgccactctgagtagtaaaggcatttcactcgacgacttctgcctacaacattagaaggtcagcagacggtcagagaataaatgactacgcttacaggtaaggaatcccttttttgttcgtttcgttcgcagcctgtcatgggcaatgaagttcatcggattggatcgtgtcagtactcttgagatcgattcatgcacacaagaatagagtcaggacttgggaagacgcattgttatctttgatatcatgtagtgcggggtaaatgcttggggtcttggtagcttttgctcattatgttcattctaggtactgggagagaatgggtttgctcacggggtgttactgctcaaagcagcagcaaacagccaaattgaatcattgaagctctccctggacccttcacttcacctcatatgcttaatcctatatacaactagtcttctcatattatcttcagccttgcacagttcttgacaatagcctcatcagcagctacggttacctcattccgaaagtgtttgcccaccagcgggtagtgctatccaatatctgcgacggctcgaggttgtcagcacgttctccagtcagcaaattctttcggtcaataacatcatgctcccaattcctgtactcccgctcgtcatccgcagatcgaggtgtttgatcctttccgatgagttttaccgttgggtcgatcttgaggcatgtctggagagtgatagcaggttggtcgagactgttccaagtcggagcgtagtaaattgttcatcataatctctgcttcaacctcaataatcagggcagaggatgaaactgacgcctcgctctagatggcttcgtgatagctggtactggttggcatacctggaccatctggagaccaaatttacgcctcgcgataggcatctctgcgcaccattgaattcccaatcctctgagactgagagtggctttgctgcgctttattgcaaactctagtcaaggtatcccagcagcttgccttccggggcgagcattttttctgagtttgggcggcattcgacgagcttaaggttgaatcgaccgctttctagtccttgtatggtgcaaaagtcaatcactgaaacaccagcttacaccagctttgttttggcttccttcaatgcatgggtgaccagcaatgaggatgggtagccctgtaagtctagtgtcaataatggcaac

SEQ ID NO: 4742 - DNA, 4869 bp, Emericella nidulans
cggtagttacatcgccccgtgcgcagagttgaagtgttcccatcagaaggctgaagcatatatgggtcaagaatagatcgaggacgtagctcaatcgccagatgtggcgcaggaacatgtcactattgggaccgacgttcgcgtcgtatagatcgtaccaattgagacaaaatgatgctgccgccaagttggaactctctgcatcggctatcttggaccggacgaacgcaaggcctaggtcatgaagggcaaggctctcgacgagtgttccgctagggcgccgatagacagagagaagcccaggcttttctaggtcatctgaaactgctgcaaacctgacctcaagcagggtctgttgctttgccggatggtggagggagaagagccaggaaaccaggcttttgctagtgtccgttcgtactggggcgaggctgatatcgcccccgcgcctgtagcttggtgagcagggcctgggtacttcccgttcctttgttgacgtgcagagaatgactgattctagcgagaaaacaaatggacctgggccggatctgacaccacgtataggttgggttgatggcacggcagcttgctaagtataccggtattatgtgctttgagggaatttgtaaagtatatcgatatatatgcatgagaatactcgaggcgtgccctgtatagagattcccatggaccaaatgggcttgccatgacaatggcccatactattcaagaagtcaaattgcacctctggatacgtatatcgcgaggtaaactatcaaacgtcgggtattctcgaacgagcatgtatcactttagtggctggggttccaatttaatggccgagccgttgcgccaatgacttaaataatatgttgccgccgatgaggcaggaatgtgttgtgcgccctgcatatttagctaaagctactcacagacattgaccgatgaacagtcgcactggcggaccttccactgcagttgagcaattgactagagcttcgccactcaaactaattttaagcagctttaagccggtgcacccttttcgtcttcaaagagcatgcggccacacgctggcatccttccattaacagaggtcatctggtcacggattaaacagcggatgaatcattttctggcttttgtcactgcctcaggtttctggtgctcattaggtgtttgactgcccgccggctgacgttgctcgtttggttcttcctcatttgggtccttgggacgttccaacccccgatcacgaacgaaaacgcacaacagaaaacaggcacctattaatggaacttgcagtatgaataccgcccgggacgcggccgcgtaggcatcgataatggtactccattctgcgtcggagatagtctctctggatggaagtgagtatgttgaatgcgcaaggcttttgtatgcctccggaaggtgcgatcgaagcacagcttggaggacagcagcagagacagcgagtccgcaggccccgccaagacagcggaagaagtttcggtcagatatgactaccgcacgctgtgattttgtacagtgcgcctggcatgctatcatagtaggctggaatgtgcttccaatcccgattccagcaatgccaacagttacggcaatgacagccgggctggttgatctgtcgaacctaatcatgaggccaccaccgttagcaggcttagcaggggcagaaggtatgggtgacggatcagacttacagtgtccatagcccgaacccaagccaaatcagctcgccgtatcgcttgcgacgcgaaatgtactgaccggtggtgatggaggtgagcgaatggcacaccatcaaggggcatgtcagagccgcagagacaatcggactccactcgcgagcgttttgataatacagaggcaggtaatagaggtacgcttggtggacagctcccagaaggaaggtctggaggaacaaggcgcagatgaccttatttctgaaaagaaccactgcagccgtcagctcagcctacggcggacgggaagagcccttacctggaagcattggaagggcagccactttccattcaaccaggaaaaacgcgataagcgaacagctaccgacagtaagcatgcttattaccatcgctgattcccagttaaaataagaacctccgccagagatcgggatgaggatcagtataaccgcgacagacgacgtgaggatcccgagaaaatcaatgcgcttgacattattggagaagctgtcatttttatggctgttgggaatcagaaagtaaccaaccagggcggatactgctgctaatggagcaatgagccagaaaaagcccctccaggttgatctcattataaaggcagcaccgacaaacggcccgatgatatttcccaggcccattgctgcaccaaggatgccctggtattttccacgttgttgcaaggtcacgatatcagagacgataatcatagtcaaagaagtcactcctccaccagccactccagccaggccacgaaagacatagaacatctcggggtttaccgaaactccgcaaagaatatcggatatgcagagtagcacgagcgtcgacagatatatgaccttgcggccaaagatatcggagaggcggccgtacagcaccgtgaacatggtattggcaatcaatgatgaagtgccggcccaagatatagtattccgagcatcaaggtcttccgcgatggtaggcagagtgacgctgatgccattctgatccacaaacgtgataagtaatgagatggccagccccgtgaagacaacgaagagctgcccacggggcaggatattggtctggtcatgaagtgccttttcggctgcgcgctgccgctccatatttgggttcgcaaatggctaggtcttgtgttggcaacattgaaaataccgccctgatatgaagtggctttcgtctatcggatagttccgatgcggagatggcggttcgcagccgaattggcgagccgtacaaactgctgcacgtcgagactgaactggaacagaaacgggcggaacgaagataaaaagattggtaggcggcatcggagggacaagcggcgcatccatgatatgcgtgtggaaatactcttagcctgtgacgttgtccccacctctctgggaattggaaggatgctgggacaggcgccacgccaatagtcgccgtttcgccatcttcgatattgcagcggctgctgaatcttaagagtactcttgagccaagcagtgattgatcaattctcaaagactgcggatcaagagtcaatttcgtgacgttggagagaatgagaggggaagaaacaccgagcggaagtgaaccgagagaaccgaaaatgaacttttctgcctggggcatcaaggcagtacaaagtaagttagctagcatcacgtgaatctatactgccatatcagtcaggcatccaagcgaagataacgaaatactactgagctcggttattcgcggctctccccgcattcctttgtctggggaaacaaaagggacctcgacaccttcctttcccacaacatcatcctcctttctcctaccctcgccatggtacccattccacgagcttgtcgtcttgtcggcctctatggccgtcgaagctactcgacggccccgagcccgtcaacccgcctgaacctcccaatagactacaaatcgacgcctctccttcaccacaccccatcctccctcgcgaactccctgaacctcccaccctccagtacgtccaagtcaatgaacctctatacagcaatcaacgccgcactccgcaccgccctttccaaatcggacaaggtcatgctcttcggcgaggatgtcgctttcggcggcgtgttccggtgctcgatggatctgcagacggaatttggatcagagagagtcttcaacacaccactgacagaacaagggattattggttttgcgatcggggccgcggcagaggggatgaaacccgttgcggagatccagttcgcagactacgtctttcctgcgttcgatcagattgtcaatgaggcggcgaagtttcggtatcgggaaggagcgacgggggggaatgctggtgggctagtaattagaatgccttgtggtgctgtaggacacggagctttgtgagtttcaatgtaacgggcgaggatacgagaggctaatgaccctgcaggtaccactcgcaatcgcccgaggcgctctttgctcacattcccggtctccaagttgttatcccccgttcaccgtcacaagccaagggtcttctccttgcgtcaatcttcgaaagcaaaaacccagttgtgtttatggagccgaagtgctctatcgggcggcagtggaacacgtccctagtgaatactacacgatccctcttaacaaggcggaggtgatcaaacccggcaatgatgttactatcatttcgtatggacaaccattatatctctgctcggcagccatagcggccgccgagaagaatctaggcgcaagcgtcgagcttattgacttacggaccatttacccttgggaccgacagactgtgctggacagcgtcaacaagacgggacgggctattgtcgtgcatgagagtatggtgaactttggtgtcggtgccgaagtcgctgctactatccaaactggcgcgttcttgagactggaagctccagttcaacgagtggcaggatggagcacgcataccgggttgacatacgagaagctgattcttcctgatgttacaagtgagtataattcccctataaggatccagcggctaaccatgcgtagggatctatgacgcgattaagcgaacacttgagtattgaatgatttttatctggttgtttgtggatagagatcaataccaaggata

SEQ ID NO: 4743 - DNA, 3281 bp, Emericella nidulans
ccaccaatggctatgcgacggttagtacgttcaacggcagtatgcgacaaagcatctcaccaatcatagtaatatggcgagccttcaacgccctatggagttcattttcctgaggcacctccaggacgcccttctcagcgacggacgcatcataaacaggattttggggcgcggcagtgatgccgtcgtctttctcgacacccatgacgcctctgggacccgacgagctcgcgatagcgggaaataggccagatgaggatatgagacgggaagagaacgaggaaggagggagcgggacggccgaatataagaagaccgccgacctccgtgaataacccgccgaggctgacctgctccgcaatcgacaagcctgcacgtacgtattttctgtgtgcttccagtccagtagctcggctgataagagtaaattctccgcagcgtgtcccagaacttccgtggctcaggtcgcatcgcgtggcggccactagccctgcccagtcgggcccagtgcttggggcggatagcttggcgcagccatcagtggtccctcgtgataagctgccacggacaccccgagtgccaataaatcatacgagagataagccggtgcttgagggtcttgacccttgtctatttgaattaagagatctggttcaagactcaagatgcaaacggggtccagctacttcggtcgtaccttcctcagatcgtcccctatcgtccccaatcatgcctaggtcatcctatgatcgttgatcagtcatttgtatgacaaccagatactacttagcggagaatggagatttaagcatatcatcttacgttacatatttccccaacatcgatgactgtggacctcgggcttggggatgctaccttgcccagtcccacttagggccttggcagcgataactttcctcagcgttttaacgacttgagcctggcctgcagctgggcaatcatcgtataagcctcagagttgagagcttaccggcgcctttctccctggagcgattcagtctcttttatctgagtgtgccttgctccttccgttcgaggctggagtgcgccgtgctcgtgcgacactgatattgctcgtttgtgtggtcttggcgccaagcacagaaaatggcgatcggtgccatttcgcttactgtgtaatctgtactccaggtggcagtcgcgataacggtggggtttggggattccgtccatggacgttctcgaaactggagcggctcctgaccaaccacgtgcaacctgttaggtaagaaatcttatctccaactcttgctttaaccgtcaactcctctcgtgtccatgtactcgagtacgtacgctctcatcctttagggcacagggcacaaggcagaccttcccagcatcgaatataggagtcactgtgtgcctttatcaggtcggcctcttgatggctacttgcttgatgtccgtctcgtattgagactcgagcccgctgcaaggctgattcaacacgaggagacggagtgcactggccaaccgggccagcgtgagacaacgcctggctgacgtactgtccacctcagtgagatcgtactatttactcagttctgacttcacagccggtcacccttgcttgcgacgatttcaattgacgtttgaataatcattgccggtttctgcacgatatcggcacgatatcggtatccaccacccgtcgcagcctttctcggaggctggcgtgtccacccctgactgagcgaccgattgagggtttggtacgatttgctgcaggtttcgagatactcgagtgaccctcgttttcgacaatccgtgcagtaatggccattgcagagacgatcttgagatatgcctaaaagggtatggataagtgcagtcgcgcaggcgctcggtgctgaggctcattgaatggtactgggtgttggcgacatgttgtctattcgttacatcctttccatgagccggtgatcgactattgtgagggaatcctggtccgagggagactagcaagacggctcggttgtattggcggagaataaaacttgcaatgatgagattccgggggcctccagctcagatggtgtgcaaacaaccgggtttcttctacatgtcaacgctagcttaggcgttggctgttggacattgtatctcttgcttattagacaattcttctcgcagggccacgcgctcagggagctcgctagaaaagtccgctactgactccagtggtgccataaacaactgaccatctaccgcggtttgcaccagttggtaggaagcgaggttcgtcgtatgatcgtggtaggtcgtatcggccgggttgggccacggcgcatacttgtctctgagaactgagacttgcctgagcgcatcttccacggtactatttatatatagatgtctatattgcctattcacgtggatacgcgacggaacgctttatcctttaagtaaagttatcgcgcctgcctgtcttcggtcttggtgtgcaccagagaaagtataggctacccacctacctgtggtcagccagagcacatttttcctcctcagaccctccgtggcccatcacttcgcctgcaatagctgatgctggcactactatgaccgctccataagacaaggccccagccttagtattggaccccgttgaacacagcactgcacctagcggacgtcaagatcccgccgatcgatgaacgccagcgcaacgccggctcagcattcaaagattgccttggggctactaacaccagcaagccctcgttcggacaagcagaacactcctggccctggacctagtcacggaattcggggtaatgtatcccagcgtcctctggctgtaagataaacctacgataatcactgatttacttgagaataaacattacggtctgatttatgtgctcctttatatgcctgaagtacaggccatcccttagccgaaccaggacactctgggcaggacaccctttatcccgcagtgtcagcttgcctcttaatgtccctgccagactgtccgtcatgtatccagcccaatatgcaccgcgaccatatatacgcacccgctgctccagcttgctctatgcctctggctttcgtctctcctctcaatcctaccgtgtttatcttgggcgaaggcggcataggtacgcagtgcccggacaggcgggtttgcttgagctgatcagccatgctgcagacgcgtcccggttgacatgaacagcgttctcgatgccgttcaatggatgagagcgtagagcatggactatgcttgcttg

SEQ ID NO: 4744 - DNA, 3521 bp, Emericella nidulans
  unsure (1)..(3521): unsure at all n locations
accccggccccccgcacgtaccgggtatctgaatgagagtaccgtctcgggggctgcttgggttgttcatggttcctcaggaagggaggtgcggatggataatagatgtgggcatagagatcgatctcaagttgcactgcagtacgaggtgggatttgagatttgcagttcttgtgtgttactctggttcctcacagacaagaggagtacagagctagcatgggctgtgctaaggtagaggggtgagattacgaaacgagagaggaaggagcctcaggccggctaggtaaataatacataagtggtggtggaatagacgagcaggtagtactacttgcacgtaagtattttggaagatggcgtatgctatgatcattgtcctgttggtccttgttccgacctggactgtggatgacatgaacgaagagattacgaggaacagttcttacgcctcatggagaggcttgactgaagttactaggttatgctccgtagaaaaaaaaattatactataagcacagttgcagatagacagtcgagcacggtggacaaggtcttcccttgcccattctatactcatcatagacccggagactccggaggaagtcattacatgtccagctaatcaaacaacaaaaacgcggtaccactggtaaatggaaggaggaagtgataactggcatgataaatgactctagagctgaaagctgaaacaaaaataacaccaaggcctagaccagccaagaggttgagttcttaagacagagatgaggcttcaagtctcaggcaatggccatgaaccacggcgggggatctcccccttccccattgtgggatgagggttgcgctccggtgaggggattgggtagattcggaccaggaagaagaagacaaactgctaaattagagtttcagtctgtcgtcgaggatggaaccagattggttggtgtgttgcgggcagcggagggggggcgcagtccaggatttgagcgagggtcatttggtctgatctggtttgatttccgagccgttgcctagcctgggtggttgagcaggagctactactttcggatgcgatgttgcgatggtttggtgcatattcagccgcagacccaaaacactttcacccatctgtacgagagccgggagcatgatagggctgtggggcatgatagggctgtgctggggcgcctagatgacgagtgccggttttggagagaggttggagatgggcggatttacttggggtcgtatttgtctttccaaatcctagagagtcaggatcgtgttagtctaagtccagcctccgaatgattgtcttgagactggccaacaaggctttgtgagtacagtgtctgcccncctcgatgtgctttcccttctcgggatccagacgtccatcagcgccgaggccatgctcaagaagataccttgtgattgacgcaaacaggtggtgagctcttgtggtgttgataacagtaagaagcggtgaggacttacagctcccaagcgctgttacccagctgagtaccagcctggccgatatggatatggcaaacctaattagtagttagagaaaccaatgcttagagctttaacgaaataaaggcgcgatcggtcgcgatagacagaagttggacaacgcctattcgcgaggccgatattcaggggaggggctttcaacgcgtggtgcgggggaaacaaaggtaaataaagcaacagatgggacgttcgtacctcgcctcgcattgtggataacggatcagatagcgctgataagtctaaaaggacaagagacgccctgaaagtcttcaattagacaacagatgacggttggaagaaaaagcgttaatggggagatgggaaggaggagaaagcgcccggatcatctaagaaggcgttcgtcactagcctcaaagagcagtgactgcaccgccaatcatcacactactgtggctgttcttaacatcgacatgcataacacatttcaaagcatcttctctctatctaggaggttatattctcttggttcttctaactcgttttccatctgaacttatacttcaccacgtgcgatcaactgtggaatgtgggactctatccgaggtacggtactggtagcgctatgctaaaaggatcctccttaagccttaaaacaatcaatactcaaagataggcaaagtatcaggaattagtagtgaattctaaagagaaacttttactatcttcaattcgctagggctggggcatcgtcaagtaccctcgctcatgtgcaagtgttggtcgacagcattgtgaatccaaaaaaagttttacaccccattgttgatcagcttaccatgtatatttctgcaacaattgtagactaaggtatgtgcctcacgaagcaaaggtaacgagcttattttaacatagtatgaagaacagctcgaaagctcgaagcgtctaaactaacaacttaatcagggcgatgaaattatacagcgctaactgtaatgagtatttataatccaaggcatcaacgctcgccaatcgaagtcgctccgtatacaccttcccattcgcctctagtttccttgatttagtcatagagcaaaaggaatttaatcgtcagtcggaggttttccattctatcctatgtacagctcaggacaggttgcacataccgtacgacgtgattaacactgagatggccaaacggtcgagaagagccgggagtgcctggtgtggcgtttcttggcgtgccgccaccagctccgtttctctaaggctgccgcgtacgatcgtttgagatagactattcgattgggcttgagatgcacagattacgtcggtggtcagagctgccaacggaactcgatgaccggtgcagagaattgtcgtccgggccgagtcagcagaagactggaagaaccagaagctgggatggctagactcccgtttctacggaatatcgttacccatagagggccacgaaaaacttatcatatgttccagaatgaaatccaggctcgtctccaccagattgaactgggccaatgcttcacctcctaatggcgatcgagtcccctcacctgcatctcgacctctggtggattgctcggcgcgtcatcatcttgttctctcgtctcgataccgcatagacatcttgactattatcacgctgcggacgattgctcttgtcgattctcactgactaattgatcaatcaggttgcatagaatagttgaaaattgccccagcagaggacggcaggaccctaccctgcacgagtaagtatagggagccagtctcgggagcttccccaccctcatctccgcttgtctcgcctctgctttgcgctgtcaatctttttcttttctcctgcttgtctccagactctcctttcatcctcggtatatctttatactctttcttcctcattgtcctcttgatctattgtttatcttcttcttatcccattattgcggttcctccttagcctggtacgctttgcatatctcaacaccggttagtgtcag

SEQ ID NO: 4745 - DNA, 7829 bp, Emericella nidulans
acgctctggttcgttctctgtacggcgctcctggagctgctgtagcaacaatgcgacgctttcttctttcattgtcatagtaaaaggtctcctcatactattattgagattggtcagcgattcctaatgttaagggacgtatttagatggatcttcctatctagacgtgccgtacgtacaagaaggaatcgctaaagaagaaatgagaaagaaggattgttgttgcaaggaagtcttgtaggtggctcaccgccttcaggacagcgcaggccttggccgagtcactaaggtctaaggtccttgtataggcaaaggacccataacaaaagtgaacatcaagaataaagctttcctggttcaaatatgccaaggactgcaatttcagctgcccagaaaatatatatatatattgactccagctccaccttcattaccaatagaagacaagtggctacaggccgaaaatattggaaatattggaaaaatcgaaaggattggaaatattgaaaggattgagaatattgaaaatatttattcattagtcatttatcatatcgagcctatttttttaccacttattgtcaaacaccttcccgtctacatagttgattaattcgctgactggcttcaagtgatcgcggccagcgccaaaaagcatgccctgccgcattaccttgcggtagttcttgcccggagacactttgcccaggacgtattcttgacgcgtctctacacgcgtcggcactggaatagaacggccaacgatagcctccatgccctgccaggcgaaggtgatggcctccttggcgccagcagggataccggcctcgtcgagcatcatgatcttagcgttggggtagtgctgctggatgtacttggtgatgttggggttgtaggcgcctcctccgcacatgaagatctcctcgatctctaggccttcaggggcgtagcggcggtagtggtcgacgattgcctgtgcggtgactcgggtgattgtcgcgacgacatcgtcaggggtcaggcccttgctttcagccttgcggatcaggtccaaggccaaggtatcccggaagacctcgcggccggtagtcttgggcgggtcgagcttgaagtaggggtggttctggatgaactcgtcgacgagctcctggtcgacggtgccgcgagcgcccatctcgccgtccttgtcgtactcgcgctcgccgttggtgtagtggcggaccacggcatcgatgaacacgttgccgggaccggtgtcaaagtcgtagcaggcatcgacgccgccgtgcgagtcaggagggatgaagcagacgttggcaatgccgccgatgttctggcacgcccgaagcttggtcgggtggtgcagaaccagcgcatcaaagaaagcgatgagcggtgcaccttgacgaccggcggcctggtcgctgactcggaagtctgtcacggaagtgataccagtgcgcgaggcgaggaacgagccttcggccatagtcaaggcgcttcgcacttcattcgcctcgggcatcgacagaagccagatggtctgtccatgagacccaatgacatcgatggaggagatatccaccttgtagtctgcacagaactgcttgaccgcggcggcgaatgtctctcctaggatgacattgacctcagatagctctgagggcgaagtcttgttgtgcaggatgatgttcatcacccgcttcttgatcgtctgctcaagcgggatttctccatactgcgcgcgtgagtgtcctttcacgtagagtatactagcattgtacataccttgagcagctcaaagtgcatgggagactctggagtctcctgccggaagcgacacagagcacagtcgatgccatcctgtccaagttagggttgccgcgcatcttttaaagagcagaacaaactcaccatcgaggtgccgctgttcaagcccagcaccgtgatgtcgagagcatggtttttgggagtttcgttggccattgcgaatgcgatgggagtctgcggtcgtatgatgtgccgagcataatcggacagctggaacggctcaatcatatatcggaggcagactcgggcgccttatcggcaacacgcttgaatcgaggagccggcgctgggcccagaacgccggaacaggagccgatcagctctgttggatgtgtaaatgggtaaacgcctaaatggctaaattcttccaaggattactgggtgggcagggggagtgctccaccaatgcggaacagaatcctcagtttctgcaccacacttctggagttcgggcgtttctgtggaggcggagcacttatgggctagtaattgcctcatgaacgcttccccgggttttatagagtgcaacaaccccgggctttggcctgtcttttttcccaaatcttcttctttggtggtcaaccatcatggcatacaccacgctctggaggcgcttgtcgcctcgccagctcaatgtcgccgtccaggtcttctcgctcatctgcatcttcttcgagggttacgaccaaggtgttatgggcggcgttaacgccgcgccgtactatgtcaccgaagtcggaatcggcaagccggatggcactgtgactgacactacccatcaaggaggcattgtcagtatctactaccttggctgtatctttggctgtttcgctggaggctggctggctgatcgcattgggcgtatcaatggactgtttatcggtgccgtcttcgcggtcattggaggtgctctccaggcagcgattcaaagctcagatttcatgctcgtcgccagagtcgtgacgggcgttggcactggaggtacgtatctcatctctccctacgcactgctagttatgggcctgtgctgatcgaacagcgctgactggcattacgccggttctggtatcagaaacctcgtctgccgaccaccgtggcggattcttgggctatgttttcattgccaactgtatgttcctcgcctgaatttccccttgttctcgacgcaccgcatactgatcctgcagacctgggaatctcggttgcgtactggctatcgttcggcttggccttcatcaataacggatactctgatatcaggtggcggttcctgcttgccttccagtgcgttccagcgatcttgctggtcttcttcatcaagatgctccctgattctccgcgatactatgcctctgttggtcgtaatgaggaggcccgtgatatgttgacaaggctgcgaagccacaaagcaagtcaggccgagatcgagcaggagtacatggagattgtagccgtggcccaagacagcaagcccagttcgccgatccagtttatcaagatcttgataggcaagagcgggcggccgggaagcaatctcagccgacgggcctggttgtgtgtgtggcttcagattatggcttcgtggaccggtatcacggtatgagaatcctacccggtcgtatcgttctagctaaaccgcgtcaggctgtcacggcatactcgcccactctcctcagtcaagctggatacagcagcctgacccaaaacggcctcgcaggaggtctcaacacgattggtattgttggaaccatcatcagcgcgcagatcgtggaccgaatcggtcgaagaatgtgcttgatgctcggtgctctgagtctcttcatcgttgaagttatcgtaagtttgccccttttatcagaatagacccttactgatccgctaaggccggctctgtctatgaagcctcccttcacaacccagaaaaagcggctgactacgcgcccgctgcagtcgcaatgctcttcctgttcaaccttgcctatgcctcgacttggggcaccgtggcattcctcgttccaaccgagatattcccgtctgacctccgtgcccagggcaacgggttcggcattaccgggtgggccattggcgtcgggatgaccaccttggtgaacccgatcatgtttgccagcctgaaaagccgaagctacttccttttggccgggttcaatctcctgtggattccgatcgtgtatctgttctaccctgagacccgtaaccggtcgctcgagtccattgacgctttgttctcgacgccaagtccgttctattgggaaatggagcgcgcgtatcgtttgcacagcgatgttcttgccgagagaggcgctaccacgtttaaggacgacggtcccaaggtggaggatgcccagtccggctcgacacaagagtaggtggagccgagggtatggtattgtacggatttcgatataattggttattctgggaggcatagtgtatttactactgggatttagttatgagggaacgcggggttagttaggacacacactatgctggcaaatcccgggagctaatatctagcggagctgtagctaattttcctttttttttttttctcttttgccacttgtgctagtgcctaacacgctatgccatcggtctggtagcccgtaaattgtcccacatccacactatccacactatactaaggggcgctatagccgccgacacagccccaagacggtagccaacactgtaagaatgcgatatgaatccctcgagccggagtcagatgatattagcctgtatcataaacaatcggcgtcgcgcatccgtagtttgacgttccgatattttcgaacaccttcataagagtgtaccccatatcagtcagggcaactactaccatagggttgaccgttgagcggatgtacgccacagtttggggcgttatcctgcactagcaccagcagctccctcgccatgagcatctgattaatgagaaattgtaacgggcgtaggcagtattatttttaactggctgtcctgtataaacgagtatcacaagcttagagaaacacatctgagacagaaacatgaacgttctctcctcccttttatcaatttttctgaacatacgtcaacactctttgacttttccaaccttggttcagacagatgtaaccttgtttagactttttggttgagggcattgccgataactaaggcccaggccatagcctgtgacagattttcctccatacgatcagcagagagcagtaattgctggcagtattgctcaaaatccacctcttttttcacagtaactagttgatctttcatctcgcggtttagagcacggtctgtatatgatcgttttacatcattagcccattcatgccctcctgcttccatacgtagtcggttgaattcggccaagaatgttgagaatggctaatttgcctgcttaattgttgccagatcatgtacagctttttcttgaaagtttcgatccatgaaataaaagtctatttgtttaagcatagctccaagagcattgcctttaagtttatcttcgtcgctggcatattgatccatccatggcagcatttatgcagctgctttccctaatggacagccaaatgcatgccacagttggttatattcacttctaattgcaagtgcgtttatttgtaacttcgctcgaagtttgcttctaaactgcgggtaccatgatgaagccgacataccacatcagatgtcaagcatggattttctctgtatatcgaacagattctgtgacaattttggtagactagctagagaacaaggtatcttgcgtcggtttcccaatattcataacatctacattgatcatagatagacttgtggacttttgccatcttccaactctcgtatagttcgtgtcatccacgctaacccagtagatgacatcattattttcgaatctagcccgctgcacacttcccttggagtgggtgcagcaaggccagtgaagccaatgtcgtccagagtgtgtaggacccggagagctgacactgccagtggcattcgagtatcgctgccagtgttcataaatcgtgaacgggtcacctcgtcgccgatagacgggcgcggacagagagctggtcggtgggcacagcgtctccgcttggtgtctacggagaaatccactagttagtatattcattttagagacagggagatggcattcagccatacctgggaggactgggtgcgggaaaggtcacgttgtgccattttgtgttttgtattcttcttgtggtcaatcattcaaagaaggtttgctgtttattatgtttcaaaacatggggtcacctggggacttcttccctctgatatacatgtcagatgtggcatagaaaccgtgggacgagtttcagcgcggacttcaacctatccgtatataaaatcggatagagcatcggttgggtcgttttgtctcgtccctgcacagctggagcataaaccggggccttcctcccattaactcagaagttaacaaataatctcctgcccgccaaaaagcctaaccatttgctttcctaactgggttctgatcttggtacccctcaagcttcaccatccggcagtccgaaaggtcgtgaggaatgataactgtatattccaggcgttggataaaggactgccagtattggtgccgcaaccagattttggaaccatggtaaggacaaaaggacacagctccccacacagctgccataaggcgctccctttgtggcttagagtcctcgcactccactttgacatttcggtaagtcagtttcacaaaacacggcagacgcggccaaattggtaagggctgagtcattcttttcctggtatagggcaatgtagccaacagtcaggtggtaggtaagccacgatgactagttgaaaatggcagtctttgtatgcatttgagttagagcttctttggtgttatatgtgtgcggtggaaatatgacggcgaacagatggttgtagtatgacttatggctgatgttcccgctacttgtgcctgtgattatgcgccgcgggcggttgctatagtacccagaaggaagtcttcaccttctgtgggaggctgggaccgagttgggtgggattacggccagtagcaggtccgtggttattgttggagccatatgcagggttacggttcccttctcctccgaatgtaagatctacatgtgcctgtggctgtctacttcaagtaaacttgaagcgttcaccatgcccttctgcaaaccccgtgtacaccctaaataaaagcgtcgagtcacgataagcggtgtacatcgttggtacgaccgtttatagcgtcgctagcagccatatcttgagtcaagctccgaggacctatgtcacgtaaccaaggtcttactatggtgtcttgagtagcgcggttccgtactaagctaggtcatgccctaagaggagttgtgtttccgttcgaagccaaagtgaagggacgagaacaagattgcggccaatcggcgccgatctgcaggcgctaaccctgctaaggcgcacctgtatgcaatctgatacgaatatatcatgttgagcctcgtgtcacgtgccacgtgatctgtatggcatgatctctggcccctggcctgatccctcgaggagttgtacattgaagaattgacaactatcgtcatcaagatagaaaatcaatcgtcatatggcatcctatccttagtaggctacgttcgtgtagttgatgcagcttccttctaccctttcccctttgagcattcataacacaatcaaagagccacaaatctcttatgctccattcaaggtgatgcgcagtaccagtgaaaatgctcgatcatttgccaagtagatcggcttctcatttccagcaaccagctcgtcgccgacagaaaaatatttgctgctggcggtgaatggtggatggtagactactgcctggctacaccggcaaagttgaggtcagggatgtaagagaatatgctggacatgga

SEQ ID NO: 4746 - DNA, 7482 bp, Emericella nidulans
aattcaagatcgcacagctggcgctcagtgagcacgatggagggaagagtggcggcctcggcctcgagctggtcgtggcggggagcatcgcgagcgatgaggtccttgaggacaccaccgtgaggagtgttagccatattgaatgaactgtgctttacaagaatgaaaatgatccggtggaaggagaggaaggtgcggaagaataatggtgatggagaagtgggaaagctgcgagttttaaaaaaacgatggcgcaaaagggccgcaagccaacaattgcggaaccagatttaattcaggagaacgattgactggattccctgcccggaccagccaagtaaactgccggcctggattcagagtggggggctacgtcgtctacgtactccatatactaatcctacaaggttatccagacttcctgctcagagtatcaggtatcatctatactatcaggtagttcactccacatatcgagggcgaaacaataaaagtggaaggtttcgaccaagtaccgtacgaacgagacgaacgaggagccatattttggatttttatatccaagatctacgcatttctttgctccctttccccttcagaatgccagataatcaacgagttttcgatttactggtaggccacacgcaaggccatcaatgagcagaagcaatctttcaggagtcctaatgttgaggtgagcgtcctgtcaaatcatgattttcaggggcggagattatcagttgtctgacaagggcatcgtcgtcagcagcaacgtctgatacaaatttaattgatcactgagcgacgggaacggggaacgagaatgttcagtgcaggattgcccagcatagtttatacctctcacggaagggccgcggggggaaaagaaatcctgtcagtggcgataggattcttgagttttccgttcagccacaactatacttcttcacctcaaagcaatccgatataacaacggagaaacggagatatgctagcaacttctaacgatgatgaaacagacttacagaacgagtcggccacgggaactagcaataagcccgtgccccgcggttgtcgcaatcctcgtggtgaatgtcgtgctcactagtcctaaaagggtttagcacaccaatggttacgggtctcgcaggttcgtcctctctgatgtctacacgaggaattaaccaggatcagtgatcatcttgcatgttcttatgatttgacaccttgacagtttatgacaggctggtcttcgatctacaactcctgtgcctgactatcaacggactgcgtaagtccccctgagaatctatgcttgagatgcgctatggacccacccattacgttgcacgttaatacgaggcgagcatctcgaagctctggcctccttatacgagagccaacgtaaccacgcgagaccaggataatagtcgccctcgcggtctcgagggatgatacgtaggtcgcggttgaaaaggagtgtcgtgcgaaggttcgggattttgctttcttgcaaatatacactgggcaggcactgagccaacattatccaaatcccgctaagccgaggttttgattcccttcgtacagcgtataagatgcccctttagtatagccgcagaggatcgttatcatggtgcttcgggcctgtcaacggcacgtctttgtctctataatatctgtaaaaattttcaattctctcgctcgatacatgcagactggagtaaagaacggcattcttgcctgcacagcctattccaacattcaagccttcattgaccagcttcgcataggtgccaagtactggatcatgcatgtgaggcttctttgtaatgccatcgctagcatccagaagagtgactgccaactccgcggcaaacaaaggccttgtccttttggggtggggaataggctataaatgttacctgactagcggctgctcctgagtctatgattatgttcaacgtggaggccccgtacactgaatctgggtttctctctgaatgcgaataatggtggccgcagcgaataatattcagacaagatgccaagagataaaatcgataagcttatatcagccccactgatcacagcaaaaatccgctggcgtcgatgtcgcaatcccaaactaaatcacaccttcatcacccgcaacgttaaaccgtttagcctcagtactacgaccctgatcggccaagatcttggattcttgaaggtgatggtgtgatcagcagaccgaagatcacgacaactctgcccagcctcacgaatccgaccatggatttccagccctgtctagtcgtattgtcattgtgacacagatgaacttagttgctccaggcagtgctatactgtagtttatacgcgcaccgcggagaaatactttatctgaggggaaacttggtatcacgacatttgtagggtttgtggcgtgcacaattcatgccccctccaagatacagtacatagacaaagggccttagatggcgagctcgacttctaggcaatgggcctagacactgccagggtcagactcggggttccaactcgagacagaacggaaagatcagctggcagagggattcattcctagcaagatacgaacgtaaaagtagtacactgctgatacctaaggcttattgccctttgtacggtggttgtctcgtccagagtccatactgcatactaaaagcctgagcggatggtctgagggtgagggggccggcgggccgcacggtggccttctcttattttctacggctgcatgaatagattaggcgctggctctcaacaataattgcagcctaggccacaggggtttaattggtttccgcggaaaagcagagtgccccacaaattttaacgaggatcatgctaataactactgtgggcagaaattcttaagagaaggatggatatctgaggaaatctatcatttctatcatgctatcattacggggctgaatggtctataagaagcccggccaatccgacagtacaagttgctgccgaaggcggattggcatgaagatgcttttgatcgccagaaaaaacaagagaatatatccagaaaaattcataacggcattatttccgtaggagcaccgattgaagaagacaatgaccatgtaacctcgctagacatgagaaccaaacgccaggaaatgcaatccaagagaacattctcccacttattaagcggtggtaagcttgttctgcaacgcttgagacaaagcttcctcctgtcgcttgcgttccatatccatcaagtactgggcgtactttgaccgagggttgtggataccacactcggttttcgcctggcccttccagcggcctgatcgttcgtcttcgttctccttgacgggggatgtagagtgatagtcaccaacgctcttgtagcccttgtcgagtaactcgttgtaggggatatcattctccttgacatactgcttgacctggtcaaaggtccagttggcgagagggttgatcttaatgaggccggcttcgtccacctcaataatgtccaggtctccacgcttgcctccttggctgcggcggcgtccggtgaggactgcgtgaacgttgagctcacggtaggcacgttgagcaggctcgaccttggcaatccagtcgtacagctggtcatccttttcccacaggcgttcaccgtgcttcttagcaaactcctcttcggtctcaacaccctggggcttgtagacatggatgtgctgtagcgggtacctcttgcggacattgtcgacaagtttcaatgtctcggggaagtggtgcagagtgtcgaggaagatgaggttgaccatttgagggcgagggatggacagtttggaaagcatatccatgatcacaagaccagtaagaccaaaggcggtggtctgatacaggtgaggtagcgaagtgacacaccatctgaggacatctgcaagaggggttaggcgtcgttgtcttgaactgaaaatgtggaagagctgaccttggggttcaaggaattgaagttgtcggttgaggaactgaagatgaggtttggtgaagacaatctctggtagatactcttcacttgagccaccactgacatagcccgactcagtagagtctcttagttccgcagtctccgaatcggaggggtagttggaatgcatcttggctggcattgtgtcttatacagccctagacaaagttgtatatggttgtggtgggcgtggtatatgggtacgtaggatgcggcgggggcggtagcagagtggtgtaagaggcgagaaaagtgccaacaacccctctgatataggaaatcgagagaacaggggcaatcacgacatcatcggcagttgaaaacgccattttcgcggcctttttgtatactgagtgcctgagaaatctggcatcgagatgtcgtgcttttttttgcgattttgtcatccccacagacaatcacgcaatacttgcactatttggtctctaccgccgcccgtaatccggtgtctgttgtccattttgctgataaatccgcccattcccatgccctcttacagtctcctggaaggctggagaactatcctcggagaaatcaggaatcgttcgtcaaagaaccgattatgaatcacttccgttcggcacaaggcgacagaattctcccgaatcccggggtgaggagactaaatattattagctatctgtgacgaaagagcagtcacttgaaaacaggacgtaccaggagcatcattagtaataaagcagtggctgttgctacgataattgagatgtcatctgaatgtcgtgctcgaagcgtcagggacctttcagagcccctcagagcctcaggcctcagggccgattgaaccctctccacttggtgatccgaagttcgcagatgttaaaaagctccataatggggacccagaaccaaaagaacgctagtctctacatggctatttggcgccttatagcctgaggttataaatcatcacgtgtcgacgaccggtacagaaatctgatggaagatgaaacaacaaatgtatattattggtacgaactagacatctccttgcgctgcttaaaagaaaatttcaaccgggcaggcttctttgatacccgtagccctttgtgatctgtctcttaacccatctccccgcattgctgcacctcgcctccgacatgtcatcgaccaaccccgcggtagctcgtcctgcccgccctgtgatgcagcagaggttctccagcagttccttcatccaggaccaccaacaatacaaagctcccgcttccatcaccccgacgattggtaacgtactcgaaaatgctactgagtcgagtccctcgcccattccacgcgtcgcgaatcccatctctccggatcccaaaaaagtgaccgacagtggtatcgtacacagtatcttccaacaccgggatgcggttcttcctcaaggaacaccaaagcttgttgcgacaatattctacaagtcctccgatccagtacatccacatcttcaccccgactcgtctccccatgctcgccttggggataaacttcctcaccccatggtacctgtcggttcggcgccaaccattgacatcgagaaactcccacgcgagcccccggcacccgaacccgaacctttggatcacttgtacggcccgtatgtgtcacagctgtgcttgaccaatttccttcaaatcatcgaatccctccccatcccgcaccagcgtatgaacacctcacaccgatgcctcgatacgcaggagcagccccgcgtcgtcgaagtcacctttgctcctcctccgaaccccgactaccttagttttgaagacctccgcaagcatgaaagcatatggcgattcgagagagagtggaatgtggaggttgtcctgcagagggagagcgccttccgcaggcataagcgcttggttgttttcgatatggacagcactctaatccagaacgaggtgattgatgagatagccaagtttattggtgttgagaaggaagtttctgttagtatttcacagtgcgctgcttgttagtctctggatctgatgtttgcgacaggaaatcacggaacgggccatgaacggcgaactcgacttctccgcttccctgaaggagcgcgtcagcttgttaaagggagtccctgcggacgtctttgaaaagctaaagtctgttctcaccatctctcccggagcaaaggaattgtgcagagctctcaagaagctgggctgtaaactagtggtcgcaagtggagggttccaaccacttgcggaatggttggctggtgaattgggcattgatcacgcctttgccaatcatgtaagtctcgagcttttcttggcttgccgcatccgaataatgtggacgttatcgagcactttttgactgaccaatccgctccacagctcgaggttgatcccgcgtcgcaaacactgacaggcaaacttgtccctacgtacccaatcattgacgcaagtcagaagcgctctttgcttcaatctattgccgctgacgacggaattgatattgcacaaactgttgccgtcggcgacggggcaaatgacctacttatgcttcacgctgctgggctcggtgttgcatggcgcgctaagagcaaggtgcaacttgaagctcccacgcgcattaacggtgaaagcctagtcgatattctctaccttcttggttttaacgatgaggatatccaggagctcactgcctaacctagataagcggagtgctttaaatgagactcttgaaggttggctagcttgttctttacatctctaaccatcttttagagcgggtctcttacacttttattactattactttcatgactttctctttagacttgccaacgggtcctgtttagctatgttgaattttcgcgatctaatacatacctcacagcgtcaagtgtcctcctgcgcatattatccggatttacgggcaccgcatgatgttgatacattttcttttcttcttgatgatttcagactcgcttggttggtgtgtcagtgtgaatgggagtaggatagggcagggaccggcacgcatatttcatttattcagatcaatcaatgactcaaaataataaaaacatctaaatttatcatgtcttgtgagtaggtctgatggtggtagacgttgttcaatgtcattagggagaaatcattaagctcagtctgtcaagatgcccatgaccgtggtgggtgtttagaaatgaatgattcgagaatgaatgtagcgtcggggaattatgtgcatattcagaattgctgggggcagaccaattattctcatgctctccatgttgaattgttccatgtatgtccataatacacttagtttccaaccaatacaggacgcctcaaatgataaagaatcttctcgcaattaagaccaaccaacagttttctaaccctgcgccatgaaagatgttgaaataaaaagatgaatgaaatgaaggatgttaccgggtc

SEQ ID NO: 4747 - DNA, 6125 bp, Emericella nidulans
  unsure (1)..(6125): unsure at all n locations
ataaaatattacaaagcatgtaagttaatagtatcaattaacaatatagataatatattaaaatataatgtgaacgtgttaataattaagtaaaataaatataagtagtcgatcgcatgactgattagaagaagaattattttattattaacactacagattatagtaaaaagatgatccagtggaaacaaaagctaatgattaagggtggcattatatttggaatttgaagaagtaaaggaaataacaaagaacaacctacaaaaagatggacacaaaaatataagcaaataagagtagtaatatatctacgaaataaaatggggactattttgaaagtatgatattttataatttattaatgacactaagcgaatggttcatgaagcctgaatcaagcacaacatggtcacagcgtctctttataagaccaaaattcaaaataagtcggtagacggccacaaggaagatcctccgaaccaaatagccaccacctgagccgtttttcccaccaaagaccaaattggctcagaaagtgccgtgttatgcacgctgaatatcattcttcctctttctctaatgttgctgctaaatgtcgttagtcgcaccccctgttagttccatgattgtggatgtgaataaatagggcactgtaaaaggcgtcatttgcatttgggtggcctaattcttggtcttcgtcttcatctgcacattcgcaggcctttatatcacggtctgacaatttgaagcttttgctctgagcgcatcattagccccgtcatgttcctcccaaagtagatcatgagatgtttcgctcttcagcagcaagcccaagagcacattccatgcgctgtcagtatccatccaacacgtcggtctctgatttccacgctgtcgctgaaatagctgcctttcttggttcttctgcggctgtcattctcctgccctgaaggcacgcccaggcaggtgcccgaggccactaatgggccccttcccgtgcgggttatatccttgagcacgactataaacaggctctctgtttctgacctccatctttctcctaatccagattttggccgtttcttctagcaacaagcatgttcttccaccctcgaccaaccctagacatcacgcatagctgtattcattcgccttatatacgcatttgcacatttcatcaaccatatctcaatgatagcgaaaatccacttcgtcttgatcgccgtagactcgctgtctcaagctggatgtctcaaccatttatttcaccggaaaggaaggaatagcaggcggctggaggcgaagccgatggcgaaattgacggcccattgggaaggaattatacttgtgtttttatacttgtgtttgcttagattgccatagctgctgtttccggcaatgacggtggtgatacggtgtgaacgtagttcgggattaatagaactgaagacaccaattacggttccttccattattcaatatcacaagcattttcgcgtcgagtgtacacggtcattctcgactttgcatagtagagccggcactaaccccagaaacacaggtatcaatcttcataatcttcacatctgtgagtgaaaagtcagggaccgactcggcaatgacaccgttggtcagaatatgatgcaaataatccgtattgaatgtgtagatgaggtgtacaatgcggatcatctatttcggtaggaggagtcctgtatcgtgaaagacgtgtgccagaaggatggaaaggattgattctcggtagtgggaagacgattgcgctttgctgggttggtagagagttagtggtcctcaggaggattgtgatagcagcgaggaggatgtcgtaggggtcagcgacgaagaaatttcgtgctggaaagtgtgacatttggtgtttgggtggtagttttgttgacgatatagatagagaacagtgtaatatgagattgaagagcagaagagaggacacgaggatatgtttggtgaaactactctgaaacacaagaggttgatgcaagagcgggttcacctacacatggaggaaggtgatttatcccacttgacgatatgctagaaggccttgagaacaaacaaatcattcttggtctaataagagtaaagccaaacagctaattccctaaccttcctatacctgcacaacacttatgaatgagcaaacgccctttatagggtaaaacaagtcttccagttcccgccgctccttgcaaaattcaagccctctacccaatcgtccaaagtgcaccgtccaaacttgtcaactgcgcagccatgaagaggaacaacgcgatcattcactaatacccgcacaagcggctccttcttctcgcactgcataagctcaaagtaagccctcgcaccaaacggaacagtccaagacgccgcgtaaccgtccatctcctggatcgactccacggaatccattgacagcggctgggtgccgttgtacagacccatggcgaagaatatcgatatcatgctattgtcgtgggagaagtcggcgtagagcttcctgtcgagcggaaatgtggctgggttcgagtctagagtgtggttggtgcttgtgttgtcctggacgggcgattgcgttagtcgggcaatcagctcgttggtgaagccaattccctgagctgggccaagggggcttccggcaccgtagccgtagtactttgatagagattgaaggtagtcgtactgcagccactccttttcagtgaagatggcacaaaatggagacagctcggttccgtgggcggtgcgcgccatggtgtcgaaagagcacatatccatcaaatatattacattctcgtttgtaagtttgatgccagggaggtcattttccagacgtttgcggatcggaggtcccataattgccgtgaaattggcttcaatttcatccgcccgctcatcattctcaaaagatacgcacgtgctatggtccagggtgttgttaaacccatcgatttcagggataatcacattgacaactggcgtagcacgtttggagccatggtcgtggagctgagccttgcgaaatccattaatgaacttctccgcagacgcaacgacacggtcagaccctgatgcacggataaaaggagtatttttcctggcgagattcttataccgtcggtagaacttggcacccgaatcaaccatctggttctcgccgaagatagtcaagtcatccgcgccgagggtatagttataactctccagaaaagcatactgtccccaaaaagaggtagcattcttctggattgcttcaatcaaccccgagtacgccttactcttcgactctgtcggatacctagccccatgccgcgagagcacctgcacaaaggtaacctcacagccatgaggcacgtcctcagagatagctgactcctgctcgatggagaagtacggcgagtactgaccccaaacatgagagacattggggaagcattgatatccaccgtccgccgtattgcatgaatgattctggaccactggggcctgagtagagactctgtacagataagtaccaattcaactaagcagacagatattgtagagatctcacctcgatagcaagtaataaagcgaaagagcgaccgtgaaaaaagccatgaccgaaatgaacacgagcctgctcctcctcatccccggagcccgacctagacggccgtatttaaatgctggctgtagccccttcatattcgactgagttgcattgtctgagatattgtggatcaacgatgcctagtcggtccgctatcggttacagaaagagccatcagacgtgcagacgggaagaaggggggggtttgacccattgagtgcgaggcgtggagcaaccttgaggacgaggtgacagtcaagtacgcaagggacgaaacaggatgcctgggtagttgacagttcagcaaaggcacgtggggatcccgcgacaacggttggctgcctcaggctgcgctaggcctagcatggaatactccgtctacttctccgaaggaacttcggatgcccgccgacaaacaagcaaatataagcaaatgcattgtatatactttacagtctagctgagtcgtcggtagacatatctctcaagatgataaagttgttgcagagtaaaaccagccgactgataaaacagagtgaccaccaacaccactatgaaacagaacccaaaacaaaccccccacgtcaggttgatcaataagtgtccgccgttcacaacagctaagctagccaagaacgtatattcacgtgaacaatatataaacatttggcaggtatgccagcgttgtaagggcaaaagatgagctacgccaccttatgatgccctataattgcttaatgaagtatgaaccctcacttgagcaaaacgtacacaagtacttctcagtaaccggaagacctcgtcaatgcagaagaggtgatgggtggagtcgagatcaaccccaatcagacgtatctgggcggagctgggttccgacacagcccgtcaggtttcgctttctgcctgcttcctatgtagtgcgatcccacgctgccggcgtcgaagccatcggtcttgtttgtggctcggtcggccctgatgggtaaggtaatgggccggaccagtccgctcccgacatcggtgcgggcgcgataggccctggtgtacgttggtgggaggaggagtcggtcgttgtttcttcagccttgtcgtccgacccaccagttgcctcaaaggcgggccgtaacagtttaggcgatatcggccgggcaggaatctgaccaaagcgagatgcttggtctcggaagtaatctctctcagagcggtagaaatctcgctgttccacggccacgcgcagctcatcagcctgcttctgaaccgtctccgttagcttccggatctcatcctgctgtgcagtgattttctgctccatctgcatctcgtttcgtttcctgtcacggaatctcctcgacgcattgctatttgccttacgcttttcggcttgagttgaggaaccgggtttgtggtcaacatagcaaggtatcatgcctggaggagcctcaatcccggaagccctctgaccagccacaactatcggtaatcgggtgatgggatcgactgccgtgtacatgggagtgttcatgtatactgaagctgagtggggtgcagtcgtcgccgaaatacccggtgatgatctccctatttgactgaggacggatgcgggtgttgttgggctcgcctcctttgagccgggagtcggggtgtggtttgtgctggctcgatgactagtatacgttgatgtcgagtttgtggaagtctggtggtgatggccagacacaggcgggggattgctggtgtccgtcatcggtaaaggcgagctgggggctacagtatgtaatcgaggcagttgctgagccagcggaggctgtcctagacctgacttcgcaggaaagtaccctgcagccccaacgaatcgagctgacggcgaaacaggcgagatgccctggcggtttgttatcgcaggtgacaagactgtagggtttgctgggtttatggacggagacggtagatggattgatgagnaagagggaaaccgagaatgagacggcgggtctaccgacagtctctccccagggccctcgtggcgctgtctccagtagccgtccggatgtcaggtgtttccgttgcaggctgattcaggatcgagctgactcctatggggcgatgctgtgatggctgcaacggtggctctacaggcgcagacggatgccaggaaagcggccgaggacgcacggcatcacggcactcagtggtgggagagaattcatcatttgtatggcgtctcttccgttcgagcgagccgcggctctcacgcgaatgtgcaccggttggcgaaggagctgagaccggagggttcttcgacatatgctccgcgttgctttcagtagagcgctgtagaggaagtccagggcatggcggggccccctctcgctccgaaagagtcgatggagactcgtggagaggagcacgagagagggagccgggaacggattgggcaaggtggtagtcagacagcgaatgatattggcgtgaacgtaacggatgagaagaataagaaggg

SEQ ID NO: 4748 - DNA, 6133 bp, Emericella nidulans
gtcgcttactcgcttacaggttgcaggctcctggactgactactgcttatgtgctttatttacctaagtttacagttaactagtacatacgaccatagggtgtggagaacagggcttcccgtccgctcagccgtacttaagccacacgccggtaggttagtagtatggtgggtgaccacatgcgaatccctactgttgtatgttttttcttttttgtacttgaaagccaccattatcagcatcgataaaaagacaacaagccctaagtgtgatgctgcttttaggcgtgagacactaggctaaggctatcgctagtgatatcatttattattctgccccggccgaccacctgggtcacgggcattgaccgggcatcgccaggcatcgtcttggggatagggcaacactaaccctcaccctcgcggatcctcatacgcgagattcaacattagactttcagatatcggcccagtgtacggaggcgtgcaccaaaagtttttgcgcgacgctagtgtcacgccatgtaatactgttacgccctacataacaatttctatggcaaccccactaccatacatacatcaatattttgacatatattgcttcttcattgtttcagctgcctgcagcctcttgaagctattcacactgctcatatattctatttgactgatcaatttggtgttttagcacgcttagcacgctttttatactaattcaacttatcctgccacagttgctctccttcctcaacaccagcttcatgatgcctcgcggcggctttcatccagtagaactccgtgtccaagttcttactttatcagctatcggatttagtacagagaagatctcaaaatctttgaatctctctcctcgtacggtccagagcatcgtaaagaaaggcagagatcgtggctaccggccggaagtaagcctgcgcgtgcagcttgaatttgttgaggatagaaagcgatctggccggcctgttgagattactgaagctactcagaatactgttattacttcagtaactgcagatcaagcagggcgcgagaaatcatcagaaattcttgcttatgaagctggtatctcccattcttctgttcttcgtatccttcattctcatggctttgttattgcaaaaccttcctggaagcctggtctgactgaagctgctcgtcttaggcgtcttgaattctgccttgcccaccaacattggacattagaagactggaaacgcgtgatctttaccgacgagactggtattattcttggccaccgccgcggagcaatacgagtgtggaggactgtgaaagattcacatacaaggaattgtgtacggaggcgctggaaggcctgctctgacttcatggtatggggttgcttctcatatgataagaagggccctttacatatctacaagccggagactgctgccatgcggaagcaggcagatatagagattgaagccatgaatcgtgagctggaacctctatgccgggaggaatgggagttggctacaggtctttctcgtgttcatttacgcccaaatcgcggccgtgttcctaaatggaattggaacaagaagaacggtaagcttatacgtaaaggtaaaggggggattgattggtggagatatcaaacagtttgttcccttatctctataattctctattatagagtagttaagcacgtgctaattacttattctactgcctaggaagtccttaaacctcttcttattccatttgcaaaagaatgcatgattgagcgcccaaatactattattttagaggatagcgcgcctgcccactgtcaccgaatccagcagcatgtctataaagcagaagacgtgcaaaagatccttgactggcctggcaattcaccggatctcaacgcaattgagccgtgctgggcttggatgaagaagcgtacaacatcccgcggtgcgccccgcgataagaagacaggagaagcagaatggaggcaggcttgggcggatctcccacaggagactatacaacactggattgagcgtctaattcgtcatattcagattgttatcgagctagaagggggtaatgaatacaaggagggccgtgaggatcgcgatacgcgtagttgggcaggcaggcggattaaagggcgactatcaccacgtgtagacctcgctctacagccaatagaggcccctgaatagcttcatttctcttgtttttgatttcggggtttatgcggatatagttagttgtgggtcaaaaaacatgttgctatagtaatttgtatgtaagcttgttacgtcggcgcattaaattactagcgtcgcgcaaaaacttttggtgcacgcctccgtagaatgtccaataaacatggtacggtcggtgtggctgggattgctggccacagtgagagctcagactatccacctatgcaattcgcggggcgttctggcacccccactgggctgctggctcgccctagttccggcaagagccggcctttgggctcctcggggctcccccggcggcgccccggcggcgccccgaaggtgggccagtgcctgtcgagcgggctcggcaactgctccgctcaatgttccgtgtatactcggtccctgctcccgccagcgtctcgtagtctacgtaacccggtaaactgtaattctcaccggtatctgcattcattcggatctgtctcggcgttcaatggtttattggttcattgttcaatgtactgacgagtgtcgcgccgactgcaagcaggaactggttgggtcatgcaatataggatctcctcgttatgtacgtttttttttttttttttttaaaaaaaaatatttcctaatacatcgagcatcctctgccgctgccccgacatgggtcagccagagacagacgatactcaacttccagtctcccatcagagtcatcagccccttaaaacaaaacgatttactcgcagccaggtcgcctgcgactggtgtcactttaaccatgccagatgcgatcagacattcccctgctcgaggtgtctcaataaaggaacgcgttgcgagttcacgcgcggccgccgtaaacgggggcgcctgccaaaggtcggcactccagggaccgcgaggatcgagggaatcaacagctcgcatacagtctcttctgcgtcagaggggcgaggggcttcagtgacgcagagcctccagacgccggaggatcctcgtcctgctcctgctcatgttcttaatcatcaagatcagatgcacgcacacgacgtggttatcctgagtccaggtatggaatacttgtcgtccgggagcatcgtctggcccatgcaggaagcagagaaaagtccgagtgcggtggggagtctgtcgccaacgcggggtgcggtctctccttgtgccggcacagcagccctaaccgccggcggctcttcggcccctcttgattatacgaacttcgcaggcctcgctgatctcgacgcttttattcttgcaaatcttgcagctgaacctccaattgcaactctcgagccgtattcatctttacagtacccggtcttgcagcccctgatccccttcataagggcagagctcactccagagctggcctgcggcctgctcgagctctacttcaccagcgccttttcgacgcacatgcaccctgtctgccacagtataccctgctatgtgctgcggaaagcctcgtttctcagcaggacgaattaccgcccaagtagcccggcgctcctggccagcatgttatgggtggcgtcgtcggacgaccatgcactcgcctcaccattgactactccttattgccggaagaaaatttcgcgtctgctcgggtcgcttacactggacctaatgagatcgtcaactcacacgccttttgataaaaacggccacgcggccgctggcgggaccgccggctctcctgccagtccagacgctttccgtgactttgcgctgtaccttccgacagtcagtggcggcgttcaaggatttgggtactctgtcgggtccttggatgacgtgatcacctgtattcacgtcgcctctgtactgtcactgaatgatcagaatgcattcgatctgagatggtcagttgtcagcccttgacgtctttttcgggtttcagtagctgataaaggtctaggtggcaggccgctttcacactggcgcgagagctccagctgaaccgggagatagagccggggccgagcatagacagtcaaggcgcatgctttccacacagccctgcagcctcgacgccgaaaccgctggattgcgtctgccgtcggagctacggatcgaccgtccttatcacagaggagcaacgggaagagcgccgtagggtctggtggctgctgtacatgatggatcgtcatcttgccctgtgccacaatcggcctttgatgctcctggattctgagagcaaaggcctcctccttccgcttgacgaggaagcctggtgggcgggcgagattcacagcaatagtccagacttcaacggcccccagtgcgtgatgtcaggaacgggcagtctacggcgcgttttctcagactctacttgccacgatccttcactgtttgggttcttcctccctctgatgactatcctgggccagctgctggatatcaatcaagccaggaaccacccgatgctcggtctcggtgttcttggagaaaaaacctgggaaactaggctacatgaagtgctcggccggctcgaccagtacgaagcgagcctctacggcttcgtcgcaaggtgcggtgaccgtaagtcaccgtcccttgcggacgacgacacggcacattgcttgcacgtccagacacggttctggctcgcaaagacagtcaaagcctacgcatcatattacatcgatctgctacacatcctccagaacggcaaatgggatccgcgctcgctcgcggcggatcacaccctatgggcctcgtctctgaacctcgcctctgctgttccgcaagcgctcagggcggccgagtcggtcagacaggttctgcatttcgacccgaacctcagctttatgccgacctttttcagcgcccaattgcttcaaggcggcttctactttcttgtccttcttgagcaactgcaggatcaggcaggagagccgttcttgagtgcttgcgaaaccatgctcagggctgccgagtcctgcacagtcactttaaataacgggtatctcaagggcttctgtctggttatgcggagtactgtagcgcaagcacgcggtcgtcccatcacccagtatgaggttcgacagcgatggagtgcaatagcagcactgcacgcttggtcggggtgaccggctaagcttggcgcaatagcttcttgaatagcacctaatccactaaagacaatgtattagcatgtttctgcatagatgatgatgtccaagtgcgagaattcaagtggaagggcccaagtggggtggcgccctctatacttcggatacacgacgagcaaagatccactctcggggaaagcgccgtgattggaggagatcttctccagaacggacactcagcttcgaacaaccctgaaactgaaggtccagagcaccattctcgtcgccggtctatttggaaaacagactgaggccgaactcgtcggccgcttaatttgagttcttgagcccccgcgagtggacggcccggtcgaggccgcaggtgactcggcaagtgaaggaggatacgaatagacagacagaaactggagcgatagtgagcagtaacgtccttggtttgcaactgggaattaccaatatatagcttacggagccatggagtccgtattccgatcacggcatatcctccgcaaaacgttcgcctgcgacgaatgtaaacgacgcaaaattcgctgctctggcgatgagaactgcctgaattgcttgagggatgcgaaggcatgtcgatattcgtcgccgtctcatcagctgtctaagttgcagaggtatcttggtttcccactgtccaccgcttgaagcatatcactcactcgatgcaggcgcgtccaggactgtgaacggctaataaacgagatggagcagcctgggccacatatctcccttctgttgaccttcaaggagcgtcgcagcatccgtcagcaggacg

SEQ ID NO: 4749 - DNA, 3881 bp, Emericella nidulans
ttagagtcggcgattacccttactaaagggatccctgccggagagcctcgcgtactggcttcagctatttcctcgcggaagtttcccggcttgatacatgtggagtatacactggaaaacccctcgctgcactttcttaccttcagccttaccatggaggctagcgagtattttgcttttagcggcccgaaaacaatggtggttcagctggcgcccgtgagtcggcaaaccgtccgttacaatctattggcgtcgaagagaggcttgtggattcaaccccagctacttgtggtggatacgtatttcaataagtctttacgtgtgcttccaacagaggatatgaggtccgataaaaagggtatcctgatatgggtcgatgctgaggattaaagacattcataatggctagcaggactctgctagcttccacattcaggatgtgatattcaagatagaggcatacagaatatttcaaggagaataggatcatcattaatgctgggcatatcgtgcgtagagggatactgctattaggagtggacttccgcaataagggctagtagatatcacgtggaaacttcttatctgtgctgtatatcgctaagacaggactagcgttggcgatcggaacggtcccgcagctttcccgttctgttaggcggagagggactgcttgacgttgagagagacgctctcttctcctctgctgccgcttcattctccattgtttgagttatccagctgatctatcttcagtcgcaaccgggccaacttcctgaaattctcagaactctgcgctagtggcaagatatcatttcccgggttttctccacgccagcgccaataatccaatcttctcttaccaatacttccgtctcagccaacaccatggcggcgcaagcggccctgattgccgatacgatagtgggcatgaaacgggcccttcgcaatgagaatgattgtatgcgacaccctgagaacctatctttccccgctattctctaacgccctgatctaacttgaccttctcagtttcgggaccagatgatccgataacgcaaccaacgaacagaggaaacaaacttcgggggaatgcgagatttgtgaaagaaggcgcaatgggttatatccatgccgagggtctatataaacaggtatgttttacttcttgcaggacgttctttaatacttgtgaccttctcgtgggatggtagataaaaacatcactgtatctgagctgcactttacttattgtggttgaacggtcttcgcagaaaatcgaacatgccggatatacccgctacatcctccaccacaaccccgtgcgctacgactctgagggcgatgagcttgatgatgacgacgaggattcggaggcagatgcagccgtggcggaagagaatccgttttctgagattgccctggaacgtatgtgaccaccatatcgtgtgtaccgacctaaacacaaagatgtactgaccttctctgcccccggctatttagattttctatgccctctgaagcatccatccgagcttccctcccacccttcgttatctcacgcgtatacttctaaagctctttcgcacatgacacaagcaatcgaagctaaattgcgccaggagcgagccctgctatggcgggcaagaaacctacaccggcaattgcttggcgacgggtcttgggcccgtgcggcatattcgagacgcctgaggacagattgatttttgaaccccaaatagtcagcacagggcacagttccccattgccacactacgagacgaacgggctccaggtctcaagcggtggagggcttgacagcttgaaggacagtggacaaaactctttatccacgaaagaaactgaatcctcacagcatggaggcgataagcttgtcaatacaacaatcaatgcggaaatgaaagttcggctgaatggagccaccgagaacgcgtcgtattatcccgatactggtcactcaaaagagccgaagtttgaagaagttgatacggctgttagcgatctcccgcaacattcagaaactcaaggtggagacaacatcaacggcagcagaccacacaatacgcctggagatttggatagaattttagagacagatggaatggtgggcaaggagacgaaggagaacggaaacactgaaccatatcgtcagaacaataatgatgggcagaatgcgaatgaagatgttgaaatggaaaatatctcatccccagagcctccaagacgcatgacgaccagagctcagaccaacgcaggcccaccacagcacgacgccgactccaggcgtgcatccccctccgcatctagcgatacgctaagctccctccccacacctcatccgctctatctcgtgccagaatcggttcgaccagatcccaactttggcctgcctccaaatgaagctgaggacacccgccggctactctggtcgtacgtccaaaaacaggaagagacagttcgtgggctcgaacacatgcatgagagccttttacgagcttgccggatgaaagaagatgtcttcgaatggtgcaaagccgagggacatgttggcgagttgagcgacggagaggactggtatgatcgtgagaagtggggtctcgcagaaggggaggacctcaagaaaggcgcggacgaagatgatattgagccggtcgaggagagccggtcgtcaaataagcgaggtagaggccgccgcgcataggccaatcagctggtctgctgtttttcagttttctctttgaactcgtatactgtgattcatgagtttcatagcgtggagttggcggattttctttgagatcttgattcttgctaagcgatggcatgtcaaaatagtccgtgctttctatctctagaatgtaaaaccggttgaagattttacgcctactacagcgttgttcggtgtcaatatttgcgtatgtgcaacttgtagatgctcagcaggagttgcaaaggtatttcaactgatgtttgtgaatttgttcattaagcaactctttccaactttttaatcgcggcggaaaggatgtatatcacgctttttttttatattttatcttatattttcgttttaagttttacttcatctaatctatacacacaccaattttttgactccgcgaggggtatcctgcagtttcaagtattcttcctctccatccaatgttgaatggctaggctccttctttttcacctcggttctgttcttgaaggcacagaattatatcaatctaacctacctaagctccatttgcgcaactgatagaccactcataccagactcatgtatgttgaattctaagtctcgagacactgttccgccatggccatcatgcacacttttgtgctgctccttactccagtgagaagagatcactggttctttccgccgcgctttgactttgcacgttcgcgttcgcgctttgcatagatctctgcggtgaaagggctacagatggcgtggtcagcaggacgaagccacagctctatacggttccaagcatccagatcaggggactaaggagaggtagcgagacttactcctcccatttcaaagcaaaccagtacagaacaaagaccagcgcagtgagaaggatacccgcaaccttgcccttgtacagtgcaacaccaaggaagttcaaggtactccccagtacattggggagccggtaacgttgaaagggaacccgggcacaggtgcgtccataaggatgccgaagtaatctccgagatacgtgcctgtgacgcctagggcatacatgcttgacatgacgagaactgatcccacggcaaagagagcgcctgcgagaaccggttggtgcacatgggcatagtatggctggtcttcaaagcctgttgga

SEQ ID NO: 4750 - DNA, 6485 bp, Emericella nidulans
cttatttgtatcgtgtgtaacaagaaacgtaaactccctaatgcaattcacacggggggatcacgctgaaaaccggcaggatggtccaatgcctggtagtccctgtaaacggctttcagcacggaagatcctgggtggatttagctaacttgggatataaaccaaccaattctaaggttcaaggaagatcttacatctacaatgaaggagcaggccgagcaatgtccatatcgctgatggaaactgactggatgacatagttatcgctgcggatggcctatacaagcgcgatgttttccgtatgtcccggataatttcaggctggctgtctaccagtgacagagctaactcctcgtgttctaggactacccgatcccttcgccgtggccaccgttggaggtgagcagacacacacgacatcagtgatcaagaagacgctgaacccgtactggaatgaaatgtttgatttgtaagtgttgtcgctgctgtcactactcatcactactcatcaggtactgatgctgttgtgaacttccaggcgggtcaatgaggacagtatccttgcaattcagattttcgatcagaagaaattcaagaagaaggatcaaggcttccttggcgtcataaacgtgcgcatcggagatgttattgatttacaaatgggtggtgatggtgagtcatgctgcttcccagcaacttccgcgttttgcgctgcatgtccgcggctccttctagatacatcccagctaactcgcgattttgcggcgcttgacagagatgcttacccgagatttgaagaagtctaatgacaacctcgtcgtacatggaaagcttatcatcaacctctcgaccaatctcagcacacccaaccccaaccaggcgaacggtttgcaccggacacaacttggagcttcaacatccagcgggcttgttccgcaggttgcaccgacaccgtcagtaccccaagctggacctagctctgtcgatcaatcagcagctgcatcgagtgcctcattgaacccgcagcgtgtcccatcggctacccgcccgaccagtcaaatcgccccgcccaacggtgcgccgccgatcgccaacggacagggcgtaccacgacctaatctcagttcatttgaggataatcaaggacgactaccagcaggctgggagcgacgcgaggataatctgggaaggacctattatgtggaccacaacactcgaaccacgacctggaacaggccgtccgccaactataatgagcaaacgcagcgcactcagcgggaggctaatatgcagttagagcggagagcgcaccagaatcgaatgctccctgaggaccggactggagccagctcacccaatttatcggaaactcagccgcaagctcagactccgcccgctggcggcagcggtgccagtaatagcaacgtggtttccatgatggcgacaggagctaccactgcaggcactggtgagcttccgcctggttgggaacagcggactactcccgagggcagaccgtacttcgtggaccacaacacccgtaccacaacatgggtagatccccggcggcagcagtatatacggatgtatggccagaatgccagtggtggcaataccaccatccagcaacagcctgtttctcaactcggtccactacctagcggctgggagatgcgtctgacaaacacggctcgagtgtatttcgttgaccacaataccaagacaaccacctgggatgatccccgtctgccatcctcactggatcagggtgtccctcaatacaagcgtgacttccgacggaaactcatctacttccggtcacagccagcgctgcgcatcatgtctggccaatgccacgtcaaggttcgccgaaataacatatttgaggactcatatgccgaaatcatgcgccagagcgcgtccgatttgaaaaagcggctgatgatcaagtttgacggtgaagatggtctggactatggtggtctttcgcggtaagcattcactctgacgtatagcttacttactgctaacgtgcaccagcgaattcttcttccttctctctcacgaaatgtttaatccgttctactgccttttcgagtactctgcgcatgataattataccctacagattaatcctcattcaggggtcaacccagaacacctgaattacttcaagtttattgggcgtgttgttggattggccattttccaccgtcggttccttgactcattctttattggagccttctacaaaatgatgctacgcaagaaggtgtccttgcaggacatggagggtgtagacgaagatctgcaccgcaatttgacatggacactgtatgtctcatcattatttgctggagatgtcttctaaccatcagcagggaaaacgatattgagggcatcatcgacttgactttcacagttgacgacgaaaagtttggagagcgccgtacgattgagttgaagcctggcggggaagatatacccgtgactaatgagaacaagcacgaatatgttgagtaagttatttacagctctttctatgagccagtctaatcatttctaggcttgtgacggagtggaagattgtgaagcgagtagaagagcagttcaacgctttcatgtctggcttcaacgagcttattccggcggatctagtcaatgtgtttgatgaacgtgagctagagctgctgattggaggtattgccgatattgatgtcgatgactggaagaagcacaccgattatcgcggctaccaggaacaggatgaagtcatccagaacttctggaaaattgttcgcacttgggatgcggaacagaagtcccgtctgctccagttcaccacaggtacatcacgtattccagtcaacgggttcaaggatcttcagggctcggatggacctagacgattcaccattgagaagtctggagatccaatcgccttgcccaagtctcacacatggtaagtctcaacttctgttcgcttctacgttctttgctaattcttttcagtttcaaccgtcttgatcttccaccgtataagtcacatgaggtgctagagcacaagctgtcgatcgctgtggaagagacattaggtttcgggcaggagtagtaacacatctgaatggatttagaaagccagcatttatactatccattcgattcaccaaacagcttcagagatcagcccaacgaggaagggctattcatacggagcgtattttgctcctcttgtttgatcttctccgcgaagcgctgcctagggtcacgccatacccgtcgagtccatttctaatctgtcatttctcctgtcacggtgcaggcagtgattctgttattcccagtcattcttttgagaagagcaggactcagttgaggccatacatacaggcacacggcattgttaagcttgatttattctattcttaccaggatgtggtggactgacttggataaaaggatcatctctagaacaggactgctacttgctgcacatcttaagttgcatcggcgttcatgcagtgatgccgaatcccagttttgcagaatatctatctatttgttactcattttgatttttgctttttttgtgatctgagtgtgtgcagataaagaaaaaggagatgaaaaaaagtcctagcagttcatcgggttggttgctcatggttatccactatatatcaaagttcagccgtacattatcagcaagacttttgaaaggtagttcctcaaaacgattcaatgccaacagaaaacagacactgcgagtctatcataaccatagcaaccatctgtcgcccaactgtataggcgttgcccagacatgaactataggtttcccaccaatagtccgtttgtatctgacagatcaccgtgacttatccaatcaataacctggagtctgcccaaatcggagtgctatctttccagctttcttgcgttggatgaagctatttccagaggatacaacctgggatatgccattgcaaggattccataagccctggtgacatggctctcgactccattcagtgtaactccaacataggttcagtgcaacacgactcgattaagtccctatggtttgagtagtagcccagtgttcgagcgagtctgtaaacatcatatgtacaatttggcttggtggcagagaacttgctcagaacgtactctaggcaccgcatcagccttctgcatgcttccaatagccgctttaggatctttccgtctgggccctgagcatttccctctacctacggagtaaacaagacctcaacgggcttaacttccttgcccatctggtgtaactccgtgctcttataatctccgtcgccctgcagcagcctctttcccccctttacaccccatctctcctacagctcaaaacaccataaactctcaccagcaagaactcgagatgcatctcctctctctcctctctgttctcgcgtctgcttctgtttgtgttcttgcgcaggatgcaacctctactaccaccaccactcagccttcgagcacctgcttggctcaaaagtacgtcttcattgccataatcacatggctccgtttcctagagaccatactaaagaaccttctgcagcatcctcgatacctgcttggaatccgtccagggccgagttgatgcgtgtggtgcgaatgagtggcgctgtctctgcgacgagacaaccagtctgctaacgtacgaacgccccctttccaagcttcatccataagccaagtacatctacgaagatacttccagaagactaaacacagatgctacgacaattgtcccgacgatggcggccgtaacggcgtcgcacagcaacgaacctcatactgcaacgccgcagatcagctcgaacccactagcacgacctcgatgactaccgccaccacgacgtcgactagaacttcgtcggcgacggatggcgacgcgacggcgaccacgagcacgagtaccagcgacggggccgcggcgtcggagacggcagacgatgcggcggggcgggtgcagcttgcgctgggattcggtgttggggctggggttgggctggccgtgctgggagctctgtaggggcagaaccgctgtactgacaaagaggaggatcaagatgaagtgactggaatgcgtcgtggtacgagccccctcagtaatagggctgagaaatgtgtatgatatgctagtcctgccgagatcgcccactgaatatgggggtcttggaccctaggagctaatctgcgtgccaagtcgctagtaggcgcagcctgtcggatggttcatggaatggcccgataggcctgaagcctgacttagagaatctggagatattatccaagctgtgactgggactacgccggaaagaaggtgcaatgatgtaagaacggttgacaatagattgttcatcagacccatgcgagaaaagccgaaccgtgggacatatatctacctaaaagatagcagtaccttttgactggacaggcgccgagtcgtccacaaagtgaggtcatgattagtggctgttggctgtcagacaaagaccagtccagactcgatttgacgtgtcagggagaaagagaaggaaacctgctctttgtatgctgctagtcttccaatcacggtggcgctcaacttcctgcctgctccttcgcctcgtcacctcctctctgtgccttgtctcggtcgctctgtctttgtcttcctgactctccctcttctcgcccgatctggcttcactcttcactccccctttccattttctctcctcctcctcgtcgctctgcttccccatacttttgctgtcacgcaaccagtccctggacggacttctactctgtactcctactaattccaaccttctgtcgtctgctgcctgttcctatctttattaatagatcccgccaccgttcttctcccaacagccgtggttcccactcgattttccggctgcatgtgagttgtcgagagcttcctgttctgtactctccgactcccctgctatccttaccacttgcgcgtctgttgtgtttgtcgttgcttatcttctgctggttttctttgagaatcttgcttctttttttcttgcaaatataatagcgtttattccaacttgtatttgtcgcttttcattcgcgttggcaacctgggcggcttgtttcttgcccccttgctgtctgcctgcctggtctgcctgtccgcctattgccgtccgctgttcgccgccggtcgcaaacgacgcccgatcagcaaacactgggccactggacgcctcatcaccttttaactctacttcggatcgacttcgcgtttcgcatgcaccggtgcattgtcttgacgctcgtcagataatcatattcttctctccattttaactttccgctcctttcccccctctctacttctgagacaggtcgtgtcgcatcgcatccctgcattgcttacacctggtccgctagcgcccttctttgccacaacaactcgcatg

SEQ ID NO: 4751 - DNA, 4691 bp, Emericella nidulans
gcttcggcgtgaatttctggtgttctcgtggtcgcgtcatcatcaaggctgaagatcctgaccgtccagtttgtccgtctcttgtttgtcgccgtcaaatcgaggtatacgacccggctgggatccttgcagatagggctgtggttgatcatctctcggacaacgtgctgcaccccatcttgcctccaccctggctcgagactgaagagggcctcgataacgatgtcgcactcgagcgtccccgggcaaatgggcgcagtctgtgcgatgacgtgactgagcacgtagcggttgtacttgtccgcggaggtattaacccggaatcgggcctgccttgtctcgtcgtcttgatagccgacgaactcccacaccggcagcgtccgggggtcctgcggcgtgccggcctgctgaccctgcagccctgccccagcgagggagccgccgttggcagcgatcaaggcgagagcggcttccttaactttctcaacgggggacttctatcgggagccgagtggcgggaagaagtatcgaactggtatgggggtagcagcaggtgggcatactcagcggtctggacagcatcatgcgcccataaggtaacgcggagaccctgcttccagagcgcggttgtggtatcggcgagagagtctagggctgtctcgttggtgatgctgacagcctggaagtagtggctctctgacgacgcctggccctgagcaatggcccggccggccatgacggtgatggtcgagctagagccggcttcgaggaagatcgcctgcgggtgtctctttgcgagacgctgcactgcgtggttgaagaagacgggttggcgcatgtgctgcgagacgaaggaggcatctgtcgctctggcagaggccacctcagtggctcgctcgacggggatgagggggctgttgaaggtcagcgtcttgccgatagagtccagcccgtcactgatcttgtcaacgagcgaggagtggaaggcgttcgtgacattgagacgcttgcccttgatcgagccgaattcgggccgcgagatcgtctgctggacctgatcgacagcactggtggacccagcaatcgtgaagctgcgcgggccattatagcaggcgatactcgcagagccatcagaccctgaagctccgttggcctcggacagtagctggtggactagtccctcatcgccttccagagccatcatggcgccccggtcagcgccccagctgtcccggacgagcttcgcacgcgccgcaaccaaacggacggtctcatccaggctcagggtcccggcaacgcatagggccgtgatctctccaaagctgtggcccactagggcctggaccttgccgttgaggccgcagtctatccaggtctgagcgcaggcgtactgcatcgcaaagagcatcgtctgaagcttaacggtatcttcaatgggctcgcggctgaatatatcgggcgcggcgtagatactgaccagcccctgcgccttaacaacagtatccaccgcatctagatgcttgcgaaagagggcaactgcgtcaaagaggccccgatccagcccgacaaagcgcgagatctggccgccgaagcagaggatgacgggtcgttcggccttgacgggggcaatgcccacactcgcggcggcatccttgctgctcggagccgcggcaacggcctgttcgatcttctcgtggagttcggccagcgagcgggcattgaagatgaatccctgaggcagaccgcggttggattggcgactgaggttgaaggagatgtccgccagggtcggctcttcggcgcgcgagcgcaaccagggcccgagtttggcacaatacgccgttattgctcgagtatcgagcccaggaatccaaaaggggtagcgtgctcctgcaacagcgtggcttctcgagtgagggcctcggagatcgggctgggtgacgatcatgcttgcattcgacccgcaagcgccgtagttgttcagcaaggccgtcttcctctcctcctcccaggcccgtagtcttgtcacaacctcgatattgtcgtccgccttgacggggatcttcttgttcatcgtcttgaaactcgcttgcggggggatgaacccctcgcgcatcatcatgattatcttgacgagcgcaatcgccccggacgcgccctctgtatgcccaatatggcctttgacagacccaattggcagcttcttcttgcggcttggtccacccagtgcagcaaggatgctctcgtactctgcaggatcgccgacgggcgttccggtgccgtgggcctcgaccagcgagacgtcgttagcagtgaccttggcctggcgcatgacgtccttgaacaggtgcgacagggacggcgagttcgggacgaacaggggcgtgcagttctcgttttggtacacggcgctcgcggcaatggttgcaataacctggttcccatcgcggagggcatcagacagacgcttgaggtagacgaatgcagcgccctcagcgcggcagtatccatcagcatcgtcgtcaaagggcttgcactggccagtaggagacacaaagctgcccgccgcgaggttctggaaccagttcatgtttgtgaccgtattggacccgcctgcaagcgcagccgtgcactctccagagagcaggttcctgcaggctgtatggatagccaccgccgaggaggaacacgccgtatcaaaggtcatacaggggcccgtccacccgaaatggtggctgactcggccggtaatgaaactcttgagtgcaccagtcgccgtgaacgcgttcgggtcgtagcacgagatgttatgctcgtagtcgacaccgcatgaacccaagtagacaccaacatgcatcttgtcacgcccgtccggggtatacccgttatggtcttcgacaaagtacccagactgctcaacagcctgatacgcagcctgcaggacgatgcgactctgcggatccatcgctgccgactcccgcggcgagcgcttgaagaatttgtggtcaaaggcatcgccgtcgcggaagaagcacccgtagaatttgcgcttcgggtcggcatctgcgttctcgcggaagagcatgtcgtgcatgagtctgtcccgggtgatggggatatgctgcgactggcccgtcttgagcatggcgacgaactcatctagatcgtcggctccggcggtcttgacggacatgccgacgatggcgatgggctcagactggggcgagacgggcatgactggctcgacgcgggtggtctgctgctgctgcagttgcaggaccggttgaagctggggttgtgggggaggtgatgattgcggtgtaagccagaatgaaggcttctcagggtctttgggaaggtcttcgtaaaagacctgtcttcctccgagagttctcatcagagttggagggacacatctctccaggccaaaggtgaccacgtaagggtctgggagggcatccgccacggccgagaaggtgtcaaaccaccggcattgctgcaccaggatcgaccgcaccaccatctcagtcatgttccctgagccagaaaccggaatgcccgatccctggttgtcgtaagtctgcagagcgagcttcgacacctctgcatactgcagcccaggcagagaggcgcacagctccaccagggcattcgtatgttgtttccgatcagcattggggctatggatctggcccttgattccaacctcggccaccgtgactcctgcagctctgaggcgcttcatgagcagtggcgcaattgtctctgaggccgtcaccgttgcccgcgcctggtcataccggacagcaacatacgcgtcgtttgacagatccccaatgattcggttcatctcgtcctcctgtttctggcccgcgccaggcgacggcgtaggacgctgaactgcccttgccggatgccttgtcccatacttcttgcgcgtcgatgagagcgccgatgagcatcgccagccggacggcgacggctccgtattcctcgaacccggcctggtttctggcgctagccactgaaagcgcagcgagcaggccagcgcagaagcccaggatgaccgtcggcctgctgccggactgtgtctgctgcaccagctccgcctgcagatctacggctggggcactgccgtccctgatcatctccagatgccgccagtactgcgtcagctggattaacaccactaacgggccaaccaagatgctcggcagagactcgtcgtcagaaaccgagagcccggccgtgtcgaggctgtgccgaagccatctgtccagttcagacaaggaggtcggcccgtcgatatcgcgggctatatcaggcatcttggctgccaaggcatcccagtatgttggtaggtcggcgattgtgcgcaaaatccagtcgcgttgtggcgattgtgagagtggacgaacgagcttgtccatggatgcctttgtgaatgtaccgacatgcgggccaaataggaagactgttgaggcctcgtggcctgacccagaggcgcttgctcgggtcattgcgggagggtaggagggtaggagggtagctaggtagttgatagtgctaagtgctctgccgggtcaactgtgaatgaatgaggtgtagttgagacacttgaggttgactttccaggcgagcgagcgggtcaagagagcagagagaatatgatagactgggtgtctgtagta

SEQ ID NO: 4752 - DNA, 6866 bp, Emericella nidulans
ctcattcggtcccatgttatgtccgagcataaccgcaagaaaagactcgagacgaataaacgatacaagagcaagacttggaagcatctcgcgttccagccggtggagacgtccgcttccagctcgtcgaccacctctaccggcgcgacggcgtctcccgccgagctgtcccagcagccttcacgtacggcatcgcggcactctccgcgtcctggtcaacgttcctcatcctcctcatcagactcgccgactccagaagaccggcctataaatgaagagccggagcatgccgatgcgggccctgaatattctgtggcatcagagggcccagtagtcaattacggtgttcaggacgggagccaggcccttgctgttgtcccggatccgtcgccatatacatatgtcggacaagggacgggtgatcctttcaatacgatacatacaccactttcagagcgcatgtaccggcatctgcagcactgtaagcatggcgatctacacattatatactgtgctaacaatgacagtcttgtgcaaattgacgcgactcgcatatccactccaacgtcggtacggcgcgaaactagaggcccattgggcttcccttgtttcgcatgatccggcctcattgcacgcttgtatttgtgtcgctgcaacgaattccgcactcgaatccggcgagttcccattgacagacgagaagaaagggtcgagcgtgctgcttctcgacacgttccaccaccgcggtgagactatccgactagtcaatgagggcttgtccgatcctatcaaggccgctagcgatgagctgatcgctgcggtgtcagttttattgacggttgaggtaaggcacttgcagccacttcttgagctctgctgacagcacagattgcaaccggtgacccagactatctgaagatccacctcgccgggctaaggcagatggtcgggatgagagtcagttaagcagacgtcgcggatgatgtccgatttcagatatcatggtcagttttctcaacacatctgttattcatcactaacatcaacaggactgatatccgagttgcttgcatgtccttgaccaaacctatctttccattcgtccgctatgcccgcccaaagaactttaccattacccccccaacaaaggagctggaatcgaccgcatccagcttgatgagcttgaatcagatacccggcgtctttggtgatgccatgtccaaaatcatctacgacctgacggatctcgtctggtacgcggagtgggtcaaaggtggtccacaggagcaagactttgacgaagaaaccgagtgctactataacacggaggtgctttacgtcgagtatgccctacacagcgaccgctatacatcgtcaggagaagtcaaaggggacgcaacaatcgaaggctgtgtccgcctggcgtgtctcttattccacaacaccgccatctgggacttttacccgcagatcgcgccagtattccccaaaccgataatcgccctgcagttggctcttgagtcaaccatccgcgcaggctgctaccacctctgccgcggcctgctgatttggctgcttttcgtcggggcctgcagcacccggttgccgaaccagcggccattctttgtcaacgagcttgcttcagcggtgcgcctccagggcatccagtcgtggcaggagctccgcgccgtcctgttcggctacttctacgtcgaccggtgctatctgggcccgttgagggcattgtgggacgaaatccagacgacgccggcttcgcatcaacattgtataaacggttgatatgattatatatacaggtatctatctagctaatgagacatggtatgagatgagccatgtcgtgacgaatatactataccctcactgcgcatcgcatcgactatattaagtggaataataaactacggagtgaagcttggaaattggaaccctacaggatctgcctgattaaatagcacagaagatcagtcaataattctccaaacaatcgaagttggatccatccaaataatccaccaccgacggcattgtctccacggcccatcgcagccaagcgatcctagcacttgcctgcagacgcagctgtcacctcgtggcccttgcacatcccgtcagtccaggtaccagcctggagctttctcggacatgacctaacccgatggtggcccgtcggcatcccgtcccgtccacgcccaccggcccatccaagtgttagtgataagtacatactgtacttggcactttgacatgtaaaaaaagaagccagagaagaagacttaacaacgtctgaactccttggccattaatgattaggggtcagtcagcccacattcagtggccggaatgccgcgtaaaaaacagaagaatgcgttagcatcgccagctccgagctttcgccgaccgagtttcctccgtccacgcaatcttggcgggcaagcaaataatgcctcacttgaggcaccgagaaaatcccgatgtatccccaccgcgggaaataatagttatatctatcgctttttcccttccctctcattctcttctctctagacccagcctttctctttttttagtttgttcccatacctgacattggattgtttatgtcattcgaaccctactatcagggtagtggcctggggttttatctgtttactctgctactttgcagagaactatattcgatcaaatgcagggaaacatgcttcgctgagatgcgaagtatgccatgacaggagcttgctcccaggcaggcagcaagagcgcacattgcaaatcctgacatgaatgtgctcgacaattcccgacgcttactgacatgacgcacctgagcttactatcctgtctaggaacacatccaggaccaagagctcgaaggataggattggaaggatcaggtgggattgaatcgttacaatttgattaaactgaactaagactaatcaatatattaagggcatcgataggaaaccacaaagaaaagatttcatataccgcaagaccatatacatcgctgccaagaatgacgaaaccctataccggtgtttctatccaaaatcacggttctttcgcaacgacgatcttacgttgggtatcgacgagattattgcagtctctatactatatctgcaagtggttgactgtgctccacgaccgcgaccggaatagcacaaaggctatcccgttcgttcattgagcgaacggcggagacgaggggtttaaacagtctcgcgctcggtcttctcacgacgagcacgaccggtaggggaccacgggaagtgggcgacagggatgatgaagaagctgttgctgctgtcggcaataccggcaagggcgttgtaccaagcagcaaaggcagccagcagaccaaagaaaccaccggccttgatgacaggagggttgggctggccagcatcatcacgctggatgtaaccgacaccgagaagcaggaacgcgaggtcgaggaacaagaacagcaagaagaaggcgacggtagacctcagggtgcagaaaagcatgatggtggtgaagatgaaccagccctggggacattgtcagcgccgaacggtcatgatcgtattgatgaaacactcaccatgaggaacaaaccgaacgagttgtagaacatggcctcatcaccattttcagccgtgagcgcggtctgaatgttgaaaccaccgggagtaaggacaatggcgaacgcaatccagaaaccaccataagaggacagagcagtggcaccaaaagtgtttccaacggccatttccctgctcatgattagcttcctggctgaacccgcgagactaacagagaccgcaatggcagcacttaccacatgccagcaagcaactgaaccagaccaccgtaaccgaagccagagcaatgacaatgttagggtgggtgatgtcacgcgcacccatgttgatacagctcagcacgaaagtggtgagggcgaaagcgctcaggccaaggggagcagggttggcaaacttgcgcgcctcgaccgacttgtacagaccaggctggaactcaccaccgaagggtgggaggatcgcctccttggtgttgacatgcgacagaggaccgtagccaaagcgcgatcggtgctcctcagcagacataccagcaggaggagcgccgggcgcagcagccggcgcgttaggggcggcagccgcaggggcagcagggccaccgacgtccttctcaagtccgtgattctgttcggccgacatgatattgattatgcgattgtactttcaaggtcagctttttgcttttttgttgttttagacgaaaccagctagctggagatcgaagaggaagaggcttagctcgaagaaaaaataaggtaagagaaaaaagtggcgcacagcacagctggagcgggtcaaacaagagcactggtccaacttgttcgaaagacctggggaaacagaacaaggaagatggggagaggaacagaggcagagcgagctgggcagggaggcgaggcaataagtatgcatgggctggatggacagcagtccggacgaacgcagggttggcagcaacttacccaaacagggaggaagcaccgttagttgatcaactagctcgccttccgttttgttttggtttgatttgattatttatttccccgttggaagaagatcgtgcgaaatcacccagttaaatcggacaatcgttttccccagtggccgctcgaagtggaggcgagggtctggttcaagttgaaaattgatgtgcgtgcgatgggccggttgctagcttgctatccacaaaagggatgactggagacgcttagagtcgcgccgggtggtttagcagcggttagctgaactctgcgatcgacgagatatagtacagtcacaagtgataccgggctctggaggaggaactcgaacactgatctggagagaaaaacaggcgagtagcaccagaccggcacggggtatccttagtagatataggagctggaagtgccctgaaccgtgggccagccttcttaaccccaaaggagagtgcggagaaaacagcggggggaaaggaaagagacgaagggtgaaaggaactgcaaatcatttcggtgctgagccgagaactgagtagtagtagcatggctcctcaaagcggcaggtcacagtgtgttctgggttggataatcctggacttcgagtttggtataaccacaaaacgatacaaccaaaattaccgtccatgacggcagcacaaccccagacagaaaaaggcggggcgggcttggtgggggatgtccggtgcttggccaataataagcgtagccatttatgccaggatttatggttggctcttggtggtccgccaagaatcaatcatgacaaaccgtacagtcgtacccgtacgccaatgtcgactatagacgccgcaagcctgtgctggctgttaatactggtctgtcgagtttggactcgtctggatggaactcctgggcctgggcagactcattctgttacgtagctacagccggtttctgattcgatcccctatagacgccgtctcttcttgattatagtctgatacagtctcagtaggtacagttgggtaatgtgccgggacttccgcagcccattagtcagcttcccgtgacccgtcacggagaccggggcgtcatttttcgacttgtgttggatcgacttgccgttgcagttgtacagaacacagctcgttctccgcaacgccgatccacaatttcgtcgtggctcgcttctacgcatctatggcctgatgggagactcccatgcagggcctctccgagtccggagtctgctcccgccagcctgcaaggagctctggaattgggcctagctagttgctgatgtcaccccagtcaccagcgccacggacggacggccggaggaccggctaatttggaagctgacgctggccatggttagttgcgtgggtctcactctactacctcggtttctccctaagctaacccaaaagcttgactaccagaggggcgattgcaggtgtggaattttgaggattttttccctcgcggatcgcgtagttgacaggaccgctcggtagatggagactgccgtcaatgccggcgctgtcccgcgtcgatgatcagagtgttcaaaacgtttaaacggcaacgctctcccgcgcgttcatgttcttccgagtgatcggccggccgcaatttgaagcgattcaacttctttcgtgcttgaaactgagacggcgcaggcgaattaatccaccttccaaaagtccaggcgcagcgaggctccatcgcagccaggcgcgggaaattagtcgctgaccacacgggagacaggtccagtgtcagcgtggcaatggggcggtttccgcccagaatctgcctaaattcgtcaacgctttgtctggttttgggctaacctgatattatatgtgctaaaatctaaatccagtcgcagtcgatcgagcgggagtatgcgacaacgctgccacaaattaagattacggtttcacttgccaaggggctctagtatcgcatcaataccatcgcattgttcccgtcggtcggacttgtaggctgcttggctagctcgaaactgtgacagattgacaggagtgggatccgcttctaggaacatattgcagcttaggaatctcatcaacctcgtgctgaacaagaacggtttgccgtctcgttacattgtcattgccagatagcttttcagtgtgactccttacctttgttcctcactcctgagtcctcctgagtcctaccacactattcaaataaaccgccgtccccttgctcgtactacgctgcagtagagtccactgtaagcaaggagtagacatttctt

SEQ ID NO: 4753 - DNA, 3595 bp, Emericella nidulans
aaccgccaaagacgtgcaaacactcatgctaacccgcttcttcacgggattcttcggccgtgcgccagtcacaaacacaggcggcgtcctgggtgacatttggtcagcggaggagcgcggtgctgcgatcgtcggctatgccatggctgttgtgggcggtcccgttctaggtcctattgttggaggtgcgattagccagagctatttggggtggcggtggacgcaatacgtacgtaccgttacctatcatgaattttgaatagtgcaggctgactgacgatgtttcaagataaccggcataatgatgatgctcttcctgacgctcgatgtcctctacatcgacgagtcttatccaaacacgctcctagtctataaagctcgccgtctccgcttcgaaacaggcaattgggctctccacgcccgccacgaggaatgggacgtgactcttagggaactcggaaacaagtacctcattcgccctttcgctctcctcgcaacacccatctgcttcctcgttgccctgtacgcatccttcgtctacggcatcctctacctttccctcgcttccttcccggtcgtatttcaggagctacgtggctgggatcaggttgttggtgctttgccgttccttgcgtacttggtgggcatactcttcggcgcgggaattaaccttgcgaatcagaagttttatatctcgcgtttcaaggcgaatcataatcgtccggttcctgaagctcgcctgcccccgatgatgctgggttctgtagtcttcgccgcggggttgttcatttttggttggacgtcccaggtagatatttactggtttccgtctatggtgggtggagcatgcatggggttagggtttttcactatttttcaagcggcgctcaactacctcattgatacattccagactgttgctgcgagcgcagtggcagcgaatacatttctccggagtgtttttgcaggctgttttccactgttcgcgacagccatgttccgaaatttgggcgtgccttgggcgtctagtgtgcttgggtttgtggcgattgcgctcattccgatcccgtatatgttttatgtgttcggtcccaagattagggcgaagggaaagtggtctcgtgcatcggtagattaagtgattttgtctttctagcttcgtttcgttcataggttattagggttgatggagggcttggtcttggttattgaactgaagacgaatgatggaatgattatgattgcattagcgacagtccatgcggatttgcataatacccaggagagttcgatacatatttgtatttcacagaagtagataatcaaacaagtaaatagccaaacaaatggaacaacgataaaagaatgtttatctaaagttaacacatataagaaatcaaacccgcgtacccagacccccaagcctggtgattttcttcgccaaaactctcgctctatcaagagcactccactcgctcttcgcatttgcagctggcaatggcaatccctcctgttgttgcctggaagtagaaacattccttgacgccctagcgtcgacaggcgcataagccggtgcgggcgcacgatcagagtcaacaccagcagagtcacgctttgtcatattcagtgccaacacagccatatggccaaggaacgtagaatgcgccagaagatcctcaagacggatatgcagacctgtttcctgttccagaatccagacgacctgcgccacgttgacgatgtcccgcccagaccgaaaaaggaggaatcgagctggtatgagcttggcggtttgcctgtgttcaatttaggcgggaggacttgctgccagatacgggtgataaggtcggagtgtacaaggatcttagagaggctgtggttgtttagggatgagaggaggctgtcagtgctgccggtcgtgggtatgtcttcgacgagttggggtggtaaggagcggatggtggatggtgaaggcagtgcgacgttaggattcgcgactaggctctgtgctgtgtcgcaaaccatgtctagaacagtggagacgaagcttggatggatagggccctttgttgagtaacctagggcaacattgatctgggcgggctggccagcaactggtttagagaagagcgtgaggtctgtgagattgtcaattacaccgacaccgcccattttgtaggtattgttgtcaagttgcatgtgtccctcgtaatcgacgttctgatgcaatacggacgtggtgaagaacgtcgactccggccagtctgtacagcggcggacgatctccctaaaccctaacgactcgtaggtcatgttcgctacttgctggtcctggagaaagcggaatagatccagccctgtccagcaatccttgaaagtaaccctaattgggataaagttgaggcatggtccgattgtgttttctgctccgggaaccgcatttcgtccgttgacggtgaggccaaaaacgacgtcgtcctgggcacagatctttgcaagagtaactgcccatgccgattgcataacggtggcaatggtgacattctctgtcgcagtggaaggtatctcgatgacctttgactgctgcgtgaaacctcctatatgttggaatgtgttcggcctgtcccgctggacaatctgtgtcatctttgaccctttaagcaggtttccccaatgctggtagtgctcaggggtgatgtttccaggaagaagtcgcatatagttcaagaaagatgagggcgaaacggggctgccttcgtaggccatcttgatggcagtcatgatttttgacaggcagacaccatcgaattgtgcgtgcgacatccgaacgagtatccggtgttcatcgctattggtcttccgcacaacgtagaattgcacgcattgttgaccttgtcctggagattgttccctgtctcgctgctgcagggagttggtgtactcatccagacccttctccgtctcgtggacaaagatatccggcttgatcttgcgaaggaccacctgatagaattgcccatgaaaacacacgaaaactgttcggagaatgtcgaaggcgtcaacaacacgcaggaaactctcccttaatcgccgaatatccaatgaacccttcccgtccagatagaagtaattcaacatccacctcgactcaaacatagtcgccgtgagtgaaagagcttgaaagtctgtcactggtagaacatcgacgatgccccctttgaatacgccaacctttggtgagattgctgctcgcagggacgtatcatcgaactctagagacattggtcttaagatggagatatcttgggacgattcgcacttcgttagtatgggcttatcttcaacccgtttctcaatgctgtctgcacgcttctccgtcaccgttgtgggaatagacttcttcctgtcattgatcagggccatcatattctcaaatacagggttcttaagcacatcagccacgctcaatttcagtccttcatcccgtgccgcgcggacaagtcgcatcgctgtgatgctgtcgccacctaatctgaagaagctgtcatggtacttgacagggtgcggtggcagccacagtgtatgctcccttaaa

SEQ ID NO: 4754 - DNA, 8782 bp, Emericella nidulans
atgtatccacacctacgatttaggtgacactatagaatactaggatctcattcttgttgctgcgcaccttgcaccaatggagggtgcggtcgcacgaagaaatgaagattggcgtagcatggtcgaaaggctggtattcagcgactcggagagcagtatcaggcgtaacggcggaaatgaggatgaatcggagacggaggcattgctatccagctcctcgaacgcggccgccaaatatccaggcatcttcgcgccttcgaactacctcttcattggaggcgacctgaactaccgcactgcagacaggattcccgccaaggacgaatatatgaaatatccccaggcaaacgtcgaaccagacgacccactgcatttctcacatctcctgaaaaacgaccagctgaagcgcgaaatgcaagagtctcgctgttttcaccgactatccgaagcccctattacatttccaccaacatacaagtataaccatgacgcacaggtcgctgctctcgatcctgcgcacgccgacaagcctgcagagtggaaatggtctagccaccgctggcctagctggtgtgaccgcgtgctattcctagaaacccccccaggactcggtgacgaggcaaagatccaagttctaaagtacgatgctttacccgtatctccaacgtcagaccatcgccctgtcgcactcacagtctcgatcccggtccttgaaaggcgagaagtaagcggatctcaaacgatatccccgttccctattgatccaaactgggtgcggcggagacaggtggcgcagagaaaagaatacttggctggatgggtcacatacttgggattaacctgggagggtaatgggctgctgttggcttccgctgttggaatcgttggggcttggttcgtatttcgatctattctgagctcttgaggcctcctaagccatcgctggccagctaggctgcagcaacacagccgtccgcaacggcaatgctttgttggcatgccttggctttacccccacatcttgtttaccactatcggattcattgctggccatggatggagaagcggtgcagtcatcatgcaatgtacgagtaaggtcagccagattctgatcttggtgaaatggtagcctcctagcgtgtaccactacctcagggccgaggcgcagcaaatcctctcccctgctgaaatgccatggagagtcccgcagcacatgaagttgagtagacgtcaataccgaaaggttcggccgagtctctagtcggtaggatgaggtcagccacagcgatatctcgacgaaggctgacatgactgtgattgtttcgctgtattgggcaatgatatcgcgcaaacatatattcgtgcatggcactgccaccatctaaattgaatatccctggtttgatgcctggtttgatgcctggtttgatgcatggcggtgtttatagtaatctattttatgcatgcgagtcttgtcaaatccgtaactatatatgcataatcacgattcagcggcctaataaagtaagatgcagttatggagacctattgtcgatctagatgcgcaagagcaaagcgtcaataactgtatcaatattcacacaccatggccgtctcacgtcagatattctcggcttgccaaccatttgcgtctaagtacatcaagaaagggccaggctagacaaagccaaacgccgtcaattgaggctgtgtaacttactccaactgccaaaaaaatctgggatttctggataattcattaaacgctcgcggagctcttttaggtgcgaggttgtttaagcagtcaactaggtagctagtctatgttgggtactcactttggagttctatacgagaaagatggaagaaaggagctcagtttttaacaacaaatgacgtggtacgatcatagcggtggatcttaggatcctggatgagtagggtagatgcatggatatggagcaggtggctaggtaagcaatctcctaaaactgccacaacgcggtacgcattaagacaaaccgcggaaaggccgatgtaacaaagatccttgtagagccctatcctctcgacctgggtcctatatcctaacaaagcacggagttgaagttccgccctgatctggtccgtaagctagttttccacggctgggaagggcccacctcgagaacggcctgcaaaagtgacggggaaagtatggaggctaagttctgtgcctgcgactccgtatatgtcgttcgatgcggatcgtcactccggagatataggacaagatcaataaaggataaagagacagtatcgtgagtctaacactcgattcaccgagccggatgccctctggaagattcgggttggagacgtatatgactatttctgcccataccccacggtaatcgactgtccgaattttaatgataataacaacaatggatccaagaggacaaagtatttgccgttttcttgagctgcctttggcaagattggactcggagttcggacactaggaaaaacctgcctttgacgggcatatgttctagcccccaagtctagacatatgcttcgaaggaatcttacgagctgttgtctcgcgcccctcctcccaagacatatgtcacttgttgcccatcaccgactggctgttatgccgaattttccagtcgtagtataccttagtatatggatgcatgtgcatgtcggccaagatattgggcattcaaacagtgactcgatactgatggcacaactgacggcacaagtctcaaggatgtacgacgcgtgtgataatagctcgtgctgttaaggaggtgaatggccattgacaagttttcaacataccccatggggcactagagtattggcagttaggcttacctatagtatcggcgcgacggtcgggaataaggcactggtgtttgctccagttgtccacgttagtaacccgtcctataaggctagcagaggtgatcgtcggctctagatcgctccagatctacatatcagcgatgagcgaaggattgacgcattggtcgcgtcccaatatagtgtcgactgtcaaaccatgggagttttgaaggtcgatggagatgtcagaagttgtacggagaaaactacagagtatttacctccatctagggaccgcgagatcgcgatgcggcgggggcggtttctgacagcgctgtccatgcctcctgcaataatatgccctctcgttacctctagattctgattcgcggatctcatacttccaccttaacttgcgacacagggggtcgctagatcggtaccagtgacccaaacaagacccgcctgctggtgaatatgcatatcattcatgtcggatacctcggaggggagcagtggggggctgtacgcccaagcgttctcgcatcacttgcatatagtactccgtacctaagcctccggatgaccgtaggggtagcctgaatgagtccagcgactccaccaagacggcgcttttctgccatctgaaacgaaagaaaaagttgagtgctagcatgtgctttgtgccaaggtagactagggtctattttccgatgttggtcctggaggacaacggcttgcttttctggggacctcagccatatatcgcacgatgctgtgcggtatgtagcaagcaaaaacctgaaattgatggcgcctggcgggagagaggatgtaagatgacgaatgcggcgccggtgtcagagggatatggatgcttgctaaactcactctgaactctgtagccacgcatttctcccattcttcccttctccgctctggtcctcgggaacctcggtagcttccatcatagattctagacttcataggagtcgaggagattgggttgaggaggatgccgaacgatgaagaaagttctgtaacggtgtcggcaatgttgcaaagcagcaaccgcaaagattcatgtcggcacatgacccctcgctctcaagtgaccacaaacaaccgcactcacactcaggacggaatctccccgcctcgcccacgcatcagcggcacaacaacagagcaacatcaccggagggcacaaggaagtgccatgcacgtcgacggacgcgccggtgcttgaagcttgtacgatctgcatgcatccacattcctactgaccatttctcattcatacgaaacatctgacttgagaggcacgacatccgcttattatcattggagccttgggctcgctcgactaaccctgtcatccatggttatgataaaagtcaggtaatccgagattgccgcccagtggactattcctcgactcggctgtgttctgcgaaccaatcgactttctactcgctgtttaggtcgccggcacggctctcaaaggaaaatggcggaaacgagacgcaccgaaccataagaccaaaacggcacaaaggatacaaacaatgggggatgtactatcagattgctgatcgagttggcggatcgacaggcgtcatcgacacctatcacaggctacggatgcccagtggccgggcagtctcccgaacgcaagtggcacatctgtcgatattgaaaagagcacaaagtgaggcccgtcccgagtgttcaatcattggtcgcgcttcccgcttattccggcaaccgaatttttttttacggtctcctgaccagactgactcctgattcctgcctcctgagcccgggagtgcaggtcaatggtctagcctaggcagcgttccagaaacatcggatggggccagcgcagctgcgatgtttgggtccgagatctagaagccaacggtttatggtacggcctcctgcctcatctatccgaaaccccgaaggctatgttctggaaccaccaaaattctcacgacaaccaacatgcttctgccctccaataatgcaaccgacttgaggctgtgaggattcgtatacggcttcagcctccctgcaatcaagatgatctgaaatgcctgccaagtctgcgagtcatatttcaaacgatctagccgtttctcgatcattctcgggagctgatcggcagctccttgcgagctctcctacttccaaagtcaccaaataaacctggataaaaatgacaagagatggtgccaatggtggtccggggggacccgaaaacctggaccagggcggaaggcacaaactcgaatcttagtcggatcgagtgggacggaccatgaatcctggctcttgaatgcgattttcgcggctcagcgcagcttgccgtaccagtaagatcaagagtagagtttgccgagcaacgtcctggaatctccctgccggcagtaggagcatggctgccaggcatgacaatgccagtaataagcaataatatccagaataacacggaacattaagaggtggcatggccccgtttccgcctgcgacattattcgctctatattatacgagtcctcccatcaattcttcgcgttagtgaaacactcaacactcaaccgagagcttgcagcaagatacttaaaccagcacatctcgctccattttgagctccagaaatcaacattggaattgctggtcaaggccttcttttcacttcgtgaggcaacaccgcccctatttaccataatttcggcagcagccagtggcgcagcccaacgtccccagccagactaagcgttagctctctaggctgcagtgtggtggtccattcctgcaacggcctcgatcttgacgtaatagtcgtgtggctctctcagggattgacactagctcgcccttccattcttcttttccttttcctttttcatccttcttctctcccgactctaacctgacattttattgtcgttcgttccttatctcctccttccgctcctttcttgacctctgtcgttcctttgaacccgacaccctctctcctagccagctttaatcaagtctcccttgacgggataacgcatctacctaccgatcaactcaccaacttcaatcacttcggcttattggatcgccggattcgcattaccgatctaagtccatctattgttcgaactgccttagtcatgttctcttgcgccaattacccccgcggctgccgtggccgtgtcaacgtatcgggaggcaaatgccccgactgcgtggtatgtcctgcgtctacacttgcagttattaggtggttcccagtccagagctaatggaagcaaatctagcaacttaaattgcgccgacccggctcctcgtcgccgttcgcccaaccgagagattaccgccgagcactaccatctgaaatcctgcagagctcgccctacaaagaggtgacacgagagatggtgtaggccttgtcgcaacataaccaccgagacagactgcggaatggacgcagagggacccctcgaccctcaaccggattgcaagggtcctacaggctgggaccagtgtcaaggaggctatactgtgtcctttttcctgtctttctattcatttctctcacttgttcttcaatattctcgtttaattgatgctctgacttgatgcattgctggagttcacatataccactcggagggaggctatctcgatttccgcgcatacctaggtccaggcggcttgctctgatttctttctccttgtcgactttgcttgatatccttttttgtacatccctcaagcggagccttcgttgctctgccatgctttcctatttcttgttctaaatggtggaaaaagaatgcaatccatgaaggctgttacaatgctttcaaagctatgtttctgaatctgcgaagtccctcgtaaggttggtctttttttttttttaaaatgcctggagtttaggaccggtcaagtcacgattttcaactgtcctgagttctgaggtcacctagcggaactctgccccagcaattcccgacagacccattgcgctgtttttgtgtgcagactccaatatttttcgtcttcccgactctcgtactcttgatgatctttattattggatgcttgccctaacgcttcaaagatcaccagctggtctctcatatactcatcaacgcaaggtcggtgccgtggaagctctgaagcactagattgagtttgcaccaatggatcataaatttctccaatgaagctttccacacaatcatcaaccagtctctccactctctccctcacatcttctccctgcttgttctgacgtctcttagtccttggctgttcactcaaagaaccgtacaatgaatcacgtccgattttgaatcctgttgacgtgtgggcgacaatcaacacatataaacatgatcgacgatgcgtggcttcagtggtatgggtctcgattgggatcacatggggtcttctgtccagactagcgccctcgagctgagggcggaggaaaacatcgcggggtaattctttcaggcgacggcgaagcgttgcacggacataacgctccgtgaattcacgtacagttccctgcttctcattttcctcgagctcagcagcaacatcttcccaaatcccacgttttgaagattccgactttgtggttcccgccgtgtcggtaacgagatgatcatcaggggcgagcactgtaatgtcgatcttggagattttcccccgtcggcaccggtgcagatcaattgaggggtcatcgtggctggaagccccgccgcgtcttctccgcagggtattgatcgtaaagatcaccttgcccaagtgcccttgactcgatgcccaaccacgcttttccaatcgcacggaaatcggcggcagtccaagccttgcgaaattagggatcagcacctgggaaacatagtcgtatgacggggacgacgatacattggtaccgccgacaatgctcagacgaatttgctctgccgagtcggaatacaggagatatggatacagagcctggaacactaggaagacagaccccggagtcggcaggcggatattgatgtcggaactggtctgaggaggtcgtccttgctcttgtggaggagggtagaatcccactgagcatgagcccacctgggctttgacgagtgtactgccgctcagctccccgagagccttgatcgcggccaggtgagaggctttgaggcctcgctttccggaccgattgcctctaacgtggtcgataacaacagccctgcctgttagagcggacaatgcgactgctatgcggaccagttggccgccaccttccagctttcgcccgtcaagtcgaactgggtcagagctctgctcttcagccatatttgacgttcagctcctaaagctaaatgttggcttaattgtagagcgttcgtcgataaataccatttctaagggctttgttttactttatatacagttaaagtgacttgtgcttcactaacactttgtacgatgactctggtagatgactcacaagcaaacacagccacttcacaatcttttagttgaacgcattccaagtacacaacagccatttttcattaagccaataatgcttgagatttttatgcatgctttctggtcaaatacgacgactgatcatgaccgggtgggacactatgccgcctcctgcgccgggttggtatacttccatttcgggaaaccgcaccagatgcgcgtcaacacatctgatcgtgctcaggtaggaacaccgcccttcataccttccagacgaagccagctatcactctggccgtcttcttgccagtgtcgacaaccagctcacctcttcatcgcatctcattgactatcgcgcatctattttccgaaatagatctaagccagtatcatagaactcgcttgctcgcagcatgagcgcacaagaccgcttgcgaaa

SEQ ID NO: 4755 - DNA, 3909 bp, Emericella nidulans
ggcgctatcgatccgcaccttgagctgggctaaacgatccaacgaaggatccgagctcatctcgatttgattatccactgctaatgctatctatctcaatctttcgaaattccaaaaccccctcacctagatccggataaccctcgaaagcgatcctgagaccagccaacgcagccatctgtcgccactccgcgcctgttctctcacggcccccgtacagtgctatcatgctggcgtgcatcaaggcgtagtttctattcttcgagaattcgtgcactagcagtcgcgagtatggagccatcgcgtccgatatcctttgtaataaccgtgctgcattgagatccggcaaattatggaggatgtgtgccagatggtacaccagtgcccccttcacaggctgcgggctgctctcgtctttgtagttccagttgacgaaggtgacctcgcttcccgggtcaagtctcaaatcgttgtcggactgaaactcctccacgacaagatctgcagcagtgaactgtgggaatgcctctttgagttcaagaagcaactcgcctcgacctccgccgatatcgaccatgactgttgacgttaaagggccggcttcacgagcaactgctgcaaagtcatagccaagcgcctggagacggtcaggcgtttttctgggcttgaagaattttccctgcataaactggttgaaactatccaggcgtccctctgcggccatgattgagtaggtatgctcttttgcatactcggtcttacccatgagctggtacgcgtgctggactggggtcttgcattccttgaaggggtaggcgaagttctcggcttggagcttggacatcaggaatgccccggcgaggagcgcttccgttgtgctaattgagccggttaaacataatcttatagggaaactagccgaaagactcacaaatgaactgccccgtgggctgccgaaggcgaaaccgctagatgacgggtaagatcgttcgccctgtagacgtcctctccggctagggctaccagacccagaccaaccatggcaaaaagggtatcctctgcccgtagattagacgcggcgagcctcatagacaattagtgagtcttacgaatcaaggggacagctgcccagattcgtttgctgcggtcagtgaactgggtacgatttacggggtatgtaatgtatcacatacatggaataatggccgatgggtcagttgagccgtgtatactcttgtagagcgcctggacttcctcccctgtcgctggtctatccattctggccagaacattgaacaaatcaaaccgcacggcaaccgggacaaaacccagagcggccgcctaccatttatccagcgtcggtcaattttcacggccatgtagataagaagggagccgactcaccggagtaagtgtcttggccaagagtgcgccggtggcgggcgaagacattttataaggctttgttgggcttgggtggttgagatgccagaacgaacgagcaaaccgttgaaggggaagcacaagtcgctgagaaataagtagtagtcccttgtcgatgcatattaatcagtctttgcacttctgctcaggcccacccaaacccgagtacattcttgtaattccgatcacccctgctagcgggaaaacgcagctcgcacaactcgattgtggcatctgcatctagtcgacacccacctctaatcgcccacccgcccatattaattcccttgcttagcatgaaacgacggcgtctgcaagcatatgcagcttaatcgaccacgctgttctggcgtggactccgtctcccgtggcattgtctctgcaggcctggacttcccaccgcaatacttcttcgcattgtccttgggttttgcataaagacctaattctctctaccttacaacctcaaacaaagtcatttttttataaacttagcaactcaccctgcgatcacgaagatgagggaaaaggcctccgacccgcaagcgtccgagttaccacccaccacttatacccctccagcagagaacgatgatgagagcaggtcccctcgcaactggagtccatggaagaaacgcttgttgtttatatctctcatgtccagttcgatccttgcagatgggtccgtagcaactgttacgtttccacctatatcaacctttcgctaacgaatcgctgcagaggaatggtctggggcgcaaccctgatcgtcgaacaggcgttagactggggcatcaccgtcgacaaggcggctaccacaatgaactacgggctgctcctgcaggggatcggtgggttgatggcgattcctcttatcgaggcttatggacggtataaatcatttcagctctgccgttcttatcatttctgctaagctaatactttgcacagcctccctgtctggctctggccgcaattcatcaccacttttatggtgcttggtgcgacattgtccaatgactacaaaacgtttacggcctttcggtcccttcagggcttgttcgggaccgtgcctcaggtcgttggtctgccgattatccatgatatgtatgatcctaaaggtaggtttacatttcgtcaaaaaaagtcagatctgtgcttatggcgcacctagattggccgcatatgatcaacatctggtatactcgctgtcactccattcaattttggcaggcttaactggtcacaggggtaccacattcttgattggacctttccttggccccgcgatagcgggatacatcagcgcaggaagcaattggaaagtttcattcggcatgctgaccctcttttacggactgtcgacgatcctcatcttcctattcggacacgaaacttacttcgtgaagggccgacagtgtcagtgcaacacccgcttccaggcgatttttggcatcaagagccataatctccctgtcttttccacagtagctctctggacgaagacgcttgtggtctatatcttcaagtttccgctgcttctgactggcattgccactatggtcaacttctgctggcctattggtttgtctcacaatagggtaatatccatcacgctctaacattcataggaataaccgtaaccgtatccacatttgttgcccagccaccttacctatttgacactattcaatcatcttctcttcgatgggctcctattctcggtggtctgacaggtcagcctcccatatattttacactcattttaaacctctttcctgacaacttgaaccttgtaggcttcagtttcggctacttcttcaacaactggatctaccggtcccgccaggagaattggcgacctgagtatcgcctccacggcgtctggtttgcgatcggtacaatggccgcgggccttctgacctatgggctgacgcttcatttccataaacactggattggacttgcattcggttggggaatggttgttgccgggatgatcgctagtactgtgtacgttaacgcaccacgaaacatgcccaattggagactcataaataggagcacgaatggaagcacggcggtgcaatatgttgatatatgcttgtacaggtctataacatcttacgctcttgataaataccccgaccaatcgaccgtagtctcggcgatcattaacgggtggagaacagcgagtgggttctctgtaggctattttcagcctacgtggatcgccaagaatggccttgctgcagtttttgcaacgcaggcaggtgtggtagcccctggcttgcttttaacaaacatgccgcccaatctgtttggggaaattatcttggcgtttctcctgtttttttttaggtggtttcttaccttcttttcctgtataatatttctctggattttcaatatactacgcattcttggattttgatctggtcccaatgggtaacagcactttgtggc

SEQ ID NO: 4756 - DNA, 2725 bp, Emericella nidulans
gttctgcacattacgcgcaatctggccgtggagttgggccgaaagcatgtcaatgtcacggcaattgggccagggatcgatccgagcaagatggcgaatgggctgattgagatccagggcggaatgaaagatgtggaggcggcgagtccaaacaagaggcttggacgaccggaggatatcgcgggactggtggtgtttttggcgagtagggcagcagggcatctaaatggaagtgtaatcacgacggatggtggagcgcatttgaaggggaggatgtagataccttctgtggccaggccactgagttgggtttgggaagccgaggagagtggtagcttgtcactctatctagaactatcagacaacaacgactactagacttctctatggcctcggcgcgctaggcaagcgcggacccagtatcaagaaccaagcgtctttttacagtcgataaacccacaagttgccataataggaggtatccaattcaggaagcatatttatcttcgtcatgagcacgcttgaagataaaacgagacaagcagagtcaagaagccctatctcatctatagattctagtcaaaaggagatactgagcaggatgctagcacccgcccatttacagcttaatcccacctccactgacctcaattggaacaccactcttgaatctttcctccgctaccccccagttcagcaccttccacacaccctccacatacgccgccttgttattcaaatactgcaagtaatacgcatgctcccacatatcaacaccaaagatcgccacaagccccgtgacaggatcctggtcctttgtcgtcacaatgtccagtttgcccgccgagtctttgacaagccacccccatccgctcccctggattcccagtagaacagtattgaaggccttgatgaacgcctctacagagccgaactggccctcaattgcgcgcttcaactccggagcggacgcgacaatgtccgtggcgggcgaattatacggtgccagattctcccagaagagggagtggttaatatgaccgccgccgttaaattttattttttgctgaagagagatgagcaaggggacgttgtttgcttgcgtggcactagcttgtgcctcgagcgaggcgttcaggttcgtgatgtacgtttggtggtgtttttgatggtggagggtcattatctgggaggagatgatgggttcaagggcctatctttgttagcatccgggcaaaatcaatcaaccaggacggtaaacgagcggattgggtattacgtacaccgtaggcgtaggcaaggggtggaatgctgtacttctggctggacatattggatcgatggtgtcttggtagatctcaacgcagttaaggatgactgaagaactggacagggaagaccgtgatggacgaagagggatgaaagacagaggaagagaaggagggagcggggtacgccgtacttatagaccatattcgatttagtcactgggcagaagcccagtaagtgactgaggaccccatgagcgaatatgagcatattacttacactagaggatcacccctcaatcacatcatctagcctgcctggcttgatacctggccagtgaatagactagatgatctacacgaagagctagaatatttcttatatgtattaagctagcagctaatcaaaccctacgattcccctccccattctcagcacctcgccattcccacccctcgcaacaaccgtaacctgcctcccaacaatcccacggtccgaaatattcagatccagtctctcggggaggctgaactcgatctcgttcccagtctcattcatacctagctccgcctttgatgggaaggataataacggacggagctggaattggtgcagaggcggatggatcgatgacgagagggtcaaatctccgtgtcgtctggaaatgaaactcattattagcgtctatctactaagcaactgtcctaatcactgtcatgggactgctccaaggcagaatggcgtggacgagccaagtttggggagagacatactcgattcgtagatcgatcgcctgacatgaccggaaggtgttgattgtgctagagtctttgatctggaagacggcacttgtgtgctcagggctttctggtgtgggttgtcggaagaagagggagtagggttctgagtctgaatctgatagagatggagatggtgataatgatggcgatggggatggtgatggcgaggatgacggtgacgatgatagtgaagatgatggcgatgatgttggtgaaggcaacatcatggcaattctatggccggagcttgctcgggccggtccacacatcttgtctctcgagtcttattgtgactatggactgattgtatggggttttcccttgcaagcagacacgaagtgtgaagttagggtgaactatgacatgtacatgtagacagagctgattgattctacttcaggtccgggcaattgctatatatctaccaaagtatttacgggagagtgccccctatagaccattatgagcagattatcagtcaccaaggtacacatccaccctttattgattgacgaacatggacttcaaggtgctcaaatgtgctcaaatgtagccacactaaactgcattcggctaaacaggtgtgaaatggaccgtggatctgggtgggtttcgacttccgtcagaactcacgtgctatccggggttggttggac

SEQ ID NO: 4757 - DNA, 1792 bp, Emericella nidulans
tgacctcagaccacataaataaatactaatctgcctaactattgtagccgcttcatcaggcggcaatctacctatccattgggggagtcatcatcatctacggcgagaaaggctcgcgtctgaggtcaaagtctgattccaaggtctttgtcgcgtgcgtcatgctatgtcttgttcttcaggctgccggcggagctgtcactgccactgccggccgcaaccaagacggtcttcgtcgcattggtatcaatgtcatgatttccgggttggcagcccaggttgtgtgtttgggaacatttatggtcctggcaggggattatgcacggcgattacgggttttgcgaacagggaattacgctggtccagatagcgctgctcctgccgacttaattggtggtgggtggatatggaagggatttctttggggtatgtcactgctactaacgtagctaattccttctccgacgtgttacatggatctgtttgtggtattaatgacggttggacaaacaatagggcttggagtcgccacccttttaattttcattcggtcaatcttccgcgtcgcagaattaaacgtcggatttggcagcaaagctgcggaataccggggtagcttttatatttctcgagggcgcgatgatggtcatcgcctgtggttggatgagtctcttccacccgggattgtgcctgcgtcgcggtgactggaaggatcccagttcttgggctctgacggagcgcatacacgctccgctggctggtgtggatgagtgaaatggcaaaaagatgttggaagttggaggaagttggaggaagttggaggttgggggttggtggaaataccaaattgggttagtggttcagcggacgagagtcgagcagtagtggcgtatgtacactgtggaccccatctgactattccttgtttcgtatagtaaagtcccattggttggtatatcccaaacctggcctagcggctctcagccaagcataggttgtcagtctcagtaagacttgctttgaccctggttggccggatcgtattgctcagcccaggcgggcatagcgcggccacgaacagccaaaaggaattaattagttttttaatttaaaacatgtttctagtgatcctcttcgtacataaccttcagcactcccatcagctctgctggagactgtatctaccgtagaatctacgcattgcaggtatggcaagaagagcgcataccaaatcacgaacaggttgccgaacgtgcaagtatgtcacttttctctggcaagctgaaaatcaagattaacacccacggctgatctcccacgatcctaacagaacccgccgtatacggtgtgacgagacatggccatcatgcaagcggtgcacgtctacaggacgccgctgtgacgggccatctaatgccccggcccgtcctgtgagggtctccttcgcggaaacatatacgcccgaatcgctcgggaaaatgagaccctttcagaggctgtcggatatcagtggcgaggagacgcggtacgttcagttctttatctggagcatctcgcagggcgaaccccgcttacacaaggggtcctccgtatctgattggcgcccacttatgattcgagcaatgcactgcgaacctgcagtgcgtcaatgtgtggtggcactgagtgcactgatccaggagcgtgtggcccacagctcgctggaactccatgggttcggcacccgccgcgaacaaggggtatgtttttgcgctggagaagtatgggaaggcgcttttgtcactacaagggt

SEQ ID NO: 4758 - DNA, 3026 bp, Emericella nidulans
tttaccagaggtcgttccctagctccatccacctgcgaacggatggttttatgatactttcgtgacgcctcaatccaagaacacactggaacagctcacaacagaatgccaactcgaatcccaacctcatacgacttgccctcctccctaacattcaccctcaccccaccacctcagagcacaccgaaccgaccgacacccaatattgttctcctccttcatgggctcggcgatacgcacacgccattcacaaacctcgcatctcaactttccccttccgagacaacagtactgacaattcgcgcgccgagttcactcccctttgatctgcccgggttccactggggcgacgacattaattttgactcacgcagtgggggcgttggacatggattgcggtatttgaaaagtctaccaagctactcttgaatacagggaacagagatgttcttgtcaagcaagtgcgggaatagacaacaggaaattctaatttgggggtttggacaggggggtatggttggacatgagcttgctcagacactgaacgagcagtccgaatctggttttgagcgaggggaactgggcggaatcatttcagtaggggctccatatcccctctcactgaccggaaaggtccagaatgatgggacggggaaaagccggacgcctatcctgctggttcacggacgggactcggaagtcgtgacggagtctgcggtgaaaaggacaaaggacgtctacagtttcgtggaggttcatgaatataggaggcgcggggatacgatgccgcggagccgggaggagatgataccaataatgcggtttctgggaaggaggttgcgcagttggcagggtgttccagagggggcagtggagctttcctgatttacgaggtgctgaaggaaagccgaaagacggagctgatgactacaggaagatcagagttgattatggtacatgcatatttctgagttaggtatcgggctagtgtacattgttgagcgcatcgcgggcttgcttgatggcatcgcgggcctcatgcgctgttacaggaaaccggacctttccgccatcgcgcacagtcctgcgcagctgttcctccgtctcgcgcagggccattcgaccgttatcacgcacttcttcttcccagaatgcccgcgcgacttcccacttccgctgctgccgtcgcaacgagtagatcagaccaacagcagcgatggtgccggtttcgtatactgatgctgtcggtaaagagacagaggtcagaacggagagtgcggtgcatagtgaggttgtcgagatgctgaagaggactagacgttgcgccattgcctgcagtgatggtactgttgtagtgagaagctgttcacggcttttcgcgatttgagtgggccatggcactttttcttctccctcttccggaggttccacgacagagacggcgacattttgactgccgttgtcaacatttatggccacctccgtgggttcttctgtagtaataaaggcctcctctgatggctctcgcaggccagcctgctcgagttgaccagcggtccagataacgtccttctcagcgcgacgcaggtagctcttctccagaatctccgacgtaatcatgcccacgtcgtcaacgcgccagaacagcttccaccatgccagaccgtgccatgatctagtcgcgaacccttcctcaagcgcgctgcgcagttctgcatgcgatttttcagcccacgcggacacaacctgatccatgctcactcgtacgacatccggcacagaggcttcttcctgttcctgggatcttcttgtctcctcagtcactacgccctgctcggcggcgtcgattagcgacgttattaatgacctcaaagatgtattcagagacccttcttcattccgagcagtcgataaccagtctataaccggctgcacaccactgctgttccatccacgctcgtacagagccgcgttccgtacagactcgcggaacttatccaaggcttcggcggccttgttggtatccacaaaagaaagccggtcatcgttgatagcgagcccggaaccctctagctcgacagccgcaaatatagaacccgcttccttcctaaggtccgattgagcaatcaacccactataggcaagtagcccgtcaactccttgcgcgcacacaatactcctatgtaccggatatcgcaccatattatgccgtcccgtatgcgaggtccggattgtcactgtcggcacaaggaacgcatctgcggttaatcttgctccagacatatccgtctgcgcgcctagacttgtaaccaggatttcaagcctcgccttcttcaggatctgcgacggtaccgagattgtagggacgaggtggttcgagatactctccgacacttctccgtatctgcgcttgttagctaactcactgcgaacgtaaatgtaggatgccatgacttatggcatacctaatcagcaaccccctctccaaatctccattttcagacaccgaatccaacatatcctcccaatcctccctctctttcaaaggatcagccaataagagcctgaccagtttcctcgcggcaacaacatcgttcaaacccagaactacgcatccaacaagtcagcaaagaaacagtccagccagctcaacccaacttgtcgtaggttagagatttaaggcaagatgaacccacccgcaaccctgattaaaggctcctcagtctccagtcctcttagcgccactgctagccgactcagattcacctgctccggcgcaatgctctgaagttgcacgagcgactcgtacacctcccttaaccgcaagggaacatggcgggctgtgtgagcagttgttggggcggtcgagtatagttttgcacctggccttgcaagagaattgagacgtgatattggcgacgatttatgtaggtgcgcttcgttcggaaccgaggagcggacagggctcacgacgcgtggagaggttcggcgctgttgggtagttcgcaggatgacacgggggaata

SEQ ID NO: 4759 - DNA, 4734 bp, Emericella nidulans
  unsure (1)..(4734): unsure at all n locations
acgaagacttcagcaacggagactggatatatggataccacatccgggacgcctttggagtcctgctcgatcctggagagacagtcatcgcctgctgcccgaggtaagcccttcaccaggtgaagcagaaccttttaggggcctttcgttgaccttgcccgcagctccttcttcgtggaagaatatctaacagtctgtgtctcggccgttccatataccccgagcaccgggtgtgaaactaggtggtcagagcggccggtggacatatcgacaaccccggtgatcataaatgggacgacttcaacggtccaattgcttatgccactgacgtcccatctcccatcaacaacggtcgagaccacctttagcagcacggagcaccttttggttcattcgcagatggggccgatctatatcgttcaccagccgtctgatttggagggcacggcgtctgcttcagcaacgggtggatccgatcaagacagcacaagcaatgaggctgaaacacaggcacgaatgccgcgtcggcccttcgcgtgggtcactcacagtctggctggggccagattgctgggctcgcggtggtcctgattctgtctcttctctcgggaatggcgctggttctgccttggtaggcaaatgaatcggcccatattgatccggctagtctgtttttgaatagaaaaagccttaatattatcttctctcagtatttgctgagaatgctgtaagagccgcaaattgagcgtatgcagtttcgtcccttctaccttatttctgcggcatgtaatgttttttctcaggccattttcactcagcgtgcttgaatatgatgttggacgtttccaggagtaggtatatcgagtgagtacccaaatgcgaaactgttctacctgcgatagcccccaacggcgtggtaaacctcaatagaccgccaatatagagcagctggcctgatcttaatcactcggctgatcaggaccactattctaggtggtcgacccggtaagtggctgcgcagaagtcaagaaagctgacaaaataggcgttttgatcgagtgtttatacataagctttgtctggcgtaactctacacgacccctacggcacaggaacaaaattagggccgctcttgacgagatcaaagagtgagctttagaagcctgcatatcgctggtcccacacataaccggtaaaggcggacagatgtctaacgcaggcaggccgagtgcgaacgcaagtcgagctctcccagaacctgtctggggaaatcggtacttccagcagagccagggatagcggaaaagacgtgttttgcaactttgcagagggtccggcgctcgcgaaaaattcttctctagcactaataatatcattcgcaaggctggttgacgtgggatccggcgacgccaaagggtgacgaatccaatggacaagtaggagggctgctgtccgatacatgctggcttgggtgcgaatggacaggatctcgatcgtgctgtatcgctgcagagtcaatgccgagtcgtctggagaccacgtccgaatctgttgttcaatactgtccagcatacactgtggctgtgggactccgtctttccaacgctggccgaagacacaaagattgtagagtatcggcagcaaagaagtgcagagacctgctacacgatcgacaacccttgtccaagtgaccaagggctgaagaacgggaacttcgcggtgcagtaagcaccagactgtgtcccaaaagactggagcaatcgcaatcgtctcaagcagctgtatttcagcaatatccggataccacgggcaaatcagggagagcgagcatcgtaggatcgacatcgccccggtggatgtgacaagtgagtcaaatgcggccagtgcttgcccgagcatcaggaccgcaacagcatcgtggaggttcttgatctctgcattccgcagcttttcaatcgatacggcgccgctcttaacatcgacctggtcttctgggagctccccaagccgtgcccaagaaagacagctgccgagggcgcggaagatctctgcgagcagatggggggagtgccgatggcagtactccaaagctcgatggaggtccctcgcaaaggtcggaccgaacatgtagatatcactcaggagataaaagtcgctatcctgcagttccggagggagtcggtaagagtcaggagcgctgagcttggcctctggagcatcacacgcagtcggcggcttccctcgctcatgatcaactgaaataagacatgaattcccctccgttgatgagcgttcccaaacccccaataatctattagctaccccagggaggccatgtccagggggccgtccaggccgccgtactcggcgcaatacagtgcaagcgagggacaacttctcgcatcgaacgcagacggatgagcaggcgtccatcaaacactttttctttctgctatagcactgatcacatgctttgcgttgcattttggctttcttcccctgcttcacttaccgttgacagtactgttgggtagtggtggtggattcaaacagttatcagcgtccacgttacccagtgcacatgcaatttgcggggaattttcgctgatcgacgagttctgtaagcaaaatgtggagaaaccgaaataaattaatatgctgccaggcctctgtttatatttagtaagttccgatttaagtacctagaagcataaatttgtactctatacagtataatatataccgtgaatctcaactatataagaacttaaagataatattatatataagttgctgtccactattttgtataatatcctttatgtattcaataaagacgctactctggaaatccgttgtgctggacagcggagagccagaaacaggtccctctgtaccaccgttctgcccccctcaccgcctctcaaagcggaatctctagttcctttacggcctaggtttccgcttggcatcgccaccgtctctcgccgttggggaccatatgtaatagtgaaaggtgagagataacttgtcgaccgtatgtgacaactagtcatatatggaactttcctatttgggatatcggaactgcaagctccggctcgccgatgcttatgcagagacttcagctatctccccggttcaaaagtttatgtctcttccaactgccgtaataggctaggttgcttattatttcttatgtatttaaaccgacctatagtgctagattggaagaagcagaccttcattctcctatattatttgacggctgatgctggtaactacgtctaatccgacgctccatatactctaggtcggctattcctctttgtaatctgctagcctaaagtagtaaagtcagcttagattagctaaaatataatacgaccagttttggtaatacattctcgtctactctgtagtttacctctacttcgatccctctagaagataaatagtctcagaccatttactgacttgtttgtaattctggaattcaaggtataatcaatatgctataagagagctacacgccaaatctctccttggctagtttgtaactggttagagaacgaatatctctcgcaatgaaagatactcagagtcagggaatagagaagttgggaagtagctaacagtaagctattcctttttggctgcactaactgaaagctatatgccaattggagctagaggatttccgacgttatttgcgaccacgcttctgagcccgccggctgccacctggacgtttcgcgcgatctatatagccatgcacctcccttcccactcccatagagaacgcacttttcctcttgttccctgctgagaatatgtgaaagtcaaggctgaccggatgacgctgaatacgcttccattggtgatcgacattaatcgatctatccgacatgcatttagtcaattactggtgtcaaagtacgtatttacctctactattcccttaatagattcgccaaaccaactcgccagccagatattacagtcgaagccagagcatagcattctagtggtctagagaactcaaagtctacccttgaactttcgtagtgcctcgatttgttagggcaatgtcttaaggcggacctacatgtctagataagttactggatgtatatacaataataccatcagaggctctgaaccaattcttggcgggttggggcaggtcaggggtcaggcaggttttgggacgggttttacaagtctaactcatgatatttattttacgagagtaaaatagttctatcatataaaatacagactgttaactggcttagacaaaaatattgagtttctggggactcatccagagtttgcttagtctggaatgcttggctgctgggctgatagtagcgagtgaggaatgcaacgcaggttggcatgaaataatttacacgaggaagataaatgacatgcccctacaactcgcaattcatccaatcattgngttatactttgcggngtaaatcatgaacgtccagaatatcccgtatctaggtaatgcacccgatgatattcatacgtacaatgcggcttaggagcggagggttttatcagtttgcggaatagcgtaagagaatattagtgagagcgaaataaagcattcgcgtctacactcgatccacgtccgcctagtagggtacaaggaccagcaagtgcgagttcagggagacttgacttggctaccaacccgagcctggcttttgcccttga

SEQ ID NO: 4760 - DNA, 3265 bp, Emericella nidulans
gatggatccagcgaattgaacttcaagaccctacagtctagcgacatttaaatctccagcggacaatgctcacagccaactgaaaaaatatcagttaaagggtctgaactggcttgtcaacctgtacgagcaaggtatcaatggtattctggcagatgaaatgggtcttggtaaaacaaattcaatccatctccgtcatggcttacctcgccgaagttcataacatttggggtccattcctggttattgcgccggcatccaaccctcccaactggcacaagaaattaccaagttcgtccccaatatcaaagttttgccttactggggtaacgccaaagaccgcaagattctccgcaaattctgggaccgcaagcacattacctataccaaggaatccgagttccatgtgctggtgacatcctatcaacttgtggtacttgacgcgcaatattttcagaaagtcaagtggcagtatatgattctcgatgaagctcaggctattaagtcatcgcaaagttcgcgttggaagagtctgcttggcttccattgccgtaaccgtctcctgctgacaggtactcctatccaaaacaacatgcaggagttgtgggctcttctccacttcatcatgcccacgcttttcgactctcacgacgagtttagcgaatggttttcgaaggatattgaatcccacgcacagagtaatacgaagcttaacgaggaccagctaagacgtctacatatgattctgaagcctttcatgttgcgccgtgtcaagaaacatgtccaacaggaactgggtgacaaggtcgaaaaggacgtcttctgtgatcttacctaccgtcaacgtgcactctacactaatctgcgaaaccgggttagcattatggaccttatcgagaaggctgctgtcggtgatgagacggacagtacaacactgatgaacctagtcatgcaattccgtaaggtttgcaaccatcccgaccttttcgaacgggctgaaaccaagtcacccttttccctcgcgcactttgcagagaccgcctcgtttgtaagagagggacatgatattgacgtcgcatactcgacacggaacctgatcgaatttcctgtgccgcgactgctttgtacatctgacggccgcattgatatcgcagggcctgacaaccaaaaggcgggattccgtgccaagtatttgtctcatatgatgaatatattcaccccagagaatatcaagcaaagcattgaggacgacggcgcgttttccttcttgcggtttgtggacacgtcggtcggggaggcgttcaactactcgcatcaaggtgtatttgagcgcgctctccgtcgccgtggacaaacaaataggttatctcgtctcagcgtggtttatgatgaggatgaatcatccactgcaactttaccccatactctgttcaacatcgtcgaccgcaatgaccgacaggctgtatacgatatcgcagtggagggacatatgcgagaattaatgaatgtctctcggtcagtatttgagcaagagggccttaacgtcattgagccttgtgctggccccgcagcatccgcgcctcccatcactcttgtgtcctcaggccaagaagctttaattgagacgcaagatgccctgttcaatgtccccgttcagcatgccttgtttggcactccttcgaaggccatggaagagcaaattattgagcagcagctggatcctacaccttactctcttcctccgatgttgcctgagccaatttcaactaagggtcgctatacccatattgaagtaccctctatgcgacgattcgtcacggattctggcaagttagctaagctggatgaactcctgcgtgaactgaaggcaggcggtccccgtgtgcttctttacttacaaattacgcgcatgatcgatctcatgtaggagtacctaacctaccgccactacaagtacttccgcctggatggaagcacaaagctgcaagatcgtccagacacagtggcggatttccagcaacgtcccgacatcttcgtgttccttttgtctactagagctcgtggtctgggtatcaatctaactgctaaaaactctgtcattttctatgactctgattggaatccgacaatcgactcgcaagccatggaccgagcacatcgtctgggtcaaaccagacaagttacagtttaccgagtcatcacccgctccactatcgaggagcgcatccgcaagcgagccttgcaaaaagaggaggtacaacgggttgtcatctcaggtggtgcagccggcggtgttgacttcaacacccgcaaccgcgatagcaaaacaaaggacattgctatgtggctggccgatgacgaacaagcagagcttatcgagcaaaaggaaagggaagcccttgagcgaggtgaaacattcggtgcttcaaaaggcggcaagaaaaatgcccagaaaagaaagagagatgtcacattggatgatatgtatcacgaaggtatgtctccaatgtccttaaaagacaggcaaaatactaaccgctcgtgtaggcgaaggaaattttgatgatgctagtgccaaaccgtcaggagctgcgactcctgtatcaacagcagagaatattggaacgccctcggctagtacgcctgttcccaaacggggtcggggccgagggggaaagggaacggccaaacgagcaaagacaaccaaagaacgactacgtctaatagacggcgacggcggcttgggtagtgggtagttaagttgacgaattatcgactttttgttattatcgttgatgcatgacggcgtttgttctggttgattcggcccacctcttctattgtgccgtcttcggtgttgtttcgactatccctttcttatcttctttttagggcaacctatatttggtctgtattatcatatgtcaaaagacaacctgccggttcgatttctacgaaggagaagaggaaactctgcatgatgtcagacggacgtggcagggatttagacgtgttattctaccgaagtatacatgtatacatctcgaaggttcgagtggttcttatagttatttattattgcagctatgaaagaaattgcgctcttaacaataatgaacacatggcatttatccctatgtctgtccgagttggtacgggtattgactgtagtgtacgactacgaggtagtaaatggtacgagcatcacaggccgcgatccgggtattgttatccataagccttagccgcggccagcgggccatgg

SEQ ID NO: 4761 - DNA, 3352 bp, Emericella nidulans
aaaaatattattttataaccatgtaaaaaaaaaatgttaaaaataagaaagaaagtatataacaagataataaataattatgagtaaacaagaaataaataaaaaacaaaaaagatatatatatatgaaacaaaaaggataaaaaaatgaaaagatctctaggtaaaattaaaaaaaaaaaacaaagagtaattgaaatttcaaaaaaaaaagtaaaaataataaaagaagcaaaggttaatagacgaaaattttagcactgtttcggtaaaggtccaagaattacccgcataattagaacataaacaaaaattgggggctaaccctatcaggcactcatttcgttaaaaggcatttgaaatatcaactttggcaaaagctccgtccttttctttaaatcagaatttgcactcggctgagcaagttttgaaagaaaagatcaatttacggtgcaagctgaaaatttcctcggcaaacactcggtcctgaaggtcaagttcgccggtgacttaaccgaacccattgagtcacgtaagcatgcgcgattgcttaagcgattgttaaccctcagcgcatcgctgctgcagctagatcatttaagtcattttttttgatatgcagcacaactagttctgcattagaaacaatcactaatcaaagccatgggatatattttccatcaggccctataatgaactattttggctcctcagctagcagctagcagaggcaggtaacgtgaaaaccatctgaatcagaaactgcagtagtgttccaggctataacaagcgcagacaaagaaaccggtgaaccaacccttaagcaatacagcccgccaatccccaaacaccgtaaccggaacaccgcaaccaaacgtatataatccgtataaagtgagacgtaaaaatggagggacccagataagtagaccccgcttttggttgctcaaaggatttatgaaacaatatacggtctttagtattcgttatccagaccatcgtcctcgtcgctgtggcgcccacgggagccttgacctttgacaccatccttacggatggggatcttgattccttggttcgcaaagactttgctgaggggcgtgctttcaatcacaccagggaacttcttcgctgaaaagacttggaagggctccgaaaaagtgctggcaaggatcggcgcagtgcctttgttgatcacctccgcaatatccgattgtgggaggtcgctaacggatttgccgacgttgacaaaactgaatttcagactatttaagggtaagcatgtgggcgcagtggcatgaactgacaagtcaaacttaccggaagattccttctgttcgcacactaagatcttgcaagacgaaccatacaccaatcttgtcctctgtatcatacagccggtatgcactggcactcaagcaaccgataagattgcgcgtgaacatgcctccaggccctggagtaactggctgagcagcaggcatctggggttgcgccatgcctccatacatcggttggtagtactgggcttggggattaggataagcgttctggtattgaagttgggtgctgccgccatagtagttgcctactcccgcgtatccaacaggctgcccaacaggctgcccaacaggctggccgtatggatttgtctgataggatgccgggtaatccgaggatgtgggatgcggcggtggtggatacgatgaagacatggccgtggatatcgaaggggatgtagccgagtgcttcacgagatttacttcatgtgtaccgtccgcgttccataaatcggccatgacgacgtagaatgagctgtctagcgaactgtatgcgagtcagctttataatcagtcttagcgagcaatcgcgccacctacttgatatctacttctttctgcgtctgcgcatcttttacgattagacggatacacggagggggtgtgattggccttcggtcctagagagagtcagcacggacaaataccatgcatctgatacaaatagccaaccttatcgccaaagccgcacatccgcgcgcgaatcggctgttgcacgacttgcaaggaccagatacgaccgtcatgcactgtcgaaagcgactctggttccggctgaccagctggcgaaaccatagcactggggcctgcagagctcggatacatagtagacgggggtgggatacggtccatcgaaagcggcggtgggtgatgcccggaatgcgccctatcctcaacagcgtacataaccgcgatcgttcgcggccagtctttagacaaatgtaaagatgctggagtttggaattagcttcgctagaagcgcggcacggaagggacgagtggaagatgcggcagaggtcagagctcggtcgtcaagctgaaatctcgcgacgtccgaaccgcttatttcgcagatcctcggagccaagattccggagcgagagtcgaatttgagccgagtgaatgaaatctagactgtgagttgaattagacggtccgctccagtgctcggcggtgtgtcctgcaataatgcgactcggaagcgaaaatctttgaggtgacaaagtggcgaaggaggggtgtcgacccgaggcgacggtactagaggcggcgaggaggctaacaatccacctaagttagacttgaaacgcgctggagaaatatgtatttgacgcactcaacagcttcgagtgtcctagtcaagcaaacacaagctcttagatagcaaccggggatcgtctccaaggtgagccgcgggagctgtcaagtgcgggagatttgctgaatccacggatccagcccaaaggttcacaacgtccgggctaagtgagaatcgggttgacacgaggatgccacatgcagcgtcaaggcagaggaagctgcgcgtcggcgacacggtcggcgatgactaggacaaaccgagagagctgggaagtgccaaagtaggcggggtgaaaaggcgagggaggtggatggagatggcgagttcagagttcaaggttgcaggcgggactggagcagacgtagacgaccaagtcacgggcgggctatctggataagcccatctacttttgaccctcactttttcgacatcgatctagtttactcttttttcttctgacatacgagcctctgcttttgtccattctccacacgtacccattgtcatccttgtctatttgttctgtgcttcattcagccatcagagctgctcgctccaagggaacccaaggttcgcggctcactcggcttccgaccacaactcacgtcccaaatatcccctcctgcactcatgaccctatattactatcatcacaccatcatcgaccttcaatctttgtaaaaagtttgatt

SEQ ID NO: 4762 - DNA, 2681 bp, Emericella nidulans
gctgttgatatgtatgcccggatttccagctctcgctcgtgtggagtcaatcgctccaacggtttcgtctgggtgaagccctctgggattggctctcctccgggaatttccagctccgcggggccaacgctagcacgctcaatcggcttggcctgggggttgaaaagagaggttaacggcggcggttctcgaccggcctcccgagcttcttccacctgcttctcgtagtcgagcatctcgtgatatagcttatcggcgtgcaattggatccgctcctcccgctcgtcgtcccattggtgtgctgaagcgtatcctaatgcttgcaagaatttctgattgggtctgcaaggctccgatagaccgtgcggaaatatagcacccacagattgtgttgtgaaacaacgagtgaacaccttgttcttgtcttgacaggcagtaagtcgatcgctcatagtaggagggcttttcaagcaaagatgatagatctcgttttcgatcgaacagttttccatagctgcccgttttaccatagcttggcgctgcttagagtgcgctttcaatgacggaactcccgtcgtttcgggtccgacttcgccgggagaaggaggtttgtaggttttccataagtgtgcataccggccgtcggggaagagcgatgcggagggaacagcgggagaggcggatgaggcgtcgtcagaggatgtagtagatggtgaagctttttcttctgctgctggcgggctctgagaggcggggacgtatttcttcggagcttcgttttcgaggtattcgcgaaggccggggtcaagcttcttgaccgggtcctcgttgttcgaaccccagaaccaacccatttgatacaatcggcgcaatgagcgactggtcgttattcaaggtgcgttgagggatagtatgtcgtagagcgatcgtgaggggtggacaccgagctggacattggaacagaacaaacgcagtgtagtggcagaagatttggcgccaaacccaattgggcggactccgcgtttccagtcggaaggtcacgaagtaaacgctctccatcgttcaccacaacacccattttccatctgtatacccatttcgcgtccgattgacgcgtcgcttggcgatggcttccagtaagtaccttctccatggtctgcgctccaatctcggtatatctgacaatgtccttgacagacagagtagagcggctgcagatgcggcagcgcggagcagggtatgcaccctcaatctatgtcttcctagcctggccgctgacttgggattctcataggacgcgcaagattaaggaagtcgatttcgggttctctctaggtctcggagcgcccgccgaagaatcatctcaacccgcgtcccagcccaccaacaatgacctcaaaccagcatcagcgcctcaacctcctttactagaggctccccctctcgttccagcgccgtcaacagcagacgccatccagacccagtcgacgccatcacctactcgaacaaatgcctttggcgcattgcgagaccaacccgtgcgaactccaggaagcgcgcgcaataagctcccaccccgtcggtccacctttgacattcccccagacgatgaaccggagctggagaggagtaataaacggagaaggatcggtatgtttcggctaatcgtctacgggaagttggctaagtgttactagaatctcccaaagataatgcaccgccgagtggcgcgcaaatcgaaaccccgatcgacgcccctcagaatggtaccgcagagaccacagttgaggccccaagtgagggtcaagcaataccaattcggaccattacttcgaaccaagcgccccgacccgaccaagaaactgccgccgagtcttcttcgattcctgccattggaacggatggaaacccgcctgaagcttcgaacgaggagcatgaacaccctaaaataaaagctactgcgcgactggaatctccgcgtgtaaacggcacggcgtcaccatcagaatcgtcggaggacaggcggagaggaaaaaagggacggccgtctccattacgggataatgtctctagcctcgcagcaactgaggctgtctatcaacaagctgcccataagcaattaccggactctcgacttgaacccgctggagcagcgcaagaaacggaagctcaaggatggtttacgagaacacaagatgaacaaacaagaagcccaaatctagcatcagtacaaccttccgccgaaccttctgcgaccgaaaaggcaactgctaaagaaggtacctcggaggctgtaccgagaagcactgcaggcaagggtgctcgtggacgaaggaggaagaacttagaacctacggaggaagcagctgttacagagcgggactctgatgagccgagtgcgactccggtggaagaggaggttgctgcagatatcgatgcatcacgtgagaatctcgattcgcctgagaatcagccaagtggaatagataagggcaagaagcgcgctgggcgacccaggagacacatccgttctccgacaccctcggaagattctgctatgagcaacaggaagagacagcacgagaaagatcttgaccgagaggagacacgtccagagcaagaacagccagctgctacagctcgctccagtaagaagaggaaacagcacaacgagcgttcag

SEQ ID NO: 4763 - DNA, 1758 bp, Emericella nidulans
ctcctcgccggaactggtgcccaagtcctcctcaccggccgtagccagcctcccatcgattccgccaaagaccagcttggtgacaaggcccacgttgtgcaatgtgacatcacctctttatccaatatcgagaagcttgttgaagagtccaagttcgtgttcgccgaccaaatcgacttcctcttcatcaacgccgggtacgcatgccttgagcccgtggcggcagtcaccgaagagtcctttcaccgaacaataaacaccaacgtctttggcgcattcttcgttgctcagaaattcatccctcttatccgtgacggcggcgcaatcgttttcactagctcagtatctaccaagcacggcttccccggtttggcggcatactccgcgtcgaaggccgctgtctcttcgctcgtgcagacgctggctgccgagctggtggaccgccagattagggtcaatgcagtgtgccctggattcatcaagacgccgaccatgggtgtgtctggcgtgacgccagcagacctggttgcatttggagaagagggtgagaagctcactccacttgctaggaatgggactcccgaagaggtggccaaagctgctgtctttcttgcatttgatgcgacatttaccacgggcactgaccttgcagttgatgggggtttgatttatatgcataaacattagtggctgtgcatgattcccaataaggaatgtagcagacgtgggtcaagccggtagcagtcagtgcgattgtttgtcagatctgaagctctatgaagagaattaagatgaagaatgtgatggtttaattctcgccctatcagtctgtaactctctattcctaagtcccagtgagaaactcctgttgactcttcttgcttcactgatcctcaaacaaaccattgacgctctaggcacagcaactggccaacataccggcctatttctcgacctctgtattccacaatcgacgggctccaacagactggtatcctctgtacctggcccggagcgccaccgcgccggattttgcccggtatacgcccgtgtacattcaatacttggctaataaccatattgccggtcatggattactcctgcatattagtgttcggaacgccagtgtaatatggcatggatatcttcggcgcgtgagctcatccgctttagctcatgcattggcactatccctcttcagctactgcacatcttctcgcatggcggcacaatgtcgctacaacccacttcacaatcacgaccttcttcttttaacgctgtacttagtgagtcttgactgctgttctggcgatagttccttacaacgaagatacagtgcgtggcggcaacggtgccctcagctagcaaccagcctatagcgcattacactagcaggaccttatctactccactaccgggcttattctgacctcactgaccgtgatcatggcgaggagtctagaggatctgaggatggcccttaatatcccgagttgcttgggaaatggtgaagaggctgtacctgttccagttgtgatagacagcgttgtacgattcccgcaggaagtgtctgtgggacaatcctataagtatcttacattgctaggctgttgagtcgattcgctcagggagcggcgcagccagctgaacctcagcagctgccctgttggtgaacataacgattcgggtaaataatggaaaagatcctacatattaggatgtgccgctcagacgggctcggctgcgataaacagatga

SEQ ID NO: 4764 - DNA, 5316 bp, Emericella nidulans
aaatattgtccagtcatagactccaggtctgatacaccgggatggaagctttgtcacgacggaatggctttagacagtgttcatctcttgcacggtaaatcgagatgacaaataatttctcctcggcagctgtatcattccatcgacatccttaattacctcacctcaagcgaggttatcaaccggtagttgttagaagcgaagagcttgttaattatgtcatcgtaaattttcgtcttccctattgacaaaaatggaccccgcgaattatagggcccatgacccgtcataactgtgtagaatatcgacccaagactgaatatatcagtaccctctgtcgataccaaggcttgcagggattaaaaatccaggatcgggggatgtgttcgccgtcaatggagccgctcgttgatactccagaatcacacaaagtaacagatctagcttgctggtatggagcaaatagttgtccggttgcgggccagaataaataactcgcttttgatggatatattgtattgcttccgcagcttgagaacgccattttagctgcagggacaggtcgatatcgtcgtagggccttgcgtcctgagatgataacgatggtagaatacaataaattccgggagtcaaggtattctgagattagtcttcccaggacatggctaattcatgggaaaaagattcctacatatgcttggttcctggattcccttatccaggaatatctgatcccaagacatgcacatttctaggacaagctgacctgagctataacttaatgggacagttgcctatcgcatttcactgacattccccatagatatcttttttgtccccggtaactttgtattcaaccacaggaaccagactctgagcaacggtacggaggcgctgaagttgtgtaaagagttgctcgtgggcttcgtcctacagcagtaaaggcggtttcgcggcaggatactgccgcgttaaagggagattaccattcgtttcaaggatgattgatcactgcaatttgaactgtacgagaatgcccggcacctggcggtaagacgatggcgctgatttgctaccgcccactgagatgtagcgtggtcggcctggacaagccagaggcttcactcagaggggggttgacagcggaagctgactcaagactagccgccggcacaagatcaatcccagccttgttgcacagtgtgcaggttgactgtatccaggaagtccaagcacaacctcgcttcagcggctggaaaacttacgacaaggatctgaataacacgaattaacgctagaaggttgaaacgtattgagatctataaatatataaggtatctcgagagctgtcgaggtctggggagtctttctactcaatggtccactcgcctgcatctcgcagccttacactgtgttcgtcttggtcttccctttcgcttttcgtctaacactgttcttgagttgctgttgttcactccggaatgtcgaaggtcttgggatcgtttgttcaaaaagcccagtctctgaaaaatgcaccctccaaattttctagcgccgccgtggaaggcagtcgtctgattccttccagaactaaggatgccgattttcacgttcgcatcgatgccggccattacgatccagactcaaagaaagtgaatgttgctttacaggtcaattcgcaagccgaaagccctgttctgaaggaatgggtcaagaaaaatacgacgcacgcaaacctcgcaacgtcggtattcgacactgctgctgaagacaaacaagcagagtacgagagggtactacgcgatcttgaagagaaaggcaagaagaaccttggatgagcgtgatgaggttggcacaaacttcccgagcgtattgtatcctgcagcaaactaatgcggaggtccgttgattatggtatggagcagccatattgcgattatgtggagtagtaattgtgcctgatgtcttgtccccgatgttatttcctgtcactgaggctagaaccgcatattgttagactgccaagcacattgccgactgaaattctccaatagtagagtaactatccgtaatgtggagctgctctttttgatgacgtgagcggtgagctggcgttgccctggaacacagttgctatttgaccatgggataagctggagatcatcatatcttcagctcccaggcaaatttcttgatgcatgtcttataatattgaaccagatgctgcgaactttgaggcatcctttgtttcgggcatttcaaagtcgacttggccgcccttcatctataccgcttttcccctcaactgctttaccttctcgtctccaggccgccagcggcgcaacgatttcgacggagagaaggatggatacagagttggaaatgggtgagccatttgctgtcatcgtaccttgattgtttatgctaatgtgacactagaagttaaaccttatacctacacaagtggtcgctggttgcggcaggataaaatggagactgattcgcgctacatccaattcagctttattgctttttgccagaaggttattgagctatgccccgaagcaaatcacataaaggcttgtcgaaaaattgaagggggcttcaacagagtttttatcttcaccctggacaatgagaaggctatcgtggcaagactcccttttcggttggcaggaccagcgaaactgaccactctttctgaagttgctacaattcgctactgtaagtttatcgcaatttcttaccacttaccaaatgctgaccatgctcttggtctagtacaaacgaagacgaatatccccataccgagagttctcgactacaatggtgacgccagtgatgaaacaaatatgatcggcagcgaatatataatcatggaacatgcaacaggagttcccctacacgagaaatggcataaaatggctggcgaccagcaagtcaggtgtatagatgcaatctaccggacgatgaaggatatcgtcgatttggaattcccagcttttgggagcatatacttcgatgatactcttggacctgccagcaaacaacccctaggtgatggcttttgtgttgggcctcactgcggtactagatactgggatactaatgtgggcgaaaggagatattatcattatgtgaatagaaacactggcccatgtaagttgcgtcgacgctcccgctataaggcaattctgcttaccaccagaatctattagggttgactattggcgagtactgtgatggccttattgacgctggtctgtcacaggttccaccagtggatattgaatccaagcgaccgatctatcatggatcgcctgaagcgcatttagctcttcttgagtgtacccgtcccgtgctaaagcaaatggccacagatagtcgaatcagtaattccgccgcaccgttattgttccatccggacctacatatgaggaatatatttgtttcggatgacaatccttccgctatcactagcattattgattggcaagcagctagcatcgagccggctttttggtactcagacgaggttccagactttgcagtaggaagtgagatatgtgcgaaacgttttgatctctcttcacagttttcacaccaaaactcgcaggcccaaggctgatgaatgataacatttttcgtccattccattattgttatagaacgtggaaggatggtgcggtggccttacactacgagatgaccgaaactgccagactttggaacaagctaggatttgaaggtcaatgtccttttcctttacccacgcgagacgaacttgagaaacaagagaaggagtacagactttttgaggcggcacagaatctgcgaacggatttggctagcttgctaaatacggcgtcagacggatgggtacctccagatggttggaaagcggcacaatcagcccagaaggagctctttgatggaatgttgcaggctgttttgacgaacgcaggttcagatgatgatgagccggtaagagatgaaatgacgctgaggtcaatctggccattcgacatcgatggatgaggacagtagggatcagaaggactatgtgcaggatctaatggatatctggaaatctttgtttcaatacatcttccaatcaatatctgcacgcctgtggcgacagctagcgggcttaagttacatcagaggccgcagagtctgacgggacaccatcttccaccgaacctccagctcgggattctctttgaagcctgacgggtcagcccgagcgaacaagcctgccttcaacatggggcccgatcacgcaccaccaactgggcgccagttccaacttaggttgaacccgtcgtagccgaagtagtaaccgcagattttggtatgggctccttaaattttagcgccccgaatttatatagcttcatatattcccgaatagcaaagacaaatgagaattaggaattgtgtatttaatgtctgccgatttcatgacgcgcgtcagatgatcacctgaagcctttttttttgttgatgcttagatacagatgctgtgccagggtcgctaaaggctttattgaacactgctattcccaaggcgctaatgataggcggcacaattacaccaacattttgtgactgccaggaacggagtagtaagtgtccttgcgaggtattccaggcgtagtatgaaacgcctgcaggaggtcataagcgctggaaacctctccattccagcagccttcatggaaccaattcattctaccatatctgaggcgaacgaatgtcctaccttctgcctggcatgatcactatggagtctgctgaagacgtgacaaattttctggatatgcttttcaatctcctttgtgttctcagttcaggaaatcctcagcccttgacgtggctatagaagaagcgactggttgggtgaaaagcactactaaacgggtccatggttgggatgtcaagggcacaaagggatgcaagaatcagggaatttaacacggctaagtctcggttggatttcatatttccacctgggaagatggataagagctagtgaagcgattcgcagccctgattgaggattttcagcacgctgatcagagggagggccgcttggtagctgcatcaggtcgtctgatgtttgacggtgatttgaggtgcctggggcatgatgtgaacttatactcaaacccagaggaccagggagaagtggtttgatttggtcaactttcgccttttaccatgctttcgggagcgatgagttgagaataaaggtgaaaggtgtactggcacgcgagtcggcgccggagtgggctagcacaggaaagcaatcat

SEQ ID NO: 4765 - DNA, 2842 bp, Emericella nidulans
  unsure (1)..(2842): unsure at all n locations
gaattaacccttactaaagggcggcgataagagggcaaaaggacctagaacattagacagctacaaagcctcggttgttcgctgctttacaacgtcgagtttgaaataattgaaaaccgataaatactacagctttaagaggagatgcagtaggcggattcagagacatcagctttagcgggattgtaatatggttgcagtcaattcgtacatcagagcaaaagtgctcatggatagaaacgtggcccataaaaaaagaagcattctctatgatcaaccatcacagaagtccctttcgagctagctcaaccttgcgcgcagcttccccaggcttgtaccctcctttcgagacgcagacggcacttccttcccccagctcgaacttctcctcgacatcgggatgcgggcacgggcaatgatgcggaaagtgaacgcaggcaagcgtgcccggacataaatatttatcgcatcgtgctatatgagagtatgttagtcacatatttggtataaaaagcccaaagaagtgcatgttgttggtcaagtcatacctgcttcccacatcccctgataccgcgaactatcactgggaacattctgttgactagcttgctgacggtcttgaccaccaccaaacatgtgctcgaagaactggaattgtgcgcgggccatagagatcaggaggagtagggctccgagagttcggagcaggttgaataacatcgtggtgaagcgccaatggcgaatatatttgggattgaatactgacaagaagactttacggtggacgaaatctctgatagttcatagaccaataaccatggaaaaggaaggcaacggtgagaggataattgtacacttcaaaatgccaccttccaacggccagtatatgtgacacgtgaccatgccaagctttcaatccccaagaaaaaagtcgctccggatctcagcattgccaaccccagtttccaattcggagacaatcacaccatgatgcttcccaggcttttgacgcctctccggtctttgggcagagcaatctcctgcccatcagcacaattaactcgcctaccgcaacaatcaacaccacaattactaccgcggacgttatccgcttatacaactccctcaattctcacgaaccttccccgattctctctctctctctcccaggtacgatacgcctcccactctgcccaaggagccgcaaacaaacactcccgtgaccccgccggaaaacgactcggcgcgaaacgcacaggcggcgagtacgttgtcccgggatgcatcatcttccgacaacgtgggaccaagtggtggcccggcgagaactgcgccatgggacgtgatcacaccatctacgctacggaatcaggatacgtgcgctactaccttgacccggagcgtcacccggaccggaagtacatcggtgttgtctttgaaaaagacggaaagctgcctacgccaaggaatgcgccgacgcgccgcaagttgaaccgggttgccgtgcccatgatgacgcaggttgaggaaactcagtcggatctgacggtcgtcacaggtgacaacgttgggacggtcgttggggctgtcgcgagtgtggatgctggcgctggcacgcagctgcgccctggatacatgtggcgcgaggcgaactggcagatcggtcgtgctgctgagaaagcgggaattactgctaggccacacaagcgaaagaacagatggctggcttggagaaagagacaggctagggccgagagggctgcccagatgaagagcttgaagaacaagaagaagtcgtcaaagaaggccaagcgatgattcagtttgcctcgttgcaatcattacaattgctctcactcgggactggtgttctctgtattataggaagatattatgccaaagcctttgttcaatatagttttattttctcttagattgtgtccccagcaaaatgcaacgtaaaagccatagttaataaatagaagggaaaaaaggtcgcataacaatcaacggggtatattgtgctagtaaaggtttctgctcttaaacgccttatgctgccacatagaacaccagactgaatggcaaccataagattacaataagtgagacaataattcactccgggcaagtcaataatttaccagccgtccaagaatcaaactctgacagacaaactcgttgcccacaacccggacattgctatctaggcccaggacatcttcactgattgtttctgtgagcctataatttttacgtcttttagatggcagggatccagccgccaaaaccttggctgctttgtcgtcgacatcaatatagacccagtcacaagatgtttcctgaccgtcctgtagctgcttctgaagggctgcccgggcagattgtatatcaggaacacgtttgattttcgatgcacccagagcatatgttaggaagatgtaggcttttcttcgttcctcgtctaccttcccgttgcggcctgtaataagcaagacagattgcccgtttagaagatttggccgcgatgagatagtcttggagagtcgtgctctagtcgccgggtagggcgtgaggattctcgacttcgttgccccattgaggtatgatgattcaccagcagggagaaggtacatttcccaatccattacctggcctttagcaacgcaatcctctacccaacggtctgagagacaaggaatattgagagccagtgcctgcatgtatttcggacgacgggagtgtgtgtgtgcgattagacacgcaaaaaagacaaactccnctccaggtttnagtcggagataaaannccgngtgctattgaatgggaaaatgaagctccc

SEQ ID NO: 4766 - DNA, 4694 bp, Emericella nidulans
cgaggccaataggagtattgttctagggttacgaagagccattggcctaaacaaaaagttctatggtcataatacgagagccaggggccctaaaattacgcagacctttctctcgagaatctgtaataggatgatttgatccagcaatggcggacgatacctaggtgcggttaaacaatgtgaagagccggtagctctttccttctcttcaagtgcaggacatgagctggttacctttgaaaccatgtgcaggtctcgcgtgctgactaccacatcaccatgccgatattacgatcattaacctatactgcactcttcttgaacagttttactgttgcggagaatatcaacgtcttttcctcgcctccactatcgattgcgagcgaaccctacaccctcaatctctcttgcgcagagtgcgccttttcatatagcgagtgtctcgagaatgttaatccggcctttcttgtacgttttccgagtgtatcctcatggtatttttatttgattttatcttatttcaacttaattttcttggaagtcgactgactgaaaagaccatcaccttctcgacggagaacgacactctcctggccaacaacgacatcatctttcccacctcatggccgatgcgcttccacgcgccccgaaagcagggatccctcatcgattcggtgcccctcgcatacgcgcttgatgtttctcctctcccgcatcagccaggcgcgatactaggcgatctgtatcatctcacgttgaccctggtcgacctgcaaggccgtcgcgcaactgaacacccggtctccatcggcatcgtccgtgacatcaatggtgatttgcagatcatccaggtcgaagagtcgtggcataggtaccaccgacatcttcaccaagcgggcgctaaaagtaaaggaaaagacaatgccccgaagaccgacgctcagagcaagaagcccagctggtggcgcatggaagcctggaaggagtactataacacacactttcaaaagcccgagagagagccctgcacttctggttctgcttcgaagcccggccagcactgcacaccatcggccggtgaccaccaacgcctacaccacgaccaccgccagcgtcttgacgactggatatacgacaagcactttcactccaagttcgcgggtcccgccgtcgtttcgggcctcctcggtgtgtgtgcggcgtttctggctggtgcgctggggttctttgtaggcaaggtgattgtctccctttactgttatctcgtcgacagggcgcgggtgcagaccgtcaccgggagagggctcgatgaggagaggtatatggaggaagtagctgagttggagaagaagcgattggcgcaaatggaaaaacagagctacgcatttgggcatcaggttgtcgagaagaattgattctcgatggtaaatacaggtgtctgtcgcttatagagggctaggtgcaagtatacagtagtggcaggtcaggtcgtatgataatctatgaaccaaccatactcttttctctaccccctggtatctaacacattgacggaggactgaatttgtcgctatcaggacaatacaccgcgttgtctgaagcgtaccaaaatattatagcccgattcttcgtttccagccagcgtgagtgtaaggttcccagctttcccctctcccccctcccccaatcctatccccctcctcttcctcctctccctctcaccctccttttcccagaaacagtggcaagcgccataccgccgaagccgcatggaggtacaaactccaaccttaccgttgcttgccttccccacaatctggtccggacggcaccacttcggcaaattctgcttccccggacgagatatttcctctcttgtgcgatatatctgctccataggccacttagcccaatccaaaggctcgtcaggggatcccgaggagatccttgaccctcgacacgaggcgcgccgcgtgaaatgcgggattaagatttcggtaagggaatcgccacagtccagcaacctggcaacggccaacctcttccaagtgtagctgtcatcatcccatggtcaatcatgttccacgtgctttcgtagctcgtgattcgcttcggcggtgcggagggctcctcgaatgacagctggttggaagtctagacccagcagtggggttgttccatggttgtagagctcggcgtccagagctcacagctacggtccccggaataggcaagtttctgcataaatcattccattaggattgttgagtgtagcagctagatcaaggatcacttttcatatacgccaaactgaatgtcatgtggcagatctttgtgacaaaagtgtgatgtttccgacagctatagatgccggtgaaggctaagctctaagctatacctaccatacatgacaagggcatggcgttgactttatcgtaccatggcataaaaactcccgaaccaaagaccatcaaaccttcaccgcaggctctgcaatggcgaaaatactcaaatagtctaacggacgccgaaaccaactcaccggtagcagggtaactcctccaacaccctccaccaagtgtcttacgcccaaccccatgaccgagacagtatagaaactcgcaaaccccgtccaccctctaccctttctccccatggctcaggcagtcaagatcaaatgtcctccgatcctgtcgaatcaatcaccctcaacgagaaattcgccttcaccgcattcgcaagcatcaccctctacaactccatcgagctgactatcctatgtcttgcctccttcaaacgctatcagggcctctacttctggtccctgctcatcacatcatgcagtctcatcatcaatagcttgggcttcgtcctgctcttcttcacctccataagtccctatatatccgttacctttgtcctgctcgggtggtactccatggtaaccggccactcgatggtgctgtggtcgcggctgcacttggtccttcataaccccggcatcctccgcgcgatcctctacctgattatcgccaattcaatctttatgcaaatcccagtcacggttttgctatatggcgccgtcgggccccggtcgccgacacggatggcattcgtgcgcgggtacagcgtcatggaacgcgtccagctcgtcgtcttctgcgtccaggagtgtcttctgtcctccatttatatctgggaaacagcaaagctacttcgactgcggccgcagcgcgcgcaccgcgttatcctcacgcagctcctcgccatcaacatcatcatcctgatcctagatatcatcgtcgtcgtgttccagtattcaggactatttgtgctgcaggttctcttcaagcctgtcgcgtatagtatcaagctgagactcgagtttgccattctcggccgtctcgtacaagttgtttcaggcgaaagcaccgggtctagtgtgcggactctgaatgaagcgccagtctggtcggggcccgggttgtcaggcgaccaagaaccatatgcaacagcgaatgagaccagggaggtgaattggagatcgagtgggactggtcatgcgaacggtatgcaaaatggaactggtaataggaactcatgtgtgtggagtgggtggtgggggacatcaagtgtggacacttgcaacggccgagtataggtggtggactggctaaccacaatttacgacaaatgattgtatgctttagataccaaaaatatacctattcgcgtatggatgggcattattcggcgttatcacaactctatggtctagagattgatattacatatgtccatgatatattcccaattgataggcaggatcggttatattttatatcagagagaacaaatacgatgcagtactcggaatactcggagtactcgggtacccggtggaaattgctggatacggccgaatgcacaagctgtagaccataacagatagtagaaaaatagtgccgttcgacatatcatatatagggccgccttctaccacgtttatccaggaggtacgcaacgggctagaatgatactggacttcctactatgcagggttgcttggatcaccaggggtttcaccggcagtgcgcctctgtggatggctataggattgtccaagtggcaaatgcagagcagccggtcttaagcttgggaatctccatactgctggtgggactggacagactgcagactatatatggaacccagctagagattcagggcatgacctagggcaagtacgtatcaccattggagtacagggttcccatagctggagtcttcgccacggaagcataagcataatcccgtcctgtccaacctaattacgcctccatgtcagacctgtctggcccattccaacttcattacgggcttttcattcctatgttggggatctagactctgcggtgacgcatattctgccaaaagaagctgacggaaaactttctatcgacattgcccctttgttgccgttcctatgctcatacgactggcttttatagttccatccgctcgcctactaccactgcctccattctggtaagctttcaatatggttatacctaaggtaataagcttttgtatcggctattgttcacgcttccctcttcactcttgtctgcagtaccttttcactggcattctttacgatcttttcgctaggatgttggtcaaagagctgcccc

SEQ ID NO: 4767 - DNA, 4281 bp, Emericella nidulans
caagatttcataacgggttaactcacgaggcaaagggggcagaatctgcttcttcgcggaggcgtggaaggccacgacctgcgagacaccaacggtgttcctagtcgccaacggcgcccggaaggcagagaggcaagactgtcgcatgagagaagccattgtgacgattatgctattcacgcccaggaaaagctcctattcaacgcaccagaaacacggactgtagatgatgcttcaaagagtgtcgaagtcgttccgctagtaacctcgggaagtctgttcgggtgcacctacctattaacattactatacggagcaaggtgattggtcagtcgctctccgcccatccggccctggccgacttgccggcaattcaaaaaggcgggcatgagacgggagctgtctctactgtgtctacacttaataaagactctgtttaagcacttcatgctatattcgtttcattgagattacatgctaaagacgggcttcctaagcacgattattgcaatcaaatatatatggtgcggtcattcctcgaatgccaagggttaggttttctttttctcaggaagaaatatgccgtcatgactgccatatctcgttaaaacttcagaacagctttgcccaagttctttccatagaagatgccgacaagcccttcagccgcattttcgatgccctccgtctcgtgaatgagagtcttgaacgagccatccttaatccacttctgcacattctcctggtgctccttggtgtatttgtcgcccatgccagcatcgccgacaataaatccgcgcatagtcagtcgcttagtgagcacgtaggcaatgttcttgatgggatatggtgcactgttgtactgcgagatcataccgcaaacgacaacgcgaccaaaattgttgattgcttcaagcgcagcctctaagtgttcacctccgacgttctcgtagtatatatcgataccgttaggagccagacgagccaaagcgtctgcaggcttctctttcttgtagttaaaccctccgtcaaagccaaggtcgttgatgatgtagttgagcttctcgtccgatccgacactgccaataaccttgaggccttcgtgcttggcgagctgaccgaccagctgaccaacggcaccactggcggcggagacaaagatagtctcgcccttctttggctggccgatttcataaagagatgagtaggctgtcaggccaggcatgcctagtgcgcctaaaaagacgcggatgtcctcaatgcccagcgggttctcgaggtgacggatgcgtgacagttcatccttttcgaccgcaacatactcctggattggcaagcgtccaatgacgaggtcaccttccttgtaggaaccattgttggaacggataaccttggcgatgcttgcgctttcaataggcttgtcgaggtagaagggaggtgcgtaggacttgatctctgcgctacgcatgcgtccgcgcatgtaggggtcgaagctggtgtaaagcgactgaaggaaaactccatctgcaggggcagcggcgcttgcgtcatatgcagcaggttcgatggttagatgttcaccgggaacagggtacccatcggggattttcttgaagacaagggctttgttggcggccatgatgtgtatgagaggtagtagaagaagatcaattgaaagttactgtagaggagatgatgatatcaaaatgctcaaggaggctacccaccgtcaaccttgactttataagctcagagcatgctcaacgataaagcggggcacaaccaaaatatggattgcagattataaagcaacgattccaccagggaacgttctcgaggagacacagcagatctcagtcggtggttatgcctgagttggatccgaaagcggcattgtggcgcgacatcaaccaagatatgctctgattgaccaacattaacgttggtgacacttcgtcctggccgagagccgaggatggactccatctgagctcggagatattgctggaaggaggaggaagacctttaagcggctaccaccaccatcccccggcgctgtgagtgaggtcaactgtgcgtttcatgacgcagcagacaagtcggtcaagaagcatgaatcaaaaaggcccaaatccgtgaagttcgtgcactgagtcgttccaacttcaagattcgtggtggatatcacagatatctacaccactgttgactaccagccatggtctatgagctaatctcagaagtttcttgactctgtacggaggaatatgggacagatccctcttcggagagtttcagtcagcaaagagtatccggcagacttcggtgccgagtgtcgaagctgtgcaaagatattattgcctcaggcatcaagtcactttcgtggtagtatgccacgacgaagaattctcaccacgacaaatgcagatggcatgaacagtgccaaggtctcgaatcagccctagatcatgcttaacagaattcctgtctccaaccatatcaatcgcgataattcttcaactaccgctggtctttactccgaggtgcctgtcccgcagccaatcatggccgtatcgcctctctccgccttcaagctagcaacttttctgccgggagttgatattttccaaaagataagggccggttttttttctcctttcgccgccatcagttactcttcacctttgaattttttttttcggttgcttcgtgactttttacattgataattctggtaaagtcggaacgtgtcttcatccgtctaggcctaactatgttgggtgcctttcgtcgctccgctgtgagccatgccctgcgatcctgcccgcgaacattgtcggcgcggtcaagtccccaacgccttcagtttctctactcatcgatatctggaccgtcatctacgtcgaagtcactgttccactcaggccagtttcggttttcggcccaggtgaatgccgtcgcggagaatagcagccagaatgtctcagtcgaagagctaccgactcggtttgcggaattgggagagagaaacattcttccacggaatttagtggagaatctcacgaaacatatgaaattggagaccatgaccgaagtacaacgcaggacgatcctcgagtctgtgaaaggcggagacatgtttgtttgccctataaactgattcctttctgagcgaaatgacggctaatttgactctcaaggttggctcaggcaagaccggtaccgtaaaactgttgcttttctgattcccgttgttgagaaactccttggcgatcgcagtcttcttaagacgagttaccgcgatggccggaaaaattgcccctatcaatatccgagcaatcgtcatttcgcccacgcgagagcttgctgagcagatcgcagttgaggcaaaacgcttggtcgctcggacaggtctgcaagtacaggtcgctgtgggtggtaccatgaagcgggctgctctgcatcagcttcaacgggagggttgccatatccttgtcgcgacacccggcagactcaaggatctcctcacggatcccactagcggcgttagagcgccgaagttgaacacctttgttcttgatgaggctgatcgcttgctcgatgaaggctttgctcccgagcttatggagattcaacatcggcttccggatcccgcagaggttgatcgccagaccctcatgttctcagctaccgtggcccctgaggtcatgggaatggtccgcagcaccatgaagcgcgacttccgattcgtcaagtgcgtccgggacgatgaggtccccacgcatatgtcggttccgcaaaaggcagtgattctgcaaggtctcgagaatgctatgccaacattgctagagctggtcaagaaaagctatgatccacggagcacattcaaagctattgtgtacttcggttctaccagagagacaaatactgcctttgaagcgtttgatcagctactcgtggacccggccgacccgggaagtggacatcctctcggtaaactgtttctcggtgagatccattcacgcctgacacaggctcagaggactcgagtcgccaactggttccgaaagtgtcaatctggtatccttttctcaaccgacgtcaccgcccgtggtatggatttcccaaatgtcacacacgttattcaaattggtgtacccaagacccgcgaggactacatccatcgtcttggccgaacagcccgtgcaggtaaaactggtcaaggctggatcttcatacacgagcagcaaatgggcactcttaggaaactgctcagagata

SEQ ID NO: 4768 - DNA, 2651 bp, Emericella nidulans
ctgtacggttatatggccgaggagcccgtcttggtctctcgttaggcctgatatgggaagaacagggctacacgtcagcaagcacgcagagttagaggagaggagaccgtaacaacggagcatatctggctttgcttcagcagtttcgggaccaggtcaatgaataattaggattaatgggcttggaagtgtaatttcatatgcttatgcttatcaagatagagtagttggggataaatacttcgccgggtttcgtacaacttgagaggttcgccagagcagttcaccgcttgtagaagcagggacctgaataacggatagccaatgagtgcagatgataacaaagagatcatactataatagccccaacagtgaatgttccctctcctgcctgaattggcacatactcttgaacatgccaaaggcagcatatgcttcctgaacaatatatacttctggattgtatatatgttcgattgaacgacgtttcgggaccagtagagactatttgccagtcattagttgactttcctctctttataatccctgccgttgatcatgggcatcgtcaagcaggatgtggtcaacaccaaacgaatacacctaaaggagtagcaggctcaagtaccaaggcgagtaatattacaagccgtctcgtgcaggtgggcgaacgctccggttggagtcgaatggagcgtggtggacaccaacgcccttttcatctatgttggcatctatgttacgtccaggggctgttgggtgatgtctgtcacgacgagtgtcgccgcggatgacaacagttcttcacgttgtgtgcccgtacaaggctagaacatccggttggggtcggggtgcctaataggagtattcctggtggtgatcgtacctttcccttctctcgcagtgaagtatgacatgctgacgaatgagtgtgtattttgtaccaatatggcgttgggcatcttcgtatcccatatccctgaccttcttctcaggctgcgcactaagattgtggcaacgctggtttaggatgactgcgaggactatgtccctgcttttcatgattcgtccttgattggggtctgcatagagatattcttactggcttgcgcttcgtttggatcttttgtgtctacgttagggttttacatcacaatgtacatcatcagaacgtccgttcctcaagaatgaattttcaatataatcagcccacaaacgcacaaaccgttttcagtcatcatagctctcccaaagtaagagcgatcatctgaatttatacaccgagatagtgaataataatggtcactcaaaacttataaatttcccatatgtcaacctgtaacgaactggtgaatcagggccaattgccaagccgagccctgcagatacgagtcatgactgctgacgattctcttcgtcagaccggagcacgacgttagcaacggcagaagtaactgtttcgccgcaaaagacgagaatatcccaggcgtcaaagcaatagtggcaacttgaaacgctggatgttccggcaccggagtgggggatatataggacagggcagaccctcagtttcatgtatactacattcatgctacacgatacaaagttggtaactaaagagattttcatgctggtctcggagaaatactagttcaatggctagtggagagatgccaaagcacggatgtttcatctatacaacggccgctatacggtgcttttgcaggaaccaggagaatcaacataaagccatgagctctctcgagccttgactgagtaccaacaagcaatacggctcctctgatggcttctctgccgagactggtagtccttgcgggtctgttcagcctgactgggacccaaattcgggtgcggctaatggccagcagcgtgcacgacctcgccgaacctgatttctctaccttctctgtcgaaagcaaagcccagagctcgttcactgagatctctggtgtcaattttaatctctgcaccggatgcttcttacctagaggcgattactacaagtatcagtatacgcggacggtctcgcacgtgggcgaacaggtcgtaaactggggcaccaccacgtctgcaaggcagaagatgacagcgtcatgtcttcttggagagcgcccgccgacgttaagaatccgacgtataatctctacctgggacaggatccagaggacccggccggatccagtgagggctgacagagacgaccgcgctttttggaggtatgactctgttctttggccgctccagcagcactcacaacgggaagatctgaacaaaattgacacgtattactggcgtgttgacgttgtcgatggagagaccacatacactggtcacatattcatcttccgtctagcccacctggcgttccctgacgccgaggggtacgggtacggctcccttaactccaacgccatctggatgtactaacgtcgatgacaggcgattcgctcgtggcggccgtaggggcaaagtggtcaaagtcaccagccttgaagacaccgaagaccttggaagcctaagatatgctctcactatcgagacgagcccacgaattgtcgtctttgacgtcggcggtgtcatcaccacgacttctcctcccaccgtgaccgacgaccatgtcacgctagccg

SEQ ID NO: 4769 - DNA, 4200 bp, Emericella nidulans
gtgcaaacgccatcgcaaagcaagtcgtcgaaaattaaaacagaacagagcaatgccagggctaatcttcaacatggtatcataagcgaagttcatgaggccctgccacacccaatcataacaacactccagattactgagaagcgcattgcacccgctcagcgccaggaggaacgtcatcgtcatcctcgtccatgctggccgccccgtgagcgcgtgcttgtgagcgctcgctgttatcaacctcctccaaatcaaagtcttccaccatagcgtccgcaggaggcctgtttgtctcctgtcggggaggcagaacctgctccaaaagttcgaggtttctaagttcgtggttttcggggaacttgacgtcgaactggatgtagaggttaccgtgatcgtggtggcggtacgacggcataccctggcccttgataaccttgatgacacctataattgcgttacgttggtaccacgagagtttcgcgcggagcgcgcgcgaaaagaaaaggacttaccaggtgtgataacctcgccaggggcgattgttacagacaaccaccggtcgtcaaggtgctcaatgttgattgttccgccagcaagcgcagtaaggaggtcaatttcggcatggtagaaaaggtcgtcatccttgcgctggaatcgggggtggggcttctgctcaatctcgaaaacaacatcaccaggcatgacgccaggaagctggtcaccttcaccgcggaactcgatcttgtggccattcttgacaccacgatcaacgtggacgtgaaggaccttgcgctcgacaacagtcttcttaccatggcagttgcggcagcggtccttgtcacggatattctctccttcaccattgcagtcgggacagacagtctggaagcgctgaatcatgggacccatctggcgcatcatcgtcttcataccggaaccgttacagccagcacatgtcttgacagcgccctccttaccaccacgaccgtcgcaagtaggacagatgacggacttctggagagccaacttggatactttgccgcggtagatatcttccaggttgaccttgtggacgtggtgaatggtgcgagccttcttggggccctgatcccgcataccaccgccgaacatgccgccgaaaccaccgccgccgccgaagaactgggcgaagagatcctccgcgcccattccaccggcaccgccaccgccttcaagaccctcttcaccaagttggtcgtagatgttacgcttctgaggatcggagagaacttcgtacgccttggacatttccttgaatgtttcagcggcctctgggttgttggggttcttgtctgcacaaagcacgttaggataccgatcgctccacttcgctctcgtctatatggtcacttaccagggtggtacttgagggcacccttcttgtaagcgcttctcagctgggcctcggaggccgacgggtcaacctacaacagtcgccgttaattattttgctgcaaacgtgcacagaatgcagcatcgctacttaccccgaggatgtcgtaaaacttcgtatctttaaccattgtgatctaggtctaagcggactcaaaatgagagtagagagctcgcgaggggtaggacgaaggttccgaataaacacgaacttttttgaataaaagcaggtccgggaggacgagaagtgggaagaactgtagtcgccggacgtgagaggagaaggaggatttaggagaccgtgcggcggagggtttgaatgtgaagggagaggtttgagaggctgagaggaggatttaaaaggacctgagtgtggaagcagaaggcggcttgaagaattggaccggggctgagtgcgagaggatggggatggcaaaggctggtaagatttggtgtaagcttgcgtattagataccaggaccaggcaccaacggaacttttcctgagtgcttctttgcgaggcttcggtatcactgataccggagatacgacccagcaacggaattaactggacaagcgcaacgaggttctatattggaagatgaagagtatgttcttgaggtaacttggatagattttcacgtccagcttgaccagcctgatttactgactgggttcggaatttctatctttgtactgagattctcgtcgtttcgaccacgcaggctgcccactgaattccttgccaagcaaattcgattctcttccatcttcttccatccgcttcctgagctttcttccatcagccttcgtaatacagtacaatcctgaatttcaaacccgcttttgccttgcgtacagtgagtaatttaggtatccttgtgtttccagtgccgtgattcgagcacaaaacacaagagatttccagtacaaccagtggcactggcttttgcctcagccctcaggcggcgacaatttaacgtggttggtaagcgagctgcgcatgtaagcgagctgcgcacctgcatacagatttcccatattttgaccttttaatcaaccacaacgcctttatattaattattatttatttggacaagcatttcttctatgcccaattctatggcaggtactacatgtaggtaatgcccgtgcctttggtgtttgtgcaccttctgctggtggcccgcatggaccaggtattgcctgaaaagacgcattatgagcttcctcgagctctgtagcctcttgtacagacagaccattatcatgagctatccatctatgcgtacgagctcgctttcgcctttgtatagcattttcagcacgtagcgccctattctcttgctccaatagtatgcccttttgcattgcaatttgacagcctttaattagctggtttagggcattatgggacggtgatggtggactttttgagcgctgtttgagaaaatctctgagtaaagaagcttgctttagaagctcatcaacatttgctggtgtatgtgggcaaaaagtgcttgcctggcttccacggcttccagggggtgtaggcgtacgagcctgaatactatgatggcggcgcggtcaaggcatatattaacaacggagactatcgattccacgaatacggcactgtggccacgggcgtttcgggcgcaccgggtagcagggttgtccttacggatgtggatggcgatggttatgcggactatgtcattttggctgttgaacgggagcttcctagcgctgggtgcatggcggattcggactgcagcggtgaatgcgacgtaagtatcttctctcttctttttatactgtcaataatggcctaggaatgcgggcgatgatcgctaacctattaccctagactgaagaggactacttttgccagaatgagtaagtttgggtatcatcctcctgcctaagtacttcgaaattgacacaaaatccagtggaaagtgcaaatgcgaaaagaagccagaaaaggaatgttcaaagactgcagactgcttaggtaaatgtagcaatgtgagtagcctacccacccccatctttgccaggcggctggaggccgggcaaggaagctaatgagagaatcatcaggattataatggcttcgtctgtcaaaatgggtatgtataatctgtattcgtcatcctctatgccgtgctaagccgggaaatagagcttgccagtgcttcttccctgaggccgacgtcgctctaggccatacgacctgcaatgaagatagacaatgttcatccgaatgccgggtaaatctgcgatcaacatttagagtcttcttaactaggcctggctaatcattcatcctctgtaggagaacatgggattctattgcaaggagtgagcggcatctgttgcagtctaatatcttctcgtgccaaatctgacggagctcttagggacttcgaggagtgccactgtcttgttgcctacgtggatggaagagctacagagtatgaatgtgaccccaaggatgactgggaggtctgtgattctcactgcccggtatgtaattctcgaagctccgcagattagtgtctgacatgacaaccaagggtgccatcggtttctgcatgttctcccaacgagaagatctcacacagtaagaccaaaatctgtccaaggagccacactgtacgtcttctaacatttgccagtcgtgtctgccactgcctcgacaacgtagagtcgttgaagcgaagagatttgtccgtactaagtgccaacatcacaatggac

SEQ ID NO: 4770 - DNA, 11512 bp, Emericella nidulans
gaggctgtaggataacatgaatacccgcaggtatgggaattatttacctttttgcagactgctgctttcatgagttgtggagccatgttatgttgagagtcggatatcttggtagtttatgggggaccagcaagtgccagcggccggttatataccccatttcacccaagcaaatgtcaagaaatacttgctctacttactttgatcgattccacctacaacaatcagtctcgaggtgcataattccttggcctgcattggttggtttctgcataggcagggcaagtcagcgctgactcgccggacgccctccgtccagccccaagcgcacggtttagcggagacccggaagctggaatacgcagagaatcctgggattctggggaaatgcgcggggtatattcccagcctagagactttggcgcggctgcgggcctgctcagtggagcatggtgatatctttgccagcaccctggagaccgccggcccagctggccatgcccaacattcagggtattgatatatatatatatatggagcagcaggaaggacggcgtcagaccctgagctccacggagaagaagcgcataagtgataggagagcgcagaggactttacgcgaacgacgggaccgcgcactgagagttctagagtaggaggtgaccgagtgccgccggaatcacgctgacctcgtctgatacctgagcaagtagggtcctgagacagagcgatgatgagattcagcgcatgctcactcgtgcaaggctgccctagtgccggaaaggcttatcccgttgtcattgtcccctcgagagatgtacacagacaaggtccagcgtgctgatgtagctctgctttcccagtattatacgaatgtacgactgtaatgccagtgcacagaggacaatatcgaccctgcattgactgctgcaggagcacagatcctaagcccattcaccaccgcatctagctttgatgacccggtctcagtcggtgatcattcactggcggcgagcctcctaggacatgcaaaaaagtcgctaattccagtcacacagctcatcaagaaaggtctggtgttatggtgtgcagatgctgccgccgctcgtaccagcgtggatgctggtcccgtgtgacgaagattattatatgccccattagcatggctactgtccttgggtcctaacccaccttatgaccgaatgtccagaagttccctcgcgctcgatcttcattggacgcggcgcaaggaagtagtatcaggtcatatgcgtatctgaagaatgcgctggccgcagtaccccagcttatactgcttcctccaagtatgctgagtgtaacgctctcctcggagtcgtgactatccccggcttattcgagagctatactcactctaagtataggtatatctagcaaggagcaatgtcaatcttccccagatagatggactcattgttcttgcgatttggctgcggcatgccctggatcttcaccgacaatgcctgggccttcagagtggcccgaacaaagagtccgaatcttctggctcgtgtgtttactaaacaaggcgtacattatagttcctctaccactactcctactgacaaggcccatgtaggagctgcattcgcatggactgggcccatatcagaatgatgaagatcctgttgtgcagctacctgagaagaccacggtggacaatgtaggcattgacttggcagatgggagcaaggtgcccatcttccgtcttctgagtagcctccgccattcactatgagatattcaagtccctttattctagctgtccgaaagggtgctcagcgacgagcggcgagcttcgtccagagcgtgctcagcgcgtgaggtctactcagtgagcaaaaagcggcgaggggtgagcactgaaacggaaagggaaggccattgactctctagaaaatcaagtatatatggtaaatgaggaaaaatgaacaccaatacggagtatatagtataaggtgtaaggcatatatcacgcacatatagaaccaacgcctgagattcgagtccaccaactgcctattcgagagaagtgttaaaatatggagaaggcatgatacatatatttaatgaagagtcgcctaggtcaatgaattatcttaatcacatcgtaaagtcatgcacaccgagtctattcgtcgtcaagaccaagcccatgaagagcaattatccgcagcggtgaataggcctgctatcgctgaaaactgccggggaaaatcatgttggtttggttgctgttcacgttcgcaacagggtcagttggatattgattcggtcttgccatgttgggaggtggttgtggaggcttgtaatcggcatcgggcgcagatgtagaagggatgttggggacattgtccacatagcgccagtcggccgatgtggtggggagaccattattccaattctgagtccagtcctcggccccgagttgtagtgcattaacgtcgcgagaccaccagtcctgactttcctcaaccagattttctggtgtatcaaaggtggtcaacggagattgggctgatgttgtaggcatactgtgagcagcagtaaatgcgcggaattgtgcctcagttgggctgtaccactgctcttgtgcagactgagttgacggaactggtccatagctggtagagaccggtcttagatacgtaggttcaggttgtcgggcttcgttgtgtgcaagttgagcactgaaagatcgttgaacagcacgcattgcagatacagagacaggtccagaaggcgtggaagaatattgagaggctacgggctgtgttaggttcggagacgtacccatagaaggattggcaggctgattgcccgcagactgggatacaggttgggatagatccgtggtggcaaccacggactgggagctgacggatggcggtgaatccgaggttgttgaaggcgatgctgcttggtcccaagggccccacgagccccatcgagcatgtgtttgttcgaagacgataacggcctccctcggtagttgtacctgccacttactggcagatatgtcgagaatacgaagcgtccggcgagcacaaagccaagactctcccatctcttcgagatgtctcaggccgtgtattacatctctctgtgcattcttttcgggtagattgagaaggtggattgtcaaggctgtatgcgcaatataaacggcgatattgcagatctgcttaaacccgtatgtgcgtttataaagccgtagtaacttcgatatagcagctgccgcctgagtgcatagcttgcggggagagacatgctgaggaagcggggaggtcgactttgtgtatttgaggaaggggcggtaaaggtgaatgaggagaagttggtagaacatgctgtaatggtgtaagtacaatgctagctttcagttcctagactaacttactgcatgagtagcgcctgcggaagctggccttcgcgcggctcgagttccttcggcaagcctttcttccacgcttctaagcgagtatgaatctcacttagcttctttagctccagttgcttggacgatggcttttctttgggagcaaggtcgtagaaaaacaccactagatctccactgatcttacacaattgggaaatctggtctgcgactgcccttgtccgcgaaggttgtgcatactcccgactaggccccatatcactgtaaggagaccataatgttgattcttcgttgggtagaatatccactgcggaaacacttgtgttcgctgtcgtgaactgaggctgccgtccaagataattagaccaacatctagatcaattagcatttatctgtgtgaagttttgacagcaccatacttgtcgaagaggaaacaaccccaaaaagtgatgcgtcttgcatctatctcttcttcgctgagatctcgtaagctcgaagactcaagattcaagcccaagtcaaatgccatgcggaaactcattccgctataaacccagcctttcccttcacggccacatccggcctctcgtacggacataagagccagagcttgcacggtgcaaagctttgagttgacaagctcgtcgttgtcaaggatcaatctcttcgcttctttgaaaaagtgatcaccggcggtacacgagttgtctggatcttcacgggcccctggcacggagctgaagtgacaccccaaggccagcatcgtgttaacaagcaaggaagagcaatactggctcggcactccacgagagtaatcacggtagaagagttccttggacagagtggtgaagaaaggataatgccatgaaaagtacattgtcaagagatggctaataagctgctgatcatcagtaacggtcgtccaccgggtgacggatccctccagatcgccgttagtagccaagccaggcttgaactcgttgagttccgatccgggtggtaggaagatgaggtttgacgtcccgccaataaacttgcgggatccgtctagcacgaggttgctcatctttccagccaattcagactcgaattgatccgtctgcgcgatatcgttctcttcatgtattaccgcatttgacagccaaccagacgacttcttttcctggtttacgagagattgcgctacgtcttccaggttatcacaggaccggatttggcggaccaggtcgaaggcatcttcctcctcatagttgagcagcgcctgaatcaaagttaacaaggtagagttctagttcttaacgtgtccgtatccttcttgtaaactccttttcgccggtggtcggagtttggatcataaacgcctagtatatattagccatcttccgaggatagctgatgaatggtcacaatacaggttgtatgatagacggaggagcaggcggcgcaacttggaagatttccatcacacttgaagaccgtcagaactttgaacgcatataaacctagcggccggcacttgttacctttgatttccgcctgcggcaagcaatgcacgctgtgctcacacaacgtcgcttcgacgctggagcattgtccgtactggtcccttgacccttggacgacgacttcgtgtgaggtccgtcggaagagagttccgggtcgagcttttcccccatggtaaatcaagcccagacagatatgttcggtgacagcgacagaccaagacagcgcatgcttatcggaggaggacgctcggcgtgtttccctgtgatagatggcgaacgagacgaggagacggagacgagaatttgggcgaatctgaggcttgacaggatgcgcacaccatcgaaacggttatcgtagctcgcaatggtacaatctaggatatataaaaggcgtatgcgtcagatatgcgcggtagaataaaaccgataaagatagcggcgcgtagagcatagcaccaggctatgcgctgatggccatgccctcaaccaaataattgactctatgtctatcttggagtactcacagctctctcaccaagatcgaatatcgaaatccccgctacccgcaagtggaggcgggctctttcggagacggaggggtagagacaatccgaacagttggaatctggtggagggcctggattcgtttccgactccaaagactgggggcagctgaaggacaaggaagattattgggccagtgtgcgtgcaagatacggagtagatagcagcaagctgctcagcgaagccggagacaggctgattagtgatgtgcttcaaacataactatttcctgcggttggtctgataagccagctgactaagccctctttttgttagaacagtatctcagctttttgaactcagttctccctctgtcagatgagcggtagttctttatatctattgtcttactctatacacgacgcaagtatttcactcatactgggtatatggctgtggtagaggatagcatgtgcttctatgcttgcacagagataccaagaagatcaccggtttcactggaggcaagaaagccgagattccgccgacagctggaacaagatgcagacctgggaacactctgtcacagtgctactgagctcagcttcggagcaccgtcttcctttcagttgtcctgtgagatgctgcaatgcttgcttttgtcagtaaagttagatctggttgtttactgtgaaagagccggtcagatgactcgttgccgagccttccctaccctgacactcattccacctcatggattagtaatacctcgaatttgtatgtacagtgtagtggaaaactagtagaaaacgaggaggttgggcacgcaggcatcagcaaggcagcgacgaagcaagttttatccctgactctgttgaaacattcggctggatagtagcggtcgctcggtgggccagaaaaagaaatggaatgttcttgcgtggggatggattttctagctagttaggtggctttgtgatcatttgctgctttaggccttttggctccatcgactcttccgcaagactacggaagtgacatactcggagtaagggtaatgagagtaccagtatttatgtgtcatggctggctgtcaaagaaacagactaggtagtccgaagagaaactgggttcatatgaaccaatcaaaaaccatatagtaaaggcataacattactaattgtaattctaataccggatagcgtaatgtgcagacggtaagtaacagacccaaacggacggtccaccagcggatgccgtcacacccgcatcttccttatcttttgagtctgattgagatcatgcttatccgtccatattcttccattcttccaatccgccttcagctgtttcactctcttctttccttagcaccatccgttgctggcgtcagctagcctcagactctttatttgatcatcgaggcccttcccgtggctgttcttcccgaccgtgagacctgcaagtcgcgtgcctgcgtccttccgactccagctctaagcggtctcccgcatcgggcctccacgcttaacgtgccaacacaccggttgtgggtggatctacagcactacactactactcaccactacattatttatcatcaccgcaactctttctttctttcgtttcctaacgccgaacgtccgtaccaagtacaccggactcttcgccgcccccttctcgattcatccatgtatctcgctcagaccctcgatcagagtgcctcgtcaggcttggaacacgcctccaaaaacacctttcgcggcctcaagaagtaaacatgatggtccctaggagcttcctgttcagctctgcttcatcgccaaaacaacttgtggtttcgccgtccgctgtcgatatgagtctacgtcaggatgaaatggcgcttgaaacagcaccagacgcccagcccatgaacgtgcacaccgaccctgttgtcattcctcctaaacgaggccaccggccgacacttacccagacgcagtcgacaagaaaagaaccaagaactccgaaaagaacacgaatgacccgccagtcttcgtcgtctaccctgaatgaccggccactaccaacagccgtagcgtctatcctagaagccactgcgatccccgttcctcgacgaagtcggggtgcccgtgacactcgaaaattgcctcgtggaaatcatgtgcagcatttcagcaagctgctcatggacggtcttgatgacccgccactatacggcacaggaaattctacactggacatcttactcagccctccggaggagacggataaatcgtttgtttctagcgactgtgatagcgagacgttttcatactctgccccttgcgtctcagccgagtctgtgccgtcgctggataccgatgtagaaacaccgtccagtctctccataccgtttactccgtccagccaacgaagcccatcaagcccatctgagaagattcggcgccgaagccctcccaaatgcgagaactgtgcctcaaaccatccgcttttagacacggattcagacactgacgatgagcacacaatcactagtcgtcaatcatccccattggattccgcgccttccaagcccttcgttaccgcccgatcttttgtacgtctaggctcattcaagtcaaatctaactcgttcgctgcgggctataaaatccgcagcgcaaagtgtctcgaacttcgcatcaccatctcttcagcccgatgatttcctcacccgttcattgttaagcataactcccggaatgacagacgatcggaggccgcccccaatggatgaaacgccatctccggcactgcgtcgatatctgaatccaattatggtttcgcctacggaaatgtacagctttcaggatcaaccacatgacacatttgactcgcacaattgccccatatcagtacagatgcaaacataccatcgttcaggtagcggcgggtcccgaacggggcgcttccaattctccagctcgaagaatcgttctcgacactcgtctccgttcgaccccgaggcaccgccaatgtcccgccagcgcgagcctcgagagaatagcgatttcctccgcatagtcgtcttggagatgaacatgagacgccgaggcaaactccgtgatgacataccaactcgagcccaggtctggttacctcctcgcaagggcagtcaggccagattcgttccatacgttttcgacccggaggaggagctcgagtctgaaatcccggcccggtggataggagtgtccatcgagtctttctgatctacagctactttcacttgttacttatattttccatccttctttggctatgcacagcgccaggcgtctatattcggttcggttcgattctatatccgggcatcatggcgctctactacattggtctgtatttgcattttgggtaacctgcttggggggtgttcaacatacatgagtcaaggttagggtgtttgggcgcttaagaagattcccttttttttttttttctttttgttgttttattcttctcttctacttctcgaccttcccacataacggctataaccgaatatagaagagatacatccgatgagaccctcgttttattgccgtgtacagcttccctgtgtaagattctgcggagcagcccattgatctcatgatgctagtgttctagttttcttaccaagcagggtagcattcaatatttacacttttcccaatatggtgagcaggcggtgcaggccgctacatatcgcgccctagtgccactaacgactacgtagcacggcaatactggggtaatctaaccaccgcttatcctaagccacgcctctgaccgtactctaaccctagccttcatatcaaacctgataaagctaattggtatcgttacagggtagcgcctgagataccagtaaggagagcagggcagggcaggaccgggcagtgccgcatggaccatcaagcttgcctggctactgcttactccttatctctacccaatcgaggacgtcccaagctcgtcttgcgattcgcgaggcggacagaaaacaggttgcaggttccgtcctgggatgacatgtattttccttcgccaggctcgctagagcggaaaatagaggctgcgtcctcttgctctgcttcgactatggtaactctgtccatgatttttttttgaggtgccctcttacatcctacgtttgggtcatcaattgacggttatagcgctgaatcacagtgtctattggcatcgctctcattcagctggtgatatttgtttactgccagtggggagaggaaagaatggggaggttatatcatgaagtgattaatcggcgtggaaatgtaattcagaactagggccctgacgggagctcagaccttcatgagttgaatgttggggtatctgcgcatgtaaactggcatgtgctctgtaatgtataacttgatgcaaatggacactcgtctgtgaaattggctacgggtaatgttcgtcaacagttagcggacggcgtaaaccctagatgaccaggttgcaccgagttagacatcttgcatgattgctcaactgaggaagcaagggcacttacgctcttcatccaaaagagtattctctttccaactgtcttcaatccaatttaccttgacgatatgcggtagcttcctccgcgttgagagtgttctgcggagtttgggtaattcagacgatgtgaagtccgggtccacgaccacatgagtaatagatgtatcctttaatgaggttgtaacgctggcgcctgcgaatttggccgtgttctgggctagatggattcgttgtgattgcttcggctcagggccttctgaagccgaatcgttttcgttctcggggaaacaaaggaccagtcctttgaacagccaaccgcatggcattgtccacccggagtccaccttctcttggatgtgttctgtgaccttctgtatggcttcaggactgcagaagctgtcggtttttccatcttttgccatctgatccaggagcttgttgatgttagtgggtatcaattatccactcgtacagcacttacgtttcgcagttcctcgacagtaatatctcgggcatagctatcgttgaactgatccaggctacctgcgacgatctcttccttgtctttggtcataaaaaacatatgcctgcatcgcgttagaaagtatcaaaacccgtctgcaatctcatacccaggctcaagaggaagaagtaagtctgggagtcccgcgtcgatctcgctctgtttgatacagtcgagaatccaggacggcctaataatatcgatatcccccttcttttgcaaagatgctgcctttaccgttcctgtaggcaagtcaattaccacattgtgaaagtgcacacaccgcttactcctatctgcgatgcagattgtatcaggtacagcatcattcgtctgaaagattctgcccccgttggctttaaccaaattctccagctcagcctttgacttctttacgggcgcgttcgagtcggtcaagatgactacaatagttagcgccagtaataggagagcggcagaagatctcacagaaattgagtccatcgaatatatgtcccgatggaccggcgtattggacttcagcgttttcgtcatatcctgctatcgcaagcggtttttttgtcgttttcttgacgcgcttcttgcggaaattttcgacattgaactctttctctcgatgttcctgttcggcatgggacttgagatctaggaactcctgcacagacagagcgcttttccagtctttatccatgcgtagccgcttaaaccggggaaaccgaagcgtcaagcctattcgaaattgatcgctgactgacacagacgctgcttttacgcagataactaccgagtcctccggcttaatccacatatccggccgctcatactgggagtcaccacctgcaagctcgatgtacgtcgtgggaggcttcttgggattccactccacccacttgccgtcagtgtgatgcctgatattcgcataatcagcggctgtgaagcccccgccaactctgcagaaagagtagcacttggtaggatttga

SEQ ID NO: 4771 - DNA, 3514 bp, Emericella nidulans
gaagtgaccaagtatttccttcttggtggaggtcattgtagaccagaagggcatggtcgttatagtgatggtcagtcctgacggtacctgctccctaggtctggtgactattgcagcgtatccgctctgagatcttgagcaaggatcatagtcaatttctctggattctctcgcccaaacagcgtagcattccgtcattagcagagcaaacaaatacttgtccatatgatagagtactgcagggtcgtggatgcaatgaactgcgactagattctgcaaacgcatgggagagcatatgcgagcgtctccagggagtgtgatgtagctctggtcgttattcagtttcaactgcagtttgaataaactcttgagtttataatagcaaaacacagctctgtctgcagtaaagcaaccgagaatctcagtgcctcccagaacccaccctctacacaacatccacccatagcaccgaaaatgattaccttcatcttctatatcatgatttctattttgcttcttatgcatagaacatgaaaatcgagagctgcctagtattttgacgggcattttagtagcatatacgttccgcagttgtttgtaggtaaccctacaatcctcaagcccgcaccgccaaaacagttagtgatgccctaattgaccatttagcttcgcttcagcttctgtcgaaatcctaccagatcgcatctaatacccggcaaattgcttggctgtctgtaattatgaactatagtaacttcttgtttattactcgagactagcagttaagtagacgaaatactaaatattgctcatttctcattcaaagtgtctacatatgcctacgaaggtcctataaagcgagtggcacctgtcctcttttttatcaagtctcccgtgtctgaattcctgggatcctgaggattagtcctgaatgtggccatgcaggaatgtgtaccgtagaccatggttgcaaagatcctgcactcggtaaccagtctgtatggatatagctctgttaatatctacatcgctactattatggtaaccgcaacgccactgcgaaatccgaactgctgttccttgttccctgttagaacaccccctatagtagcctacaaaatggcagcctgtagacaagcaatttcgcaattaccccccatctggcaaatcaagtgccgtgttaggccggacccagctctgccaaatctcctagtcagatcaacttgaagcggacattcagtacggtttcactttctcttggcatctaactcagcggtacactgcttactcccgttctgtcattatagaagatttagccgagcagaagagaattgacgttcgagcaaggctgtaggtaggtagtactcagatcaggtaggcagtctttttacctcaaggtccatcgagggcgaaaattggaaattgaaaggctatggtgttgatatctagtacctgcatatccaaggcagatgaagggttaatgccgttgaggtagaaagagtatgatatctacggatatattttccagactctgcaagcatgccacttttaagtctgaaagcccaatggataacatagattcaatctctgccatggatacctgctttttatggacagtccaagcttgagatgtctgtccctggacgtagacggtatgtgctaaaatcgactatctgcatattgtttaaatgcagctatcgctccctgcaacaaacgtcccgtccgagttctcacacccacactcgcccgtgttcgggtccttgatacagcccgtcccgtacccgctctcacttccctcatcactccagtagaagatccagtagtcgtcgtctgcctcaagctcgtcgctgctgggaggggcacaggtgtacgcactgcaggtaccgtatgggtacccgttgttaccgtcatactggtggtctgtctcaaagacagcgaaggtctgcgtctctgaggtgcgtgtgttgtggctgcactcggcggcttggatcgcggttgatactttcgcggctttttttaggttagtatcactacctattgagggatacgatgagatgtgggatcgtaaatgtgaatggaaatgtaccctcgcaattcaggctattgggtttgtagccttttgtgtttgaggacgcagggtccagagttgccgtgacgatggctggggcaagggccgcgagggccgcgagagatgtgactaaatgcatcttttcaggctgtatattggtctcagatcccaggttagatgtgctctcaagcttttgctgcgacggcagatcttcgttatatagttgtccggaacaccattacgtaccctaagccgtcccacccgcttcagaagacagcactttgggctgcggagacaaggtctagataaccaggcaaacaattaaatactctgtctgaaactagtggaaacctatcacgttggtgactagtggttactctctgtgatgtcaggggctgttgcgggccagtccccactttggccgttgcgcggcgtacgcggtgggcgtttcacgtttgagcttgaaacgccttcatgacggggagtctgatgtctcgatgaagattcatttgccttgggtaagacgattccaaggaaatcacttgatgatgatacgatccatggatccgatgcagccgaggagctcagaatgggatgagagttagggtaggatcacatagctgtgtggaagaggttggctcatgctaacccaagctcccggtcttgaaggaaagatgaagtctttgatactcatgaaactttccatatagctacaagctttggtttgtttagttactagccaagacttcctgtggactggccgtgtcattatcgctatgtatcaatagcaatccgggatcataagaggtttgtttattatgcaagattgatcacagacagtcttaaatcaaacagattctcaattgtagcgactgcagaaatggacggcctcccagggctccttgtcttgatcccttctggcagcaaacctcttcgcctttctctcgctgtctctcttgatcatgacctgtggaacagacctaaaacatccattcatgtcaacacagattgggcttctggttgctatgggccaaagtcagctgcgcgctggtgacaaagtcgatataaccagagactttcattatcacgtttatctctagggatgatagcacggtcgttggaatatcgcgaccaggcactctcatgatcttgtcgcctgtccaagatctcttgcagcctacagtatccataatatctgcaacgttctatgccaagacatccacgagcttccttatactcgggcgtgtggctcaacaatcactctgatggcagggatcactaactaaactattctgagaccatcgttgctgcccaaagattgcacatttgagccatgttgagtttcgtacttcggtctagatccccaatccaatcctgcatagccccgagatccctaacctagaagacatacagcattttgtccaaatatcctgattggcccggcca

SEQ ID NO: 4772 - DNA, 7704 bp, Emericella nidulans
  unsure (1)..(7704): unsure at all n locations
gggtatctttatagtgtgggagcccagattaaattcactgcacttgcatggtggggaagtgcttttgtggctgttattggggccttgcaactcgtactgatggctcagaagaagcactcgttgatcacgatagagccagccgcacattgtcattttgcacctgatcgccctcatggccgcaaggaatctatccacattgttgtgactgacactgatgaagtcgtgaatggcgcctaaactggaattgtgtgatttatatactcaaagtcatcgtggtgatttttttttgccgactggcaattgtatatagactttaaaatatgagcagcggccttctgccctgaaataaaatacgtcgttcttcgctttaacaaaatatttcgagtgcccctagaaagtataccgcatttacgttgtccctcaagcgaaggtgtgggcccgcctaacttactatggctagtgtttgtttacttggctggactggtggacgggccaaccaccctgcaacaaactcactgaagacttcataacaaaccatccgcaattttggtttcttgcgacaacaaacacagctcctactacactagggaggtgctgatcgcgctgctacacggcgccttgtggaagctgcttctgcttcattgaattgttcttgtttcaatactcttctttattgccatttctaacaagaaattgaccgaccatgtcaaatcctctttctcctttgacgaactcccggcagaattcgcgagccccttcgtcgagcaatgaagattctatcgctaagatcccaagcacccaaggccaattagctatttaccccgagatagagaacccacttttcggtccgaagcaactgctcgatgatgaacctacaagtatccgccaaagctttggctaccacaatgatgatttcaagacacgggacgatcaaattggtgaagaggatgctctatctttcaatgatctacagagctcgccttttcgacccgatggacgggatgatacagttgacatgcaaatgctacaaaaataccaaacgtcccatgatatgagtgggctctctacgactccgagaaagcgatcctacgaccaggcacctgatgttcatgatctcgaacgtgacgagatcgagaggcataagagatcagtaggcagaaaagacattccagacatcaacatctatgtcgacgaggattccagaatcagttatgaccagagcgcacatgatgtcacaaagcaagacatggagaatagcaatatgaaagaaaagcaacatgaaggcatgagcacagttctcaacgaagaacacgaagatatctcttccagggaccaaaacgactttgatgatgacgcaagcgccgttatggttgacgatgaaacccatgatcttatggacgacacctgtctcagtacattctcggcggttccaaatgtagatatgacagccttcgcaaacttgccgggaggatctccgttcaagacccctcgacctcttcctgagtttcctgctgagaacaaagataccaggcgcgggagtatggaaccagctactccggttacagctaaaaggtctcccagcaaaaatatccttttagatatgagctctcctgctggtttgcccactcctggaaagagacagcgagatgacccaaccccaagtgaaacacccaacttgcttgatctcacagatagcatcgacctttttcctcgccgccagcggtatatcatgcagcaacaaggaagatactcgccatcgcgtcggtcgcctctgaggaacccaaggtcacccgcaaagacgagtctactggacttcgatatccctgcggctcccacacctcgatctatacccactgtcacccctcgggaattggagtctctcaaatccggctttctctcggaaatttcttctttgaaggctacacttagtggaaaggaagctgaagtttctagcctcaagaaagccgtgtcagacgcagagcgtagggtcggggaggcgttggaagaagttcgcattgaagctgctcgtaaagagaccctagaaatcgagcaggcggagtggcagcggagaggccgggaaatggaagacgtgctgcgatccgttagagccgatatacttgaaggtgagcaggagcgggacgggttgcagaaaaaaaatgaagaggcagagagaggcaaggagcagcttcaacgccgtatagtagagctcgaaactcaactcagtgcagcccaaaagtcagcggtatgtgagcacacgacatctgaccccgcggcgccatcaaagcggcccgaagagactgcaaaagaaattccaagatgcagttgagaaagttgctcgtgaccttcactcgctctataaagaaaagcatgagacgaaggttgcgcctctcaagaaaagctacgaagcacgctgggagaaacgattgcgagaagccgagaagaagctcaaagctgcaaatgacgaatgcgagcaactcaaagctgagcgagatgcggcgctgcaggagtccgcacgccctgatgctagcatgatatctcgtgagaacgaacaacatgaagcagcgaagcacgtcttcgaggcgcaaatcgcgggtcttcagcaagagataaccattctcaagagcaacagcgaacagctgcgtgccgagctcaaggcagaacgagcggagaagggcgatcttgttgctcttgtggaggagtggttgtcaatgcagaatcaacagcccgccccatctccacaagccaaaagtcatgaggtgacgccggagcctgttcccaacgaacagctcaccccaactgaagatgccgaacgcgaagtcactcgcagcagctccagtggactccgcgggccgagttcaggttccgtttctacttcgagtcatggtgaaaagaagattccaaggttcggcgcaccggcgggtcggcatgtacgaggaaccagcggcggcaaatccggcattgctgtctttacgcctggtcgaagcggcataatgggctcgattgagcggatgggccgtggtggtgctgcctagataagtcggaagttgtgatgattttgttattattctcgtactttcacgatgttatgtcctgctttacgtttttgtgttttctgtcagtgtatatcggatcgagcctcggtacataggacggtttgttttgcttgccagtcgagatatcccccgaacgcttttccttgatcccactcgcgtcccttatttttgtgagatatttctactagtctgaattgaactgcatggcgattagaccaattcagatttggcctttcagcggtgcgcactgattttctgttccactaatccatattagtcgttgccgcgttggcgcagatatataagcaatgctcaatactccacagaatatatttgtatacttctggtatacttccaacattgttaattagtatgcattggaaatcactgagcgtagcccactgatgaattcctattaagtgctcgattgacacgaacttagctggcgatgcgtcggtggtcgctcgtccgagcgggcatcatcttgacgatttgggtaatttagacgacacttgatatgggcacttgaaccaatacaacccagccgcaaaccaaaactatagtcacgctctagatgctttgtaatggtggattacctacctcnctggtgtggggttggcagttgacaagctgggatgccgcatgacagtgggattgccccgcaatttggaactaccccgcgttgaatggagtcgccgtctccgacaatagacggcggggttacaacttacatgccagagcaggggggttcccgaatcagaaatcggaggagatggagcttgggctgtggaaggggaaaacagaaaagtgctgaatttgagcacgagaccatatctgcgtggcttgattgcctcatcattcctctcgaccgagaaatcgtgtttgctcagttcaatattgctatcgaggagcaggggcagcagaactgatacgaaggtggcgttagggggagccagtggactcagataatattgtaatcagcgcgcagggctggatgaaaccattgatggatagtagggaggggtaaagattggataaacatcccggccctcaggatggcgtgtcgcactgacagtgtcttttgatatggttgcgcctgcgggactcactagtaattcctttgcttgtactttctgcaaatcaacgaggggatcgggccgtagaccggaggacctgtgcgtcggactcgggagatgtccgatggagttggactcgatgccgatgattcgtgtttgtggctcgccgctggtgagtgtacagtcctaacgtcgatacctagcgataaaggtatctttcgtcattgaggggcggagatcgtctggggactggggagatggagttcaaggcaagccaaggacaagctcaagctcaggcaccatcaatctcaatctacgggtctccagctccccgtgtccgactccacggtatctggatttaatctctttacggattctgggaaaacgccaagagaccattatggagagattcggaaacaaggaattttacgggggatttcacggggatttcacggggtgcttggggaagccaggaaaattcgatgctaaagcgggcaagtattctgcccgtcccacatttgccaccgccatagctgttttgattggagcgaggacttcccgttgcttcctgagtcggaaatccagcttactgccaggtggctgcggtcaactgcggtcagttgcgggcctcataaacttggtcttgggctcgtgatgcactgagttttcaggaggattgctattgctctcggtgattcgcagtaattattggtagtatactccaaggatttcaatagactgacaagaatagtctaagaaatgtaatttttagcaacaagttttcgtatcgccctatttctgatatccttgacattcttgctgcccaagacctacagagaagaaatcgagacttgactgtggaccgtctatttgtacaggcggcgaagtaccatgctaacaaccagggcttttcggggtatgatatcagacagacaacgattatgaggatccttccgcagcatgtagccccatatagccgacttgcattaaataattaaagctgccgatcctggtaagatcggactagattcctccgaccatcggcgctcggcattcctcctcacgtggtttggatctcccgcagtttgaagtcaaaacggcgcacgagacaggtacgatcttcttaatcgaatacagcggtttcctgccattgctggaccgaatcatggacaatggcaattactctgtgtaggaaacaccttcaaccatggtctagaatttgctaccgtactgctgttgatatcctgcaaagcccagaagcctagtgcgacattttctggtcgtctgagctccatctgaaaccttgagaggtttggagaccagcatcaccaaaagtccagtcagtttagtgcagatggcgtgggttgctggcttcgggaatgggatcctcagacagtcggctctagtctggatcaggcagttggcggggtgccgtttgcgcgttatcctcgtttctaggcctccaagcgtgatttaccagccctgcgaaagatttctactcggtgtcataaatcacaagtttgtaacacatccgcatgtacatctaccgaagggtaggacatatgatctctggatccgaactccttgccggccactctgagatgaatgtcactggattccagaatgctagattctggcccgtcacagacggcttgccggtctcagaaccgggcctcatcaaacaatgtcccttgcaaagcttaccgccgtttatcgcccacaaaaaatgctcgtatgaccagggttttgcgggcttgcacagaccttggatccctatttggcagttattctattaatgttggataatcgcaattctacgtgagaaagataataccgcacgttgctcggcgaagctctcctgctgggcaggattccggaccgctggcggaactccctcctggcagcagtgcggacctcgggccatggtgagcaaggaccctgacctgtccacgaccttgatcagcgtctctgtatatcggtaagcctattcccgctcgctggacataaagcacatgctctggatcatttttcctctccaacacctagacgattctgaatgagtaatataaggcctcggagtcaaagccgaggggatgtccaagcttgcatccgctggccaatgacaattcaaattgaagcggaatcttttccgagctgccctggaggaggacttgcgaaggcagcagccagctctttcagtttctgccacagtaaaataataatatgcataataaatgtgatgtcgggttggctggcctcggcgatcgccggcctttccggacaggaaaataatgaccaatgatcgagtcacaattttggcacttttcttgctgcaaacagcatgtggctagaaaggtaacgtgaccgggccgaacacgggtatggggagtcaatctttaagcagaaagtggtgggggaagggtgtggaactgaatggctactgactttcatttattatgccagacttggcgattttttaatgtggggaactgtttacaggaagtgattggagtatcaggacagaaaatgcgggcctagcgttgtaagcaggggcagtgagtggctacgccgagcctggcccgctcttgagcccttcgcctggtgaggtaatttatacaaggatggccggcgctaggcgcaaagcgcgaatcctcgaaaggcggtagtttggttcagcggttctggtgctggtctgggggagcactggagcagcattcctcaatggcaagccaagtggatctgggggactcatcatcccccaacgccagcaacgcctcctgaatgacggtcgagtggaaacactggaaagcgctgtgccatccaaatccacattcacatccgcatccctgttacttaaacttccttttccccatgccccggtcttgtctcgattttcgatctctggacgacggatgacgctagcaacgtggttctttgtacctgcaaaaaaaagttgataatccattaaaaacttcccatacaaaaggacaatctcccctcttatctactgttgctgccaccatttaacgtggttactgccgtgtcacgttcagttctttattattttcattccctttgtgacttctataccaatcttgacgacttctctcccgatcctgagtgtgaacatcacattttgttttgaattatcaacggatgacacgcagtcgatttggttgacctgcatatacataatgactgattctcctgttgcaccaaatccggctgtcgagacagaccccaaaagcaagcgcaaggcctcgtcagcaggactctcggctaattctcgtccggttaaacgacgcgcctcaaaggcttgctgctgctgccgcgcgcgtaaggtacgctgtgatgtggtagaaaatggttcaccgtgcacaaattgccggctggaccaagtagagtgtgtggttacagaaagcaaacgaagaaagtgcgtctggtccatcttcattcagatagctccctgtgactaattcgtcgctcaggaaatctcgagttgacacagagatctcgaatcctcagctttcccagtcgccagccgagatactcgatgatggcgcactttttggtgg

SEQ ID NO: 4773 - DNA, 7886 bp, Emericella nidulans
  unsure (1)..(7886): unsure at all n locations
gatctgggatagcgatcggagagctgaggagtgtcgagagccaaaacgattcctcggtgttgagaatcgatgcatggaatgtgagtcgtcactccctcggcatatcattgatctcaaatgacgaaattcagttcgcgtcggactggaaccggacggtgtttgcgtgaggtgggcgtactaaggctggagaactgtcacatcccactggcttcataatcagcggcggtctcggccactgcgcacgtgattgaagagttctgctggcgaaagttcgggaccaacaagccgatttttgctgctttgcttagagatcaagaaccagacagccttcgcttcccacttacatttcttatctgatcttcgtccagaagactcttcttcttagctaataccgatcgtccagcccttttttaactcttctgctgtcgtcgtgccttgtccccacccgttgcccctcgagcctaattaaaacccccctcttcccttctatcttcactcacttttcattctacaaccgccaatctgttttcttcagcttttcgtcgatttcccttctcttctactcttaggtcttccctagggttcactgcagccgctgcttcttcctatcgtcagaactctcccacatcgtcgccagtcctatcaaactcgttctcgacgccaccgcgcgtcaattcaacatcaaggatggttcactccaaagtagttagtatgtgtctctttgttttcaatcaatgatctacattgtgcaacatgtccaaagaagatgaagacgagactaaccctttgaaaagtcatcggctccggccccgccgctcacaccgacgccatctacctttcgcgggcggaactcaagcctgtcctttacgagggtatgctggccaatggcaccgcagccggtggccagcttaccacgaccactgatgtcgagaactttcccggttttccggacggaattggtggctccgagctgatggacgccatgcgcaagcaatccatccgcttcgggactgaggtcatcaccgagactatctcccgtgtcgacctttcacagaggcccttcaagctgtggactgagtggaacgacggtcccgacaacgagcctgcccgcaccgctgatgctgtcatcattgccactggtgccaatgcccgccgtctcaaccttcctggtgaggatgtatactggcagaacggtatcagcgcctgcgctgtctgcgatggtgccgtgcccatcttccgcaacaagcccctcttcgtcatcggcggtggtgattccgccgctgaggaggccatcttcctcaccaagtacggtagcagcgttaccgtgcttgtccgccgcgacaagctccgcgcttccaaggccatggccagccgcctcttggctaaccccaaggttaccgtccgcttcaacaccgttgctaccgaggttcttggtgagaagaagctcaacggcctgatgacccacctccgcgtgaagaatgtccttactggcgaggaagagaccctagaggctaacggtcttttctacgccgtcggccatgaccccgccactgctcttgtcaagggccaggtcgaactcgatgaggacggatacatcgctaccaagcccggtaccagctttaccagcgttgagggtgtttttgcttgcggtgacgtccaggacaagcgctaccgccaggccatcaccagtgcgggatctggttgcattgctgctctcgaggctgagcgattcatcggcgagtccgagtcaaacgaagagataccccctgctcacgctaaccccgctctgtaaatacacatcccacactacagtacattttcctctcgtctcgcccgtccacatcactctcgatagatgaggcttccgaaccccatctccatcatccctaccatttagacggctttccacatgacatgatttgttcctagacttcagcgttttcattttctttcttgttacttctccggttgattctttcggtcggtggctacaatacgttacgttatgaatagaatagaccgtgatagaatattctgccagggttcgttacctcaatttctcaattcgtctatttgatcgttcgtagttgtaaagatacagtggaaggccggtcaaacctcttgacctgctgatacctaactaggtggaggtaaacgcaatctacttttcaaaccttaaggaccatgcatcaagataaagactaacatggtttcaagagttggttcggctagaatatgattcccgataagataattagtttgatttggccctttttaacgttggttgaggagaaaagagtatgcagtggcgctgttattgttgaaccaactccaacccatccctggtctaggaccgttagcgacgtttggattttgagtttgacccggattcggatttgcatttaagttcgtggacccgttcgtgtcttgcgtgctaccaccatataacccagatggcgatccgggtggttggggtggttggagtgattgagaagcaacagcagcagcggcaggagtagactcatttgcactatatccattcacattcggcttgctcattttggctgacccaggtagcggcccaaatagagggacagtcgatggaccagcaggggcagaataggatgcgcttgagctacaactctctgtattgcctgcggtagcctcagataacccaggtggcggcacggacggaggcggatgtgatggagtagcagctggagtagatgcgtttgcgtcgtacccattcgtaaacagcgtgctggaccctgctaacccagctgacgtcccagacggatatggcgaggcagcagaaggagtagatatcccagctaatcctgatgaggttgatggcccaaatggaggggttggcgcagcagcaggggaatatgccgcacctaactccttgttcgtggaatcaagcttctttctcggcggttcaccaaactctgtagcaacccaccactcaaatgggttgtcctgctgccacttcttcttcgctgcctctttcctcctttcccattccacattatccctcttccacttcgccgcgatctccgcgcccgtctgccgattgacctccgcctgttcgaggtacgggcgtttcacttcctccggcgcctggcgccacatgaggcctagcgcagcgcggacggtgtcgcggggagcctttgcgttggggtcttttgttatggcctggtactctgcatcgcagtcggcgcgggctttggccatgaaatctttttggtagaggatgaagggattgatgcctgggcggccggggcgagggattggtggaccgatttcagtatagacggcggcattcatggcctggtcataggcagctctagagaggggttcgaatgacgatgttactgttgatgttgatgttggcagctggggttgttggggtggtacttctggggtattggtgtccgtgtctagtgggatgtgtggagtgttggagggcatgccattagtattgcccgagtttgtgtttttgcctttctctgggacgaggggtgtcggtataggaataggccctaggatggaatcgatgatctcggatgcggcccgaagccctgagatgtatgccccgtgtacggtagcgggatgagtgccgcaggtggcctcgccagcgaagtagaggtttccgaccgatttggccatgagatcgtaatcccctggaagtgcctccgcagcaacataggagtatgtccctctggtgaacttgtcgctagcccagcgtgtgatgattgtctctaaagggtcagggacagccacctgtttgaagacgttacgtagctgactcatgacttcagcaacaatttcagcatcaggagtgcgctctgcctggtgagcagcgtcacctgccataagagcgatcaatactggaagccccgtggttttcatacagttccaaaacagatagaagcggccccggttcgaggcataatcttcctgagccatgctatccctgttggtgggctcgcgcaaaaggccaaacatatcccgttcagtgtcccagaagggctggtcaaacgctaatatgactttgttcatcactccaaacccaaggcgatcaatggctcctactttccaatcaggtaaaggtggagaaaattggactgttcggtgctgcaaagttcctaaggagccagtgtacacgaccatatccgccgtgatagattcaccatcttcgcaatgtactaccgtggtatgtttgatcgagccggaggcatcgtatgtaatgcgtgaaacagtcttattcgttcggacgtgcaatttcgttggatacgaccatagcccgtaagggacccgttggtaccccccaatgatttgcgaatgttctccctcaaactcattccccatatcttggtcccacccggaaagactgaggttattaatgtttgtggcgttcgcatattcgaggttggcgaagtgccaattgagtaagcgcagatccttaggagtcagagggagcatgcgttgatattggcggacaccttcatccattgttttacctaaagtctggaactttgatgctttggcaatcgggtccaaattaattctttgggacactgaaatacctgggttgagcttccagcccatagcttcgcatgcaacgacagctgggttctcttccgcctcgtcagtgtccactacaggcccagtggctggcttgagttcagcagtcttgtggcctacaccgcggcgaatgcgttttgccggaaacagtagaccaacggttccagcttgtcttgcctcttcatactgtctcaccgtgaccccatcactcgttgttatgtcccggcccaaatcaataagatcgcgctcgccctcagctgtaggtgctaccacagacttgtacctataatctcctgagcggtccagtacatcattataaagcctttcggctgttgcgtctcgtacttcgtccaccggagttccatctatatcataaatggtagatatgtcacgaagcagatggtacgaaagcgctagctggccgcgtatgatctggtctagaggattaccacggtcaaatccgacaacaatttgagcgcccatctcgacttttggagtaagtcccgggggcaaagtagatgattgacgactttgtagaggatgcgagtatatacgccctccgattcttcgcctaccctcaagcacaacaacacgcggggagttgaggttatcgcgaaagtgtttaaagaacccttccagctgccgagcgcagcccaaacccgccatccctgctccaatgatgacaatcacgggaccttctttccgacggcccttttttgagggcacaaggccttctgggatctcgaggcagccgaaattgatgtatccgttccgtatcagccattcatatgcaaatgatgcaagattcatccagcggtagtctttagcacaacccaaagcctcttctttgctcacactaaccataggattgcgggtccagagtcgaagaatcccgtttcgtatattaaggtagacagtaacatgaaggtggcacaagtgatcctgcagcgcttcttgttctttcggatgaagggcgtaagggttgagcctcgacgcatacgctgccgccacacactgctgggcatatactgctgtcggaaggcgcgttggaatggaagaacgtggacggaaaaaaacaggtcccggagtgtcatcagcttttgtagaactcacagatgtagaagacgaagcgagattcacactcgatggcgtagtagactttccattgctggaggcagacagaacgggagtagacgtagaatcattcggcgtgctcccgttcgtctcctttacgagatcgtaactcatatagttgatgccttggtttccggcatcaaccccataagatttagcgttagaaacctgaggtctggggccaaaaccatcgttatggaccgaccatgaatttgttgtacattgctgcggttgcactctgtctggctgctgaagttgtttcgcaggcggacagctactgttaacaacaacactcgaaggaatgtattgacggattgtctctgtctgagaggaatagcttcctggggcacgcattgccacgaaaggaacctccgtcatcgttggaatcgtgcaggggacgtgataattatgacatgcaaacccagcctcgagctaaagtattgagaacattccagctatgagtaagagcctagaatgtgatctcgatccattattacgccggctctttgtgaagatatcaagtgtgaacatatccatccatgtgggtccacttttcatacgaaaattgtgaggtcgggaaggagaggcaacgagcacaggactcgggagggtcagatgtttacgatgaaacctggaatcgaggttaaaatagtacaaatgatacgccggaaaggaaagtctgatgatatggacgtttaagtatatcagcgtagggcctcgactcactgatagtgcggtgggttcgcagagccacccttgcaagttggaccactcgaggcggaagcgacaggaagtgattcagattgagttcaaggctgatgggaggagatcaaagccagaaggagtgacaaaatgtacttgagtggcttgactggaccagcttgtccctgggggacgatggagggagggagatggggagccttgattgacttagtggtagtcttaacaggcaaggaagactcttggcgtcccccggcccgatgcggcgatccccaccacctggccatcccgatttgtacattgcaatattctaaaggtagacattacttgggacctaatatttcataactggcaaaaaaagggaatgatccaatctgactgtgattatcatcatgccaactaaatgctacgcaggacgtgattcatgacgaggggctctatagacatagatcctctaggaaaccaaacacctgccccaggcagtttacaagttcaaagtctaatgtcgaacgtgtgtatgtagggtatatgtgtcggtattcgtcccgtccccgtctcgaaagacgtctgattcgttgtctgtaaactcatccttgtatggtgactttgaccgtcgagaggaaaggtcatcatcgtcgataaccaagtcaacattatcatcgtcaaagtcattgaacccaatacgttcctcttcatctcgcgcaagggtcgtcgctgcagcgttgacaatgggatcgtcggaaaacgcgcgctgtggacggtgagccgccgtggtcggcctcgagcgagtgtctaatatcttctctctctctttcctccaactgctgagcccgcgccagagtcctaagaaaagtcagtagcagttcgtgaaggaattgacgtgggtaccccttaccttctataaaaaatacccacccggcaaagaagcccgcggctctgggaacaatgatgttaaatatgtttataagctttgagcctagactcatctcttctcctttctcgtttaatatgcgtatcctactgccaatgaaggcaggaacgagcagctttgggtagataatagcggtggcgagcccgtacatcaggggttgctccgtgggaaaggtagaaatcgccccgttgcagattgagtagggcagtgggcaaaggcgaatcatgcatatcagcttaagtccatcatatgttcagcgtcagcgcaagagctgcaaaccgtttgtcgcgctcaacaagtcggtgtacaaatttggacaggacggtgtgcgatgcgatgaaggagcatattgagcctagcgccgtggccgacgcataaagaagccatctagtgtcggctatgagtgagtcgatggcggtgggaagcaagttcttctaacccttaccacaccccatatatgtagccagtctccgtacaaaacgtagnccccccttccaacggaggaaaataaacg

SEQ ID NO: 4774 - DNA, 2743 bp, Emericella nidulans
aagcccaaggcatctctacaagacgcgacgtttctagtttcctatatatgatggcgtcgcgaagaatgcagcaagacagctgcactcgccatgtgaccgtttcagggttaaacaacctcaacagtcttggagagagtttggatcgggctccgatgttgcccagcaacaaactatctcaggaaataggttataacatatctttgataatcaagaaaactgaacgagcgaaccctaaggattgagatgattgttcagctgacagggctccgcggaggggcgtcacggatcgccgcgacgatgttgtgaggctcactcaggctagccacctccaacggccgataagcaggcgacggccaaggtgagtgtggagcctggcctggactggctggcaacaaaagtgccttcttcctcagacaagacgatccaacaaagtgaacccgaccatgtcttcccgccaggtcacctttgctgctgcccagctgggcccgatccaacgaagcgactcacgcgagagcgttctgtcgcgcatgacatctctgctagacgaggccgtatcgcaaagtccaccagcccaagtggttgttttccccgagctggccttcacgaccttcttcccgcgctacttcttcccggacgagcaagagctgcacagctacttcgagcccgaatcatccagcagcccgatcgatcagtctccaaacgtgaagccgctcttcgaccatgccaagaagcttggggtcgatgtctacgtgggatatgcagaggcttggaaggacggcgaaacaagagaattctacaactcggccgtttactactctggacgatcaggcacggtgctggccaagtaccgcaaggtccacctcccgggagtcgtcgagccgtttcctgaacccggcgcaacgcagcagctggaaaaacgatacttcaagaacggcgacggcttccaggcattccgggtcccgggactagtgcgagacgctctgaaggcgacaccgaacgcacccccggcacccgacggccagggcgactccatcttcggcatgctcatctgcaacgaccgccggtggccagaggcatggcgtgcgtacggtctccagggcgcagaggtcgttttatgcggatacaacacgacagcctatgcgccccagcttcttggaagcgacctgtatgaatcaaagccactcagtcgggaagaagcggaaaaagaagtcctgttccacaatcgactcagtctgacggcgaacagctacatgaatgcatatttcagcgtcaacgtggccaaggccggcgaagaggacggccatccacttattgcggggacgtgcattgtcgaccccaagggatatgtggtcgccgaggcccgcaccaagggggacgagattgtgagcgcgacgctggatctcagaaaatgccgagctggcaagaccaagacatttgacttaggccgtcatcggcgattagacgcatacggactgttgctggagagagccggcgtggaagagccacccttgttgtcgtgaagtgcgcagacttgattgggagcaaatcgacggaaacgccaagactgagattgcgtagagcggtctccatcacgtgcccgactcgaagtatcggaggatactgccctttggtaccgcctgttttggggggagttttgcttagtcgttacttagtaagctaagtaacgtatttcccgggtgatccgtaatttttccataatctcgaacgcgtcaaccaccctctatcttcaaccaactatcatgccacgaaaagcgcataaaacgcgccaggaattaatagagcaagaaggtaggattaaatatgctataagcaatttaaaaaatggaaaaatttgcaatgctcaggaagctagccgcatttataatgtgcctcctacaaccctacatgattagatgaagggccacctatcttaaccagaactccataaccagaactacaggctatctctgcttcaggaggaagctttaatagcttggatagtatccctggatatacatagcactgcccctaggccctcccaggtacaagaaatagcgcaaataatcttggatgctgcaatattaactctatctctacctattagcaaaaactgggttacagagttcaccaagaggcgcccggaggttaaaactaggtttgcgcaaaagattaatcgccaaagagtactatataaggatcctaggattattggttaatagtttgatgagctgtagaaaaccagagattagtaggggattcaggataaggatatctacaactttaataaaactaggtttgctatgggtcttattgcaacaataaaggtggtttccagagcagaaatgcctggtaaaccatggctaatacagccagggaattgggaataggttactactattaaatatatcaatactagggggtggccaattccctctaccattatctttaaaggaaaagtccatatggagggatggtttgataaaggcacaatccctggcaattagaggattaaaataagtgctaatagatggactatagacataattggcctttgctggcttcaaaaagtctttattccagctacaactgagtgtacaaggggggggtattgacttcttattctagatagacatggaagctacctaatgcctgagtttgaccatacatgtaaggcgaataatattatacctctttacatgcctgcgtattcatcttacctcctccagcctttggatgttggttg

SEQ ID NO: 4775 - DNA, 6645 bp, Emericella nidulans
gaactgcttgtttgtagggtgattctcggtatcgccgtatgcctgctttattttttacttttctttgtgccgccaatactgacgatcgtcctgaacagtttggaaccaaagcctcggttgctcccatcttcgccgcagaggctgcaatggaaatgtcccgtgggcggatcctgatgctatggcagatgtttgatgccttgtaagtattctctctctctctctccatctctctctgggtctgacctcgtgctaagatgaggacagcggtattatgctcggattcgtggttgcgttgatagcccctgtgagctgggaggttcagcttggacttgccctgattccatcattagcccagattcttgttgtattgctatgtcctgaatccccccggctcctgatccgtaacaaacgctacggagaggcgtataaaagcctgcggcgacttcgcaggctggaacttcaggccgcgcgcgacctctatttcatccactttcagctgcgacaggaggtcaggctgtacgatctggagcaggagatcggaagttcctccttcccgtaccaggactacgtggaaaaaatagacagtttcaagcgcatgctgtaccttttcactataccccggaacagaagggcatgtctcgttgcctttctcgtcatgacttcccagcagctatgcggtgtaagtagacgaggcggcgaaatactgcactgcagctctggttaacccactgttagatcaatgttctcgcgtactattcgtctattgtttttgggaatgcagcatccacgaacaagatagacctactcagtttcggttcgtcacctcttccccttcacaagctggttgatgtctgaccaccacttcttgctaggttttggagcatcgaattttgtcttcaccctgttggcattcgttctcattgattcaaaggggcgcagatttacccttttgacatccttcttctttatgacattcaccctgcttggagcaagcttctgcttcaacattgaacctgaaggaagccgtgtcgcagcggtcgtggttaccttcattctcctatatacggcatcatactcgatcggcgccggccctgttccattcacgttaagcgcggaaatcttccctctagcattccgaggtgagatacatctgaccctcttgtcttcccactacggcaactgataatgccatcgccactgtatcagaggtcgggatgagtttcagtgtcatggtgaacttcctcggccttggtttgcttgtcctgttcgtcccccgcatcacccgcagttggtcgcctaccgaaaacgagcgagtcggtcagcgtaatgtcctgcttctatttacgtatgttggccctcctaccactgaataggggacagttggctaatactaagaagaggctgaacgccatcatgctttttttgctctttctaatggtataggaacccgtctctggctcggaattctaaatgcccttctaatgatattctaacaatcgccgtcttagattccaagcacggagaggaaggcacttgaggaaatgaaccaactgtgtatgtcctattgacaaacgattctcagagtctgactcgacgttttcacgcagttaccgaaccgaccaagggccgtgtcgccgccaataccagatccatagtcaacgttttcagaccgagggatgaggacaatactgccgctcctgatatcgctcttcggcaggttcagatcaatgagctgcagcaagctgaagaaggaggccaagcatgatcgttcaccacacagctcggtagtaaggtgatctgttctctgtcctggcgtagaaaggctgacgaatagttctatgtcttccatctcatcaacagaggctgagggaaggcttcattctacccttcgagccggccagctctcctcaagatgtctttcatgggcccgaaaccacccatattactttttggtatcttccatgttttatcgacatcagtaactagaatcttcatcgcttgttgatcgcgcctctccagagcaaaatcgactgctgttttatgattctgtttgcgcgaagtagcgcaagctttcgcacggaggctgatcaactgttccatgagtttataacgagcttgcccagacttcatatatagagtgagctctagaggtgttcggtccaatgtgtttaatatgttcgcgttgagctttaccctgctcgcaggctgcttttgaatgaaaacgtctattatttcggtgtttttgcattctgtcgcaaaatggagacacgtatacccatcttcaccctggaggttccaatctgctccctgatcgatcaggtactccgccgttccacaatggccccttttgcaggcatacatcagcggcgtattgctgcgcgtatcccgctcgtcgatttgcgcacccttctgatgcagaaacttgacaactttagtataccccttttctgcagcgtggcagaggggggtcaagcgttcgtcgtactgctctatgctcgaatacgctcggatactcccgcgaagaaaagacttaatctggaccaatgcatcatcctcgcgttggttctctatagcgagaaatacggggttgggactgcgatcaacggtgtttgcggatttggcgtcggaaactgaatctttctgtggtctctgggactcgagctcaagagggatcacggtgtgtgtgaattcctcgcaagtgtccgtgatctgtttgaggtcgttatggaggtcccaagcagtgggtcgcgcacttttgtccatagacagcatcgatttcaagagatttccacatcttgttgtcatattgcaccccgagtcacagaattgatctaacagtctcgtcacatacggattgacagttgtcccgcgataaaagtagtcattcctatccgggtcatccttcaatctcagctcgtcgaactgtcgcaatccttcgatgccgtggcgttttcggcaaactacacgacacatgatgcagcccagagaccaaatatcggtgtatgaacttctctccttttcttttggtaggtaagtacccgttctctcagagtattcgacctgatctgtcgcctggaccgcgtttgcgccggatctcgctgcggctgcattggaacaaccgtcatagtgccgggaccagccgaaatctgagagcatccatgtccaggggttatcagaatgatttatcagctttactaggacatttttcggcgtgagatccagatggtggataacataaccggacgcgcctggagtatgcagtgagtagagagcatgggcaatatttgcgacctgcttgagtaatgatttcagactgatattggagtcaactctaccctcttctgtcaagaaggtctcgaggttacaatcagcaacgtccatcaagatgctgtactccgattcgaggctgatcatggcaagcgggtagacgatgtgattgtgctgctgaaggcctttctccagtagcgacatgatcactcgttcacggtcaaagtagatcttgtcattgaagcgttttcgagcaatgaccttgggctgcggaggggagcgggttagtctctgtcgaacggggagcttcctggccctactcactttgatattgcattccccgcttttctggaactggccttcggcgataatctctcgagtgacggtgctgcagccccctcttccaagcactgagactgactcattaagaagaaaaggcagtcgcgcaccgtccgagacttgcacatactcactgtggccgctactgctcaacatgatatccctcttgcaggccataatcttcccaaattgaatgactatcgggttgaaagccgcaatccaattttggaagttcagtgcgtagctgactcctaagcactgctctaggtccggtgatgatagcttcctcactgcctcatccgtatttcgagtcccgcaatctcgcccccgaagaaaaaggttcgcaaattcatgccacccattccacgctatcatcacgagaattgagaacgtccgcagcagataattttcacgtgcatggcttcttcatccgcgagaccgaggttgctaaggatcacaaagccattctgttccgtccaaactttgcagaggctgtcgtatgtaatgaatttccggtcatttctgtttgtatccgtgttttccattcttctccgtaatgctttcgcgtactgttccattggagactctgtcaaggacggcgacattgacccggagggcgaagcggcttgcgcttcccggccgcggggcatgcgaaacgttaataggctttttcttgtcatgtgtctatagtctgagcttctggatctgctgtgagccgtcgtcaggctatagtggttggcttggattcacgcaaatgaggctcttgaatacttagaaacggctaccccggtttggcatggccagtagctggatttcgaaggtggatgatgcgccacagagtgcagagatgtatgactctgctccatctattgaagaaacggcgggacctgccgaaatatgagactgcagagcgatgatcctattgtgtaatacccatgtataccactagttatgcagcttacggccggatcatcttgatacgaagtctcaggataggccaaaaaaagaaaataaaaaaagaaaaaaaagaaagaaagaaagaaaaaggaaggagagaagagaggccaggagaagaatagggggacaagaaggaaaggagagagagaagagctattaaaaaaacgaacgggaaggcctttacgaggtcgtcgaccttgtgaggcccaaagacagcagatgatttgttcaactcagtatcccctgatattgttcagcctaatgttttcctcttataaagatattctagtattctaatctgaacacgaccactgtttcaagcggtccagactccctttggccgggcttgactggcgacaacagtgagtcatcccctttgtagactttgtagatgcttctcggcagcaggggtattccccgccgtaggaatcagctggatcatctctctaccaattgattcacaaaccctgggttgatgctgtccgttcttagtggtctgcagcctgcctgtccttattccccccaactcccatattcaaaggcaaatacccaagttgcatcgtcgatggggaaagctctggctatttcggtaagtgctggtattagatcagtgtataaagtcagtcctcacaggggattgggccttttcctgtccacaacttgcaccgaaaggcatttctactgtgtatcagacgggttctgaaataccctaactttccactgtcaaatattacgggagcaatacaaatgttgggctgacacggtgcacggaagacgtgacaactcattcccatctacgaccaagtcctcggtccatgatcctcagccttgctactttcttagcgtttggttctgaacaaacgtatctgcgtcatttgcatgcgacaatgagcctccaccgctggtcctcagcagacctgccgcgcccaccagtccaaaaaaaaaaaaaaaaaaaaaaaaaaaaaaaaacacgcaaccgctggttcgatgatgctactgccattgcgtgcgcagcaacttccgggatgaagggctgggtcagaaggcaatcagtaagctcactatgccgctgcataaactcgccttgtcccggaatgcaaccccgtattgctcgccgagaacgagcctctgatactcggtggcgctactccccagtgctgactaccgcagcatttctacggaccgcggtcagactgtggatacgtggcacagctgctctccagccatttgaggcacagtctcattttgaggatactgaacagtcccttggcggggcagatatctgatattggaaaggggaggaggatgattgcgccagcgccggcgccgccactatcccacagccgaggctaggtagacgagtactcaatttgctcataggcagttcacttctccactccaatggcgctctctattgttacagtggtacgccaggactcctctcgcctcccatttctgatatgcgcatcaaccgcgccgcagctgtcaatccccggactaggtcaatataggctttcggcctcgtctatctactgtaatagcacttgagcacctttgcttctttttccgcagctcttgccgtcgtctgctgggttctacgctctgcagcggcaaaccagccggaaagaagtcatacacaacagaccatcagctgagacagtccatcatttctgtgagaaatgtgatttagagtcaagtactgaatatatgcagcctcgagtggctttggatgcaggatcccagcagaatctgacacactgcatgaacacttgacagataaccctcggccaatgccagaacaattgcaagagaagacagtcaaagagtctagccaggtccagagtctaaccatttgtaccactattacaagcgtcactgccttcattaattgttcagaggcttgctatctgtacgaaaggcagcagggtctactcccgacatttaacaagcaaatgcctgagcgccatagtcgacatatgatattatgaatagacctccacagcaatagcattatgtcaaacaatacactggtcacccagttgctcaatataaatcagtttgctagtccccaaatagataaaa

SEQ ID NO: 4776 - DNA, 3890 bp, Emericella nidulans
aaacaaagcccaacgtatagtctacccatttattattgattggtttgcctacgcccattgaccctgtagcaggtatagagcacgcaactccggtctgaaattgatacaaaggtgactatatgtcaagaagtggataacttaatcccattaccagcaatgaagatcggatatacggctcttcttggaaggactctgcatgatcagataatcagttggagcgacaaattgctccatgaggaacctgcgaatctctccgaaccccgagtctaggctgggacgagcctgtttcctttgacagatgtttccgcgatccgtcttctgtaccagtgcgatgtaatgcaatttcgcaaagttttaatgaaaaaacattttcagctgcccaagtcctacgtcagtttactgcttaactttcgtcaagtactgggggaaggtgccagactctggctggacattgcagagctgctagaacgcattcttgattaaggtactcgcgaccttggaagcaagctgctaggcgaagtataagcagccataagtgcaaaatttcaatcacatacttgcaaatacgcagttacatacttcacggaatacgggccacaatctccgtaaggaagcatctcaataccgtaatccaagaagactaccaagaaaatgattacccttttgataaatgatttagtttagtttttttttttccttagctttaaataatcaagtcagcattaatcagaaacgttgctagtataataaaagaacgagtcctcctcgagcttccagacagattccctggcttcagatccggcctcttactttgggtgaccaaacagctcccaaccacgacgaagtgcaaccttcgcccaatccggcctatactcatcccacctgtggttcgctcctccttgtatcatcgactcatacacttgacgtattgcccgtcgatcgccaattaccgaactattgcgactgcgactgcgactctgactgggcaagtcatcgagctgcaatagagagcttttatgcgccggaattccctctccactcctcggctccgactctatctatatacagacggaaaacaatgacggcgcgccaatcaacaccgtcctccgacaactcgcactcagacagcggcgtccgcaagcgagtatgcaaggcttgcgatcgttgccgactgaaaaagtccaaggtaagcctaagcctcgtctcggcccacgatcagcgcccattgatgcgctgacctggcgcagtgtgaccgagccaaaccatgcggtcgctgtcgagcagacaacacgctctgtgttttcggcgagaggaagaaagctcatgacaaagtgtaccctaaggggtgagcattgcctggttgtcggcctatagttttatacccgaagctaactgtggctgcttagcgtatgttgagatgctggaacaacaacaaacttggctagtcaatggcctgcaagaactgtatcgccgccttcttgagggtgatggatggccgggcgagccgctgaaatgcgaagcgaacgggcagcccttgacacacgatctcttgacgcagctcggcgctctcgacacaagcaagcacgagcggttcgaagaacacgccgaggtcatgcagcaggaattatggaagcgaaatgccggacacatgcagcgccaggactcatcagataccagctccgagagcccacagtcgcccgtcatgccgtctcaattttcatatcccttttctgtgcgcacagtaccagagactccgacaacgatcagcccgaacacgacgctgcgaatagacgtcccgcaatcagcgacgaagagtgaaccgcagatgacatcgccaaactccatatacaccacagccgtgtccatgccgcgagtggtcgacccgtctgagctgcagagcgcccaaatagcaaacccgcagtggcccagccctggctttggaggctacgacgaaatggacctgatgtctgggcaatataatggtctgccatacgaagatgcgatctcctcgccaatgttcaatcgtccaatgccaatggggtgcctgataccagggtcatacgggaacttggataacaagaacgactttgaggatatcaaccaatttctgaacacacagttggagattacgtcgtaacgctccgcgccatggcaacttggctaagatgaatgtacgattatcactaaatgggttcggtctttcaggatgcagcttgggtttcggcaagtcttctttacggtgttttggtgctggtgttggcaaaatacacggagtttcttgacatttcgcggtatcttctttcctccattctctcctcctttgcttcgcttcgatcttgccttgctacgccatagagaacgagcaccactaccaccatctttaaactgaacgtattaatggaatttcgttgtacaactacctgatcgtcatcctaaacatcaagttcctagtcttggcactcgcttgtcgtaaaataaaaaatataataaaataaaaaataatgaacgaatgctttagagcaacccagaacatgacgtcgcgtccacatgagtaatcggacgctgcagcacgtcacgagtcaattccacgtactgttctactcagctcttatctccgcgctcccctccgtctgtcagcagcccgcccgcgggccaaccagacttccacagacttgtgaattcgttataaaacgtcgatccacaacttcggtaatcggtacaacggtggttttcatagtacgggcccaacggtccagctcttatttttctacattttactacccccgaacctgcgacaatataaatggtttcactttgatactcagagccctgttttctatacccagcatctatacatcgcaagtccatcgcaaattgaaggtgagatgtttgtccgaaataccgaacgtccgacccgactcggacgcttggcaggccgatgaagcgcaggccgctgaaaagcatcgttcgtcctatcgtcagactagtagagctagcggcgggtttggccatcgagtcccagccctcaagagtaagtggggatgctcggcgcagggattttctttattattaaatggcgataaccggcggtatcgaattctctactctgaacatatttcgtacattttctacggaccagaggtcgacagaaatatcccacgtatgtggtaggttgtagtacgaccttgagaacctagcaagttccaggctctcgcaaggcattgtgactttcgcgaatttgatagattctacgaagtcattaccctggttaaagattgaactgccgaggtaagtttgccaagttcaaaaccagaactttactctgagtaccatagtgtggttcagcatgtaggatccatgctgtaatatgagtgggtccccgtaagcatcaggatcattgccttgtcacgatgtggtaagtctggcgtcaacgtcttatcaaagaattctgtctgccttctagttgttttcgattggggttgcgtctgtgacatttgcgatcacgatcacgtcctggatttgcgtcaatggctgcgtccggtaatgtgcttgtttcagaaactccatacggcggtgtccgctgtgggagaagggtttgccatgcaactaatgcggaccctgcttggtaatatcgctcagtttctcggagacatttctaatccatctgtctttcagaagatccatccacccacccgaacttttaggacgccatcgtcgttgagcacaggtcaggcccgcagcccgcttcgtagggctggaacgcgacaggactctagctgtttttgagtctgtccagctgcaggaatgcagctagatgagtatggtacggccacggaagcagagcaggatcctagtattctatagtgtcacctaaatcgttgtgttatcat

SEQ ID NO: 4777 - DNA, 7183 bp, Emericella nidulans
agggacctcgtcccaaagttgatgggcttaaggaactcgtcggtctcgtcctcggtgtagcgcttctcattagccttatacggggtcggaactctcctcgccttctccggaaagaatgcccttgatggcaatctcaacgcgatcccagcgcttgtcacggtccatagcgtagtagcggccgacaacagttgcaatctcaccgacgccaatctccttggtggcgtcgagaagttgctgcatatacttggcagcgctctttgggtcggtatcacgtccatcaccgaagaagtggatgaagacctgaggaatctccatctccttggcaaccttcaagaggccgataaggtgtgtaatgttggagtggacaccgccatcagacacgagacccaaaaggtgaagacggccgttgccatccttagcacgcttgaacgacgcagcgatattctccaccttgttcagctcccccttcttaagtgtctggtcgatgcgcacactgtcctgccagacaacacggccggcaccaatgttcaagtggcccacctcactgttacccatcaaaccttcgggcaaaccaacggcgagcgaagaagcatcaagctccgtgtaaccttgggctgtcttcgagttctcttcggcgaaacccgacatgaacggggtctcagcggctgcaatggcatcaccctccttgggggagtttgggccggcgacaccccaaccgtcgatgacaactagtatgctatgttagtcgatctcaagaaaacgtgcggtatggtactgattaggaggaattgcatactcagaacaactttctggtcaaccttggccattttgaaatatctagctcaaatgatccttgagatggtcagttcagttcatctgtagtacagcggatgcgattgagagagacgagacacttacagaactgtgaaatgtagaaataatggttgtagaaaattttagaaaataaggaagcggagggaaagaggtcgaggctgcccggtgagcacaacaaaagaatagtacgggtatggagatggaggggcttcggtgacgctttgggaaaccggcgtttttctgggctactttcccgcgctttctacgaagtacgtcattcaatttttgctgtcgctcttccgttctcgaccgcgttccggctcttccctaaacaattccccagctttcggaacagtcagcatccccttgggcccttgttacctgaagcccaatcattagttttctcactcttccggttcgttctcagggtcaactcacctcggatcggttgcttccccacgcccgtgatggcctccaggtcgccgactgccgtaacgccaggaccaaagtcgtccgcgcccgcgacaccagcaataatcaacgacgcgcctacgacgtcgcaagcagttccttttcctcctccacagacttttgatttcatccctccgctacatggcgtgattcttcgacttctctcacctcaagcagcaccggaaggggctgtcagtagaccgaaagtggttggtgtctcatagcatctcgagcaggaacatgttcacagacacgcaacgaatgcgcactcgcagcgcagtgtagcagatgatgaatagcagtgcagaattgctagcacctatgtctgctatagccgcctggtcttgcaccggaggagaaatcgcgggattgggctcgaacctgctaccgtcactggacgttaagaacctaccgactgatgtcagatcgatcaagagcaggatacaccaagcgcatgctgttgtggaagggataccagatgtggaccgtagcatggctgagcagaaaaggagattcgggaccttgaggacaagattgcaaggctaaagtccgttatttttgaccttggaaggaaagcggacaaggctcgttctgagagaggagccaacacctctggtccctgaagtctgagaagcgagcgtactcctcgttcgcggaggtcgactatgggagctgtccctaaaaatgaccagggtaggccaccgtcatgacatcctcatgtgctaccatcgctttcgaagctggcaccagctggagacagggcaaatcaacctgctcgggaaacgagtgcccttgagcatagtttagcaaaggccggcaactgtctgctagatagtgagcaacagaggcggacaggtggcatacaacatcagtctttgtgaagactgggcagagcaaaacaactgctgtggaagcatatgttcaatgtcccgtccctactcaagcccaaaggcaagtgacgagtttcgctaagcatcaaaacaaatagctacgaactggttgggaatgagttttgccgcgaagggtgatagggtgcccctccaaagccaccgcggtccccattgttcccggcgtgcgaccgttctacgtaaagcctgtagcaaaccaattttgaatatcttcctgatacaatggaaaataagcctacttgtagctcataatcgaggcggagtagattctccgagaactgcggccggtgaggcaggaaactccgatatcgcggtccgattcgccgccgtcagattttaaagtccagatttctgaggcagatttaccccaccatcattttttttctacttatccttcagttttccctcctcttccccattactccttcatcccagcttctgtcattttctccttcatactcatttcatttctatacatctcacaatggccacctacgctctgtcagatgcccaccgggctgtaagttatccaagccattgttcagtctcgatctattcgtgcacataactgactcatcggtgtagcaaatggaggaccgcctcgtcgacactgaccccgaggtcgctaagatcatggtatgtggttttctacagctttgatttctctgctctcacaatgaattattgtggggcttttttttagtggacagctctgacttgtgtcttttacaggagaatgagatccaacgtcagcgtgaatctgttgtcttgattgcttcggagaacttcacttcccgcgctgtcttcgatgctcttggttctcccatgtgcaacaagtattccgagggttaccccggtgctcgttactatggtggaaacagcacattgacgctatcgagctgctctgccagtcccgtgcccttaaggcattcaacctcgacgccgataagtggggtgtcaacgttcagtgccttagtggcagcccggccaatttgcaggtctaccaggctctcatgcgcccccatgaccgtctcatgggtctcgaccttccccacggtggtcacctgagccacggttatcagactccttccaggaagtaagtgcaatagtcattcccaggacccggatatgtagctgactcagattgtgcaggatctctgctgtgtctacttacttcgagaccttccctttaccgcgttaacctcgagaccggtattattgactacgacacccttgaagccaacgctgagctgtaccgccccaagattttggttgccggtacctctgcctactgccgtctgatcgactatgcccgcatgcgcaagatcgctgacaaggttggcgcctaccttgttgttgacatggcccacatctccggtctgatggctgctggtgtcatcccctctcctgtcgagtacgccgatgtagtcaccactaccactcacaagtctctccgcggtccccgtggtgccatgattttcttccgcaagggcgtccgcagcactgaccccaagactggtaaggacatcatgtatgacctcgagggtcccatcaacttctccgtcttccctggtcaccagggtggtccccacaaccacaccatcactgctctctctgtcgccctcaagtacgccgctaccaccgagttcaagcagtaccaggagcaggtgatcaagaacgccaaggcccttgagaacgaattcacagccattggccacaagctcgtctccgacggtaccgacagccacatggtactcgtggatctccgccccaagtctctcgacggtgcccgtgtcgaagccgtcctcgagcagatcaacattgcttgcaacaagaactccatccctggtgacacgtctgctctcactccctgcggtatccgcattggtgctcccgccatgaccagccgtggtatgggcgaggaggacttcaagcgcatcgctcgctacattgaccaggccatcaacatctgcaagtccgtgcaggccgcacttccacggatgccaacaagctcaaggacttcaaggccaaggttgcttccggcaccgtccctgagatcaacgacctgcgcaaggagatcgctgcgtgggccagcaccttccctctccctgtctaagcggttgaggccctaaccttggatatgataccaattttcttttgttctttagtcttttatttttgtttcattacgcttgtacgagttcaacatcattgcgcataaaactgggttgcggagtgcttttggggttacgggtctgctttttcaaccttacgcgggtcacgggatatggatatgcatgagcatgagaatcaacatagcactgggatggcttattcaacaccttcttcaacaggaaaagtttgcccttttataggctttaaaacagcctggcttcaatgcctgctttatacagatagccttttacaaattaatgatatgacgaatggattgacgtcgtcgaagcgttcaactacattatgccctgagagtgtttgaatgtgttattttggaaatactgccgcacttcttcaataatatcaagccaatagcagataggctatactaccatccatacatagcaatatgactaggtccaaaactaaagctctgtccttcccaattcatcctcagcaacaggagaatcaacagatcctttatcaagccagccttgcgacatcaatgccgctacattcttccccataagagcgctcgtctccattgtggagatgaagctctcaatgccgcctgtataccaaattcccggcgcaagaagcggatcctcgaaggttacgcgagggtaaaggaatggataggggtgccaaagtttttcgtatgaccagcttatgtcttccttggggagatcagtaatatacccagctttctttatcttcttttgctctagacccagaatttctcgaataaatgcttcgttggggcgggtgggcgagaagattttgtagacatagtgcttcgtctcggactcgcgatcctcgggaggattcgaggttgagggtgcctttacggtgcgtagggtgctgatactccagaaggcggctggtccgacaccctcctctgcgttgccgaggtcacttccgagtggcagagtagtgaggattgtttccgggggaatatcggaggggttcttgaggttgaagtatttgccggataatctgtgtggagaagagaagagggttacatgtaatgtgtggaaggggatggtgtctggggtgtgtttgggtgctggggagatattgatgccagaatactggtatggagcagctatcacgacttcgtcaaagtcggctctttgttgtttaatgctctgctcgtctttgaaatcgagggtaacactcttgtccttgttctgggtaatggaggtgaccgtatggtttaattgcacgttcgcgcgcgcggacttcagcattccctcgaagatgcgccagttgcctccttcaacggccacggcgccgtcggtggccagacacaccatggtctcgagaccgtggatcaaaggcagattttgcccataatttacgcgcgtgcttgcctggatcaagtcacgagagaaacccggcgatacattgttcttctccaaaaacgttgctccagttgtagacgtcgcatccagcaaaccaaccgaggcagcagcagcagtgagagacttaaaaggaaacaacggctcctggtagagctgaagaaatttattgacggtgcccttcattaagttctgggcacgcactggggacaatccatagcgccagagaagttttgcaatattccaccagctggaagagtcctccatcacgaagacaaattcctttccatcccatacaccgatggctgcggtatcaccagggcgctcagtgctggcacccctgacgtcaagaccgagctccttggtggcgttgacgagattatagttgacttgaacaaaaatggacgcgccgagttcgatagggtaagctggatcatcaaatacattaactgttgttgaacggcccccgatgtaagaagcacgttcaaaaacagtgatgttgacaggtattccgaatgagtctgcgtacttccgcagggagtatgcggtagacgctccagctgccccagcacctatcaccttgttagtaaatagtctgattattctacgggagagatctttaccaatcaccgcaacctgttttgggcctgcctcaaccgagttgaggtgtgactgtgtaccacggagcttggaaagaggattaaatgctacggccgtggcatagcatagagcccatatccataagcaccatcttaagttgcctctcaagaagggctccattatagagcttagcgtaagtctgtcaaactgtgtgcctgatccgttctcccaatattaagttcagactctcagctcaaaaactgtaaagcacaatgtgagctctccgatgaattgaagcgatgattactgcctagatgaggggaattggatggatgttgagactgtcgagtgagctgatgaagtatcgcgaataggacgctaatccaaaagtggaatagcggcttcaccccaggcgccgtatcgcttatcgcccaatccataaattttttcttctatacagcagactctcgatcagtactatctatatttgcagctctgaaaggccaattaggatcagtttgaactgaaaccgactcccggattattggtgttttgtccgtgttcattttatttcgcaatcaccgcaatggatccgtacgacagcgactcttccggctttgaggatgagggggactacactgagactggagtcgtgctgggatacgcctcggaggagatgattgaggacactgttacccatatcggtggttggccagtatgttaactacgcgcagacaagtcttcactaaatcacttatactcaccgttttgacaaacagacatggctggacgaatctacaccgccttccggcgaattcgccaaatgcaaagtgt

SEQ ID NO: 4778 - DNA, 4406 bp, Emericella nidulans
ccgagttcagaaaatcaaacagctgacccctcgtcaggtgaaatccaggagaaatcctcggatcgcctaccaggatggcggtcatagttctgaaacgacgattgccccggaagaacgttgggtcgagcaaggcgtggacgaaattctacacctgaagatcctggaaagtctactagatacggacgagccagcgacgatcgtgctggcaacgggagatgccgcggaagcagagtactctggtggtttcatgaaaatggccgagcgagctcttctgcgtggctggagagttgagttggttagcttctcccaagtgacaagctatgcctataggaagaaggaattccgttctcggtggggtagtcagttccagctaatccttttggatgactacattgaggaattgttgaagatttaagatgccgtggatgatactggccctcagcgctgtcctagtatctctatttttctattaaatgagcacttaacaggctatagttgccagggaaacccccctttttatttttatatttttttggagttagcagtcgtagatcattgtgtacgagacttaaaattatcaacgactccaatgtagtccaaaacatcctgggctagcaagctcgtaaatttgctgctaggcggggctggcggggctagcggggcagatcttatcagctacctacagaaagtgcctaacgacagctgctcgcggatctgtcgccaacatcaattatatcgccatggtcaccttaacaccccaagatctctatggtggcgccattaaagctataattccagagcgctggattgatgcaaggtctcgtcaaccgttaatttcatggtcaagcattgattgtgctgctaacaagcctcgaacagctctcttcgccaaatccctgaccaccaagaattgttcctttcgccaagcagcctctcaaacctcatttttgaaataaacgagcgcgtctcagaagaaacagctctatcttctctccaatctaccccaaaccaagaagccctcgagatcctaggtccaaaccccggagctacgcccgagactgtcgacaaagcagcagcgttataccatttgaatgacattcgagacgacgatgaggattctctgcgcatcatcaatcctccacaactagtcttcgcacgtcagcttcctcgtgcaaaagtatacaagggcgctgcacaaataacatcaactgcggtgccacgctctcatgttgctccctctattggagggtgccggtggccggctcgagcaccgatggaggcttggtgtccagcgtgagtgttcattacctgcttgtcaggcttgaggagcaagaatccgatgttttagttttctttaatgttccgcataaggagttcgatgagaagggggacccaaggggcctgctaagagaggaggagttagcgagtgaggttattaatgcactagttgataggttggaggtcgcggactggggtctgttcggcggttgatgttgttgctttctgcgcctttcttcattcggttctaattcagtctgcgtgttaatcgtgactgcctgtgatgcattctggtatgatgcagtgctttggatagaatgatccgaggatcatgattgaacatattggaatatccctctctgcaaccacccgccagctgatttgtctagcgggggttacacgcattattaggtattgaacaccctcagcgaaaacatgagccttgtgctaacattttgaatcagcttcatgaatggtttaatgggaactttcttggattcattgcctcgcagaatttggtagccggacttgatgctcacttctacggtatcccagtagattgttaccgagtcaatgtttgctcaatggataaattgacgctgatgatcttggctacgactcctacctttgtgtgcctggaacgccggtttagtccgaccgaaaatgaaggggtacgatgttatctcattcctcaccaagacgtctcaacaaagtatgaggaacattcctgcggaccatgattgacccaaaagtcgtctcccccggatcacgcccgtttggaggttcgaaactcaatctggaacttcatccgactttgtatggacgagtgaataactgctgcgatctcacaaatcactccactatgcatgatcgagtgaattttatgtgttattcaatcttaagagggtcaagtctgattaaatttcctgctttgcttcgtcttcccttccttcttcctcttcactactgctagctaatcctttgtttacttctgtcctggacaagacatcaacagagactaatagaacaggacgaccaccagcataaaagcagcatccgttcgtttcggctgaaatgaagtggaatgcctctactgcagcgtttctgctcagctgcttagcagttgcttttcccattgatgcttccggcgttgctgaaccagaagccatgattgaagtcatcgtctgggtggatgagcatgggcaaacactttcagtcgagaccatgcagcccactgcaactgttgccaatgtcagtgtctctacgcggcgccaaacagagagcttactgaccgatatagactcccactgcccttcctcctatccccgcaatcccagccctagaagcaccgcacaatctcgagcctgtcatcgcagccaacaccgacatcaaagcaaacaataaacccagcctcgacaaagagtactcaagctcgatgcacccgaagcaaaacatccaatctttcggcatctcctactctccctacaatgccgacaatacctgcaagtcccaggagcaggtaaatatggacattgacagattaacccactacgccttcgtccgcatctacggtgccgactgtgaccaagccaaaaaggtaatcaccgccgcccgccgccataacctccaagtcttagcaggcgtttacgacctccacaacctctacggaaacctcaagaccatcatcgacgctgcaagaccagatctctccaccctccacaccatctcaatcggcaatgaactcctcagccgcggtcagaattctgccggggaagtcactgccgccgtcgaaaacgcccgcgcctacctccgcacattaggctacactggccccgtcgtcacaattgacacattctccaaggtcctcgagcaccctgaactctgctatgtgtccgactactgcgccgccaactgtcacgccttctttgatgcaacacaatcccctgaaactgcaggctcctacgtcgctgacgtctcgcgccgtctttccgaggtgtctaacggaaaacgcacgcttatcactgagtccggctggccgcataaagggcaaagcaacgggaaagctgtgccgtctaaggagaaccagcagaaggccattgagagcctgcgtaagacgttctgggataaccatagtgatcttgtactatttagtgcgtttgatgatatgtggaaggtcgacaatcaatggacctttggggcggaaaaatattggggcattgaatagcggtaggctttactatggccagggcattaattggatatcttgctcttgcttctgttcttgctacccccatcccttgcatgcacacctgcgtatcgccataccctaacctctgttcgtttctttctgcgccattgcttgtcttttttattgctcctattcatcagcttagttgttttctggcttccgtttgtgccgacacaacggtatctgtgcttatgtttgctggtagattgaattatgatgacaagcctcgatgaattctgtgaagtgcaattggtgtagcttctttgatgcgtaggtttgactagagctatattggggctttcaaactactccatcttcacaattagatcatttagctcacattaagaagaggacttctttcgatcgtcgattgattccgtctccattctagtgagacgcatgccgtgcgggctgtgatcttcctactggcgacgaagtgatgcatgatcttgtagaaggtcatgcattcacagagctgtagaaaattgtagaagtttgcccacataacagctatcaaatactgaactaggattgatcttcgtcacccgcgaataacttcttcgcccatctagagtccagctttcaaataaaccgtcgctcaatttcctgcataccccactagcttactgctccccaaaggggaaggaaagaaggaaataagaacatcatttccattaagaatattagttctaagaaacaatgcaacgagaataatacaacccctagccccaagatgcaagaaagaagtaggtgattaataagtagtaggtgggcccgcgcccccaattttgctggaaaagaaagggaaagaaaaaaaggcctaaaaagaatttgggtacaatttaataaaagccggcaagggtccaataatgttattgtt

SEQ ID NO: 4779 - DNA, 3381 bp, Emericella nidulans
gaatctccccgcagctcttttgggtgcgagcatatccttgccacgcttgaacgttttaacctcaatagggaacgttgagctcctcgaggagccagaggatgcgctgggagcgcgacttttcgagcctgggagagtgttagctggatggttcctaagtgtattcgaggcagcgcagaccagtagagcgtgaccttcacgtctgatgtagtagccattgtcgacatcgcagaatatatcgatccagttgtagcacaaaaagaagttggaaaatggagcgtagctggttcttatcccttagatccgtgcctgaaccatcacagaccgagaccactaattttggtcctcggcaacttgtgaacgatcggactgcgtcaaaggtagcggtagatctaaatcagaccgtcattactcttggcgacgttcgaggcatgtcctccggccaccattatcatgagctctttgagctagaatcagctaatcaacatactcaaagtctattgaattaatcggaattcgtccactgtggaggttctccgccgctccaaggacggaacaaaacgaacgggatgcgatccctccgcggtgctcatattacggctttattagtcacggcatgatagcatcagtggtccgtaggcatgaagtcaaaatgcgaagccacttatcctgcctcttcgtattcgtctttaaggcctttgaaacataaaaccaatttagagcaaagaatgagcaatgtagttagaatgaccggctgactcagcgatccaagagcgtatagccacacatcacatgaccaccaacttcgtcccatcgtcaccattgaaccgcatcgcataaggtcaatcgaacaggcaagtctgaccaaataacaccgcaacaatggccggtcctagcaaatgtaaagttctccacaaatacaattggctcttattgctgactttttcttcacagctctgatccttgacccggccctccagaagtactacggtgcgcttccgacccgataattcacacccttcctaccaactctacctacgatgcctgctaggtgcaggatgagtgacatttcaaatatagtggatcttactaatgcatgggctgaactagaggtcaactcaaaccgctacaagtacttccgctggaccccccgcaccgcatggcactcgctcctatacatggttctgatccccgcttcgttgggctatgttgcctacaagtctgatgtgcgttcgccctttgttttgacataacccgacctttgggaggggttatgcggttgggtgggatggttcgctgacggttacatacagggcaaatatgacttccgtggaaagagaaggggagataccatcgccgagtggtaaatggaaggaagaaagagctgggcctgttatgaggtgtctttgagttaccttggccggatggtcaatttttgcgggacattgtaactattactagaatataccgcgttaagttcgtgaattttgtttttcgcgcttatatgcctgtccatcttgcataacctcaaaccgaatgccgttccttcatctgatcaagatcgtttctccttgtaccagggtattcctatgatctgaaacaaagatcactattctacaattcgggtaaacaagcataattcaatacggcgcccacccgctccctctcctcccaggccctcccccatagccccgaccactatcgggaaccctttcaccccgtctccagtcgccaggaggaattccacgatcaccgctgctccgcccgcctcttcctcctcgcccgcctccaaacccattatcacggaacgccctcatcccaccacctacatttggccccctttcccccctaatcgccggcgcaacagacccatcctccaacggcggcaaaatcgcgcagtcgatataatccccgatgacaaaccgcgcctcctgcaacgttttttccgcatcgtatccctgcagtcgaaatgatccccgcgggccagatccagatgcaccattcttctctgcttcctcgtcgctgctctccctcggtccaacaattacactccccagatccttgcttagatatctgcctcgcgcatcggggcccatcattgccgcacccttggtgtctgggtagatgaggcggaagcacaatctggttccgattggtgggtcaggtagcattttaggcagcgcagacgtaagaagctgcgcgacgtcgcggagggtacaggattgccatgtgtagatttgtagatgagctgggaggtttggtggtggtggaggagagcgtgtgcggattgcgttggcgccgcttacgggcccgctgaatgatgatctcgaggtgttaggtcggattgcgaagtcagagaggttgtgataggcgttcaaacggtagaagagcttgagatgaaagggcgttgttgtttgtcggtcgatcttgggtttggggtcgcgggtagccatgttgtgagcttcgcttatggacggattagatattttggcgacgtagtcgagcgtaatttatgttaaaccagtcagtatgcgatcaagctcacttcccttgaatatgtgcgcgcggtgaatagtgacggagtgagtgttgtcaggaagcggtagatgaaatcgaggttaattacgacctagctcttctcgaccgccggaaacacctcgagcctgctacttcaacctccaaataccttttctctgacaactatctatacaccacaaaatttactatttttgagcccaagcatttattctgcacagcgcatactaacaagaacacatcatggactttgccgcgttaatgtcaaaagaaattgccaaggcgaaacgctctagcacaccaagctctggttcagaccaggacggcgcaaagccgccgcaaaagaaatatgcccgccgcgcagaggaggaaaatgccagaatagcagcctacaaggaggaacatgcttgactagtgagagagcgcgaagaacggcatgcgcataatcggaagctcgaggaagtagaggcagatcgaccactgcagcgtgaggagatgaaactacgcctggctgaagaatcacgactgatgagagaggacgaagaatcggcgaaagaacgagaacgacgaaagcgcattggactgcctgaattgccgccgacaccgagcgacaaggaccaaacgcctgagaaagatggagaggggcaaatggaggatcttggtgaagaggaacttacgaagaagcttagggagatgggtgagcctgtttgcctattcggtgaaacccaccgcgaccgtttacgtcgatacaagaagctgcttgcgcggtctctggaagtccagaagatgttcgatgggccgataaaggacacgctggagccggtccctaaggtagaaatgaagattccc

SEQ ID NO: 4780 - DNA, 6026 bp, Emericella nidulans
cggggtgtcctgatcctccaggggctgcatggggtacctggctggccaggaatgctgggagtggcggaccctccgggggcggcaggggtaccaggctgttcgggttgaccagggctgggaaccggaacaggaacagggaccggagctggggaggagccaggaggcacgggaacgggtctcgtagtcggaataagaggcggcgaagtgctgttctggaacggagggttgggcggcgcggtgccgttgttcacggggcctgttggaacaggacgaggtttgccagtgggtataggagtgggcttgccagtgggaacaggctttccagttggggctggggtgccagtcggacctgggttgccagtgacagggggagcaggcttcccagtggtgggcgcagtcgggtggacaggtggcctggtctcgtcctcacagtaggtcgtggtgatcgtgacagtgttggtcaaggtgatggggactgtcagggtcttggttccggaagtcacgacagtcgaggtgaccgggcatgtggtggttgtgtaggtggtggtcttggtgatttggtgagtcacggtagtgtttgccacggactagacaagaattacttagttgacatacttgggcaggtcgaagctgaccacctgggcttaccgagtgaggttccttgtcgtgaggctccttccagtggggttctttccaatgggcgacacccgcaaacgccggggtagtcagcgccagaagggcaacaatcttgttaaccatcttagagaatgcttaagacaagagttctagccagtaacaataagcaaaaccaggatgagcaaacgagtgaggtagaagcgagtgaccttgggacaacctggcgtaggtaaacccatttgaataggtgaaaagatctcactttatacctgcgagggcaggggaaggtcccgcttgcaagactgtcggccggttggtctgttagtcgtcatcaaagcatgatacgacagtagtattcatggcgaaggacagtctcgaaatctcggctcagggaaaggaacatgtcctcctggattcgaacgaagtctggttggctgcgaggttcaggaagcctctgtgccatgggtcacagaataagggttgactgggaaaggcacaaggagtgatgctgggatctccattcattcagggccgtgagatgagagtgacattccatagcttcgtccagtgccgatacaaaagaagctccacaagatccactacgatctcaagtgtgctgcattgggtgatgatcacgattcactgcccagaggcgatagcgtcatggatctggtgaactaccaggataccagagtatacaatctatcgcccccagaagactcaagggaccctcgtgtgcatgaatccgttcctggagcttatagccatatcaagcaaatcacaagttgctgaagctacaaggttgtctctcgctgctctcgatcaatagcaaggcaacaacggacgtcctgatgacggttatccaggccgaagggtagtcgtaggtgacattgcctcgacggtcattatgtcatatgctactgtctgcccagtccatcatgttgctagccagatcgaggagaatcgtttttccctaaggaatgtgggaccgtccagagaagaaaccatctgcaacatcaacgagatgcaaaccaaggtcaccgtaggatatgcactcgtctcccgccagtaaaagtgacggagctcgtttgggtcagttctccatgagcaaattgaacagcttgaacgtgaaaactggttatgcaagttaacgaattataggactcaaggacctgaggttgaacttcagctgaagacatcaaatgccaggatagcattgcaatacacagactttgcgacaccaagacataaccccgtgtccaagattagcttgctaatccagctgaagacacgcagccagacgctatgggacactatcatggaaccgattggtacattaaccaaaccaaaggatgacggtgggatagccagcacgaatacggataggacatgatgcgatgaaggcaagtgtaggtgtcattcagcggacagggagcaagcaatgcggagcccagtgttccgcagacggcgattgagagctgagtcaatgttcctgcaggaaccggaagtaaccagagggtgagaccaaggatagggtcgttgcatggaagagattagaatccaacttgagggtattgccgtttgcggccgtgattggctgactcagaaaaatgtcacgtgtaaacaagactgagtatgcgcatgaatgttaatccggcccgctttagggttcgaggccaagaccggaacgcgtccgagagcgcgtctttgagttgaggtcgcgttaattgcttcccgcgggcgataacagcttgagaaacaatcttggatttgaattcaccgcttcgccaccacgatgccgcactgggtatcttcagacggctcttcaacatcgcacaatgatgttgaggccctcccagatgcccccccactcacagatgtttccaacggcgctgagaaggacgtagctgccgccggcaagacgacagccggagtgaaaatcgaagatattttcgatgacgacgaagacgaagagaccgaattccccgcatctagtgcgccggctgagaccagggtcggaagcgcggagtaagcatacaccagtatttacaagggaacaactctaatctaggccattcatagagcatcagcgccggtacctgtccaagtcgatacggaaaccatgctgcaattttaccaacgcctgttccctttccgctacttatttcagtggcttaaccatgggattgtcccctctcccgacttcgggaaccgagagttcgctctgacacttcaaaacgatgcttatttacgatatcagtcgtacccaaccgcggatctgtaagttggcgcgcacgaagttactttggatgatattctaacatttgcaatgtaggtttcgcaaagatattctcaagatgaacccctcccgtttcgaaatcgggcccgtttacaataggaacccgcgagatagaaagacactcggcagcggacaactaaaacccctcgccaaagaactcgtttttgatatcgatttaacagattatgacgacattcgtacctgctgtacaaaggcgaacatctgcgcgaaatgctgggcattcgtgacaatggccatcaaggtcgtcgacacggctctacgacaagacttcggcttccaacatattctatgggtttactcaggacgtcgtggtgctcacgcctgggtctgtgattctcgcgcacggaatctctcagatgaccggcgtcgaggcatcgcagggtacctcgaccttgtcaggggaggcacaaacagcggcaagcgcgtcaatctcaaacgaccgctccacccccacatgacccgcagtctggagatcttaaagccatacttcgtgcaaaccaccttagtagaccaagataccttcgccagcccagagcaagagcaacgccttctctcccttctccccgataaggggctcaatgactccttgcgccggaaatgggaatcagcccccgaccgctctagcacaaacaagtgggctgacattgatgctcttgcaaaggccggtaaaagctctactcttaaccccgctaccctacgcgaggccaaacaagatatcgttctcgagtacacatacccacgtctcgattccgaggtcagcaagaagatgatccacttgctcaagagcccattcgtcattcacccgggcaccgggcgagtttgtgttcctattgacattcgtaatgtcgagaagttcgatcctctctccgtacctactgtctctcaattgctctcagagatagactcctgggactcagaccatcctagtagtggcgccgcggagactgcagaaggcgaagggagcgctcctaacgcctctgacgctggaggcacccgtaaattacaggactatgagaagacaagcctgaaaccgtacattgactacttccgttcgttcattgcgggccttaacaaggaggagcgcaatgggaagcgagagcgtcacgaggatagtactccaggagttaaatctgagagtatggacttttgattctgaattatgtcgatatgattttctccgttaatgtacatgattaatgggtcatcagctgggtattccttgagcgggatttggccaggattgtgctttattgggttggagaatggcgctttggatcagctctataactataattgaatgcattgctgacgttgacaattactgtgattcttagaaatgaatatgtcgtattcagtgcgattacactgcctgacttcaacgagcaagaggtcgaaggccagtcagaatagaatcaataagattcggcatgattacaataagattcctaattcatttctatattaatacatgtccatcctgatcacttccagaaaactagacagagataagggcaaaagcagaacgttcgctgggcgaacaacaatgagttggtaggtatacagaggctagatatacgtgattcgtgtgctttaggcggcaacgaagttgcggacatctgagaacgttagtacgcgaaatgacatcaattaggttcgttcacttactctcgagccagcggacgtactccttctgctccttaacctggatgtagtcgggaatcatgttggcgagctcggcgttgatgccgcgctcctcaaggtatcgctcgaggtaggtctgcaagtcctcatccaggttctcaaatggagggccggcgtacaggctctgtctggcccaatccttctcagcggtagcagcgtgagccaagtcaggcttggagaagtaagaaacttcctcaacctggaacaagccgtcctgggcaacggtctggatgagcagggcgcccttgccggacttttcgatagtgacattaacacgagcagggaagctaggctccaggtcctgttcaccacggtcagcgggagagacgctgtcctcgggatgctgggcgaagccgccagcaccgccctggttcacgggctggtggccctgatagtccagctcatcgagagcatccaaatcctcatgctcgctcaggttctgaagatccgcaacagtgaatgtaaggcgaattctaggaaggggccaaacgttagcgcgtggacgctgataaccatggatcgagaagggatagttatagaagagacacttactcctcatcattgaacttctttgtcagaacaacttcctgttctccaggaacatccttgacctacaatacaatgaggttccataactcatcatagacgcaaatgtttcgtacatacctcccaggagttattctgaagaacatattggatgttctggacagaggattccaagtcctcaaggccggaggacttctcgtgcttaagttcgtcctcgagcttggcagcaagctcagcatcgcctataaagaaggtgagtccgttagcattattcgcttgaaaatatcgttttgggcttcagatggctcgaagtcaaaggtcaacagtctgtcgaataacgaagaagttatccgaagtaggttccggtgcagttagtggttgattattcagatttcgcttaccttcagcttgcctgaatgccttgcacgtcgaaaaagcggcttgggatggtctaatggcctgcttcaatgagggctggatgaagctagtcttggggaggtttgagatggggcggagaatggcggatctggaggaggtagcaattgatcgcgagaaagtgcgaggcactgtgcgagtaagtgtgcgtagggagagcattttgaatgtagcttagaaatggacgttgggatgggaggaaattgttgatggtttgaagacgagaatcgaaggcaaaagattcgggtcggatgatgttaacatttcccaatgaggataagcgctgccaagacttagagctccagcttctgcggagtacatcattaactatattgcagttgagacacgacatgaagccggtatatattcatcaaggtgaatgcagcag

SEQ ID NO: 4781 - DNA, 6163 bp, Emericella nidulans
acctcgatattgttaaaaaaaaaaaaaaaaaaaaaaaaaaaaaaaaaaaaaaaaaaaagaaaaaaagaaaaaaagagcgaacagagggaaaagaaggaaaagaaggaaaagaaggaaaagaaggaaaatatagataagatgaaaatggaaaaaatagtgaaaatagaaaatggttgcatcgttcgatgcacatgtctcaggggagcagagagatatagatctaaacatcgacaccattaagctcacaaccaagtattcataacctctcaatccaccaccagatcgcgatcacacagtaaatggggcctctccaaccgatcaactcccaatccatcctacaacgatccccaaactgcgccggccgcaaccgcaacaagcacaatgtcccccgcaacatcctttcccgcggtaagctgcatcctcaatccaatcgagatgaagaacagactggctaccgctgcgcccaatctcagttttcgtgtcccaagcagcagtagcccgctgataagcgcgtcgatccacagcgtgacttttgcaattgccgacccatcgtcgggcgaatggtacatcgtacccttacaagtacactacagtaagtaccttacagggaccataatgggtgggcaccagaggatacggtcacgcataaggtaacaagaatagactgagctcaaaattaccgtatctggagggcagtgggcaacatggccctatgttcaagtcttttactggccagtcatattataggttgatgatcgggaattgcttgattttcctgcatgtatatagcaataagttgaccaagcgagtctatcaggccctgaacgccaatcggagaattgcaagacactttgaacaatttggtcctccaagctgcacaatagcaagctcagaagtaggagcgttgtcatagtgtagttaagtaccgacaaaaactaaatacaacaaggtggtcgagtcgggctacccgattggctacactagtattgcgtttttgaactcctcagccttctatctcataatctgactgacaccagtacgcttgttttactgtgctcaaaacaaggtcctaaagaggcagtgataaccaggccttcaaggtgtatcacatatacccattgtctggcgttgtcatttcctggtttagggcaacattctatgatgctttgctatatacaatcagcaagatcaatacatagaaagttcttagagtcactgatccgcaacgaagtgagcaagagagaggatgcgataggaggtatggcagttcaaggaggtttcaagtttgacgatctacaccaaaagccttacgtctggagtctctatttattcaattcttttggcggcgaagaagaaggctttgaataacttttcattcaagatatctgtttatatacgtcactcacacgaactgttcctgttccccaccagcccagagagtcagtcaactactccagcatcttgctccaaacagagtacataaccgccagatcctctaactcctgtaattcaaagtaagcaaatgtgtcggaacgcatcggcggatgctcgagagagaaagagagaagaacctacataagctgcaaggtcaaatccccacgaatctttgccttgagctgcacctccagatcaagattcagatccagccggagcctcaactgctcattatcgttcgtcttcccgggccgttcctgcaaccctctttcatggtcatggcgcgtaatggacccgatcactccgtccttgaccccattcaccctcttcaccgttttcgtctgcgtatcacgcaccatctcgcccgccgggttttcgaggttgtttatctgcattagtcgctgcgactccctgccttccccgtcctgcgacctgtctaagatgatctgttgctgcatattacgggcgcgagggtgagcgggtgtaggctcaaccccaagggagcttgtgtcttcggcttcggaggagggagcaagttcagatgagggagcggtagaatgtgagtttgaactgcgtccatgttcatgccggtgtccgtcgcgttcgtcgtcaagcccggcgtcgttgacatgggcatgcgagtccctcccttcaggactttgtttggataagttgttccttgctggctgcgccagcggcattgcattgtccgggggaagtgaaggctcgccagagtcctggggctggcggcggcggagcttagggggccggcgacttcgggcccaggcctctgaagctgagggatctggactagcactgggttgactgagatggcgctcgtcgtctagtgagacggcatgaggactgcggtctgttgtccttgcggtgtaagggccatccatgtccgttatttatgaataagatagggcaggagagaatatgaagtataaagaagattaacgaaagaagacttatagctttttaggaaatatctggtcatatcttttggagcatgcagcaagtaatggaaagtaatgatcgagatcatctatataccgtggtgatcacaacagccacgacggcagccacccaataagtttaaggtccctatgacaacatggctagtcagcggctgcagagctcgattatggaaagccattagaagagtcccagctgtgctgctctctccagcggcgagagatgggtggccggttaaaggtttcgcacatacatggagggcaggcagccagtgtatagggtacagcatctagtgcaggccatatcctaccaaatccacaaaagcagactaaataggaaaataatatttcgtcaatcttactggagggttgtgatcccgagtggagtggatcaagagtatcaactcacctttccacgatttccagtatccaaggatccccttcttgcctctcagggatggaaccactacgttcgtgcaccttattcaaggtagatcttgaaagcactatcattgaacgcacaaagaaacgcctaccatctaaacctaaaagcagaactttggtaaatatacaagcatactaatgtgacctcgaacgacctcgctacctacgcaaccacggggtagggttactttctgaacagaccaaccggtcagtccatttagccgccatagcgtgagcgtctaatagcgaaagacttacaataaggccaacgtcaaatcgccgtgaatcttcgccttaagctctacctccacatccagattcagctcaagcttcagcttcagccctgagttgttctcatggagatggtcctgtccgaactgctgtgttgagatctcttgatgggacttgatctcaccgacgccgttcatagtcgtcgagacctggcggtttgagtatgtctgcattgcttgcgactccggacctgcgtcttcgctgtcgagatccctgttataggcgacattacgcgtggcaggggtgtggttgatggtgcagatcgggctcgcgttcgacgttgtcctgattccggtcatcgtcttttccgtcatgacactgtcactgttgctgatgtggtcacgcctgcggtcgtggttccagttgcgcttgatgtgcgttgaacgcgtcgtctcctgctgtctgcgcgaatgcctagctgtggatgtggccgtgttttcccatgttcgcgcacgtgcagataccgggccgttttcgtattcatattcacaggcgtatgggttgactgggagctcacggacgatctcctcgtcaacggctgaggtgtagacgtcatcgggaccgtgaaaatattgagccatgaactggaaggtatgagtaagtggttatcagtctcgagcctagatgactgcctggaagttttgatagcctagattgaggcaggcgtcgaggtgcaataaaagatgcgcgtggtggttcggtcgtggcgagatcgggtcggtccagtgtgatgtggtcacgatgttgtaagaagtggaatgctggatctaggatttgacgagatctaggttttagataacactgcatgtgatggaatgtatctggttcagagatgccagaacgtggtgggcggtccctgtcaagctttttagggttgataaccttatccagcaacccacctatgtcccatggatgatcccaccaacgagtaccaacacgaggaatggatcgaacagggacttctggcttgtggacgcaagtactttgcaattctgctcctctcagtccctgtgcatactcgtgctcaaggacaccagcagcattcactacaaatttttaccaagcaggcaaccatcgatttggagtcacaaaagcagattcacgctcatattcaaagtataacctagcatctatggcctctatcgcgacgcaaaaggccttccagaagccttccaccgctaccagagacgtacaaccagataacatcccatccacccgaaaagtgtttaaagagcattccgccagctcgagagagataaatgcctctgtcccgagcggtgacagggcagcaacattcccgttggagcaattcgatgaagaggtcaacgtgagcgctagtggaggtgctgttgcgtccacgccagtggaagtgggcaaggcaagggaaaccgtcagaggactccacagtgaactggacaaggaaacagctgcagataaaattgacgtcaacgactcctacaaatacaacgaacacggatttatgaaggtgcctggtgggaaatcagatcaaagggatagcacccagcagttcccccggtctctatcgagcctgcacgggctcgccgtcagcgaaggcggaaacgtgctggataacgacgggcgtgctgtcggtaaagttgtcgagggcgaccctaacgatttggtcgggcagattgtgaacggctatggggagattctggacgaggatggggatcttattggctgtgtcgatcctttgaatgagggtgctgcgagcgagggaggtagagactatagagtctggggcgatgatcccagtgtttatgccctaggaagggaggaggcttctctacatatagacatgaagaagcactatccaaccccggtgatagtagcagagacccgtgaggcgtccgagaaagagatggaggcggatgtagagcttccccttccagcgtcgactgaaaacctcattcaagctggccaggaaggtatagacgccgacgaccggctccctgatatctcctccctcgacggcctgacctgcaacacccttggcgggatcgtcacttcgaatggcattaccgtcggggaactgatcgatggcgatgccatgagaatctgtatcgatgatctctacctcgacaaccaaggccagttcaaggacggcagggggatcgtcattggcagggctaggccattgccgagcagccagggtcaggtgcggagtgacgccagcgtattagaagaggcgatgccagaacccatcttagataacgaagagtcgggcactcacggtgccggctctggagaactcgacgatttcttcgtgggtaatgacggggtggtatatgattcttccggccgggctgctgagaggttggccggcagagaccgcgacaagcgcgacgggctcgcatctcgtccattgaatgtgggttcaacgacagagaaagacgatatactaggaaggacagattctgaggaactatcactgcctcggaacgatgagactggctggttcagctttgacatcgagattagagattctgagccagagcccgagccagaccctcgcgcaaaacatgcacggttcgatatgcagaatctgacccatatcattgtcgatgacaacggctatgtcgtcaataacggacatttggtggacaagatgtgtgccattgtccggcagacagaggatgatgtggaccctctgtgtaggcaaatcactctagtacgtcgttctcatactttacattgcaggcgtactgatgcagtcggcaggacattgaagaagccaacctcaaaccaaaaaatcgtctcgcagcagagcgcctcgtcgaggatatcagagccctaataaccacagccgggaatatcctgcaagattgcaacaataccctccgctctctcaacccagagggtcagattgtgtcgacaatgaaatccaacagtcaaccctacaccgtccccgacgccatgaagagcgagtaccgactcgccagccttctgaaagacctagcccggactgtgattgacaccatcaccactggccgaca

SEQ ID NO: 4782 - DNA, 2277 bp, Emericella nidulans
tcacatcgaacaagtgtagacatgtcctcttcgccccttcaggtggcaatcatacccaacagaactttgttgcaatcgtacagctagcgagcggtagttacgggccctttctcgtcctgattatcgatgtagttattgcgactgaagagaccgagcgtgccatgtaaggacgagtctcccttgtcagggtcgagaggaattatcgtgctattagaaaaacacgtgcacttgcagaatgatgctggtgctggagcaagtaaagtcgtcagtcatgatcctagtcttgagtacgagcgtggcggcctgtaggaatctcacatgaagctagtgcggaagatgcgaaagaaagtagggcgatgaacaaaagcaggaagtgccatatgaagtttcgtcgtgacatagtgccattaacgaagagtcttttggttaaccggcgatctatcgacctctatcaagcaaacaatgagctggccctgatgctgccgcagattaagcctagatacgtagctctagtttatagaggattctgacggcttattagacgagtcacgtgacaaagtactgatactcagcgttgcaacatacaatagttgctgagtatctccttgacaggttaacaagcttgctcgtttgcagagaagccaaattcacataaattttacttggagattgagtaataatatattcgagcacatccctagcgaagcaggctgaactatgattttcccttcattcccttcctgcggttttctctctgtctctgttccttagccgcatctcgctccgcttcttccaagcacgattgttatcccctcggttttcccagaaccatttggaaaagtctgattcttctgtcgcagcggtacctgacttgggcattggactatctgtaaatgaataatcttctcccacggcgttactggaaatcttaggggtattccagttgatgattttggagacttgagatgtgtcaggtgtaggagccgcacttcgtagtccacggtccagcagatcccttttggtaaatggagtaaggggtgctacatttgatgacagctcttcctcgaaacctgcgtctgaatctgcatctccttgcccaaagaaactaaactgaactggaggctccgtatctagtttctgctggtcggcaggtttcttaaagagagcttctagagggtgaacttctgttgatccctgctgcgaagttgcttcagtcgaatttcctttgggcaataccccggattttgcactcccctcgggctcttcctcagagctgacatgagtcgcagcttgctgctgctcatttctcgatgaagatagctcaaaatttccagattccccggattcaggtaaactggaagaggcagtatcatcgctttccgagtccgtgatgtctgattctgatgaggagccactagaagaagtccaatcttccgattctgtggattctgtggactctgtggattctgtttccttgacctctgcgttgcgactgctggacgtcttcgctgagtcagtttcaggagctgacttgaccttgattttctttggcttttccttatggccagcgatttgtcccggtctatattgatgttttctgacccgctcgctagcgggttccttcaagttcccagattcgtcaacccagcccttacccctcttcgaacgtacatatgagcgcattaccaccatcttctgaacgtaagaacgtggaatgagttactgtttgggaaactcatgcacgacagactccggcgacgtcttcttcttctttggttgctttttcgatttctcttccgccagcgcagacttgtttggcggcactttcgtccgaaataaacattctggtttttcagtatattttgacttgagctgcgtcttggctttcttctcctgcttgtctttggatctcttttccttttttcgccgttcagttttatcagtcgtggactctgtccaccctcgcttcaccttgcggtccgatggcagctcgtaaccacttaaaacattttcttcggcctttcgcttcttggatttcactgttacggatggattgtcggtcgacgtaaaattctgctcgtcgccctcttccgcctgtcgcttctgcgggcgagcaggttcaactttgaacttgcggcccttaagaatggagccattcagcttcttcttgagtttctcagcctccattttcggcagcgttacgtagccgtaattgttctcaggaaatgtcgggataccgtggaaggatatgtccgaggcaagggaacgaaccgaggc

SEQ ID NO: 4783 - DNA, 4449 bp, Emericella nidulans
  unsure (1)..(4449): unsure at all n locations
atatactaatattattaaataatattgcaggaatagaaggatatgtaaaatacaatctaattaataaataaagctatttacagcttagtagctctacagataagagagcttatagcagataaagaaatatacaaaatgttgtaaatactaaaatagtaatataccctaagtaattaagaggcagattttgaagctttgaagaactataacaatgtcagatcttgatcaatttgacaaggaaagatttctgcatggctcaacaaatttgacaatgcttacttggcaattaaatactgcaatctcctagaaagtaataataagtatatgaaataacagtttctggcagctatattactagtttcctattccttcacagatagacaggcagagatgatgaacaacctaatatataagaaggagaacttccatatactcctaggacaatatcagacttacctggccaatactgaaggcttcaagacaacaacttctggaatagtatttgcaatgcttcatggccaaagcaaacctaataaaaatagataccagagcttatatatatgtagaaagaattatatatacagcagttgctggtatataatatacttgaaataaccaaaataatagaaacctaacaaagagattaaaagcaagattagcaaagccattgcaaaagataataaggttggaagaaagatcaaaaccttgatagaaaataataagcaataaaataaggatgatgagcagaaagaaagcaacaaaccagaggagtattatgttataatacttgtttttagtatggaaattagcagcttattaaagaattactttatcctagactctggagctttaatatatgtttgtaataatatctcaaggtttgaaaactatgatctatcagcaaccagaattctttgtgctggtaatataataataaggatacaaggtactaggagcatcaagatctatctaaattatagtagagaatcaggaaatattattattaccttgactaatatagcctatgtactaggtctttataccagcattattagagctagaagacttaaacaagctggatatagctgggattttgacaataatattattaagaaagaaaataatattatcttcaagatcagagattacctatcaggtctctgggttgtagagcaacaaagcaataatatatatacttttgcaactatagataattaataatcaggaaaaccactacttctgaaaggaaatatagatatttggtattaaaggatggctcatacttatattaatactctgcagtattttcctgaagcagttacaggtatcaagatcaataatctggatgcaaactatgattctaagcaactatataaagattgcaagttggcaaatacgcctcagtaaatctcttggagactaataatgaccgctactactctgctagagtgagtatactttgatcttattaaaatacaacctggtctgaacagggataaatagattacctatttctataataaagccacaagaatatattttgtctttactgttatgggtcctttgcctatacaaggaccttagaccttagtgacntcgccaaggcctgcgctgtcctgaaggcggtgagccacctacaagacttccttgcaacaacaatccttctttctcatttcttctttagcgattccttcttgtacgtacggcacgtctagataggaagatccatctaaatacgtcccttaacattaggaatcgctcaccaatctcaataatagtatgaggagaccttttactatgacaatggaagaagaaagcatcgcattgttgctacagcagctccaggagctctgtacagagatgcagactcagaaacaacagctccaagaagagaataacagcttacgggcggaactacaggccgtacggaactcgcaactgagaaaccatccaccagttaccactacagttacatccgcaacgcccaccccctacgaacgaagctatccctgtcctcgtcacctggatgtcgaaccctttactggagaagaccctaaggactaccctcctttccagatgaaccttcgtacaaagtttacaattgacgccgcctgctaccctacagaggaggaacaagtttactatgcctacagctgcctgagaggaaaagccagccagtgtatactaccatggctcttggcttgccagaaatctgagactcctgtgctatgggcagaattctccgcggtactagacaaggcctttggtgaccctgaccaacagagaaaggctcttgtataagtaaatacaataaagcaagggaaacatgactttgaagagttcttgaataaatttgacgaagaacttcttaatactggagggattaattaggatgataaccagaagaaggccttgttggacacagtaattaatgttgagttgctaaaagccatggttggtattaggcaggaggattcgtacaacaactactataattaactgcgtaaaatcaaccacaacctccagagagtagccaggcttatataaaaaggatcttatactgctgtctctatacatgttacttatacaagaccagcaggaggctctgactggactgggacccctgatcaaatagactaggaagccacccatgcttaaattacagccctacaaaaggaagtcgcagccctctgtacaaaagggaccaggaccccaagaaaagctagtcaggcacctgtagaggagaagcaaaagaggttatctaagggcaaatgcctatactacagtaatcctgactactttatacaagagtgccctacaaaacctatcaggtgccctaggcaggtggccacagttcaggaagaacaagactaaatagatggctacagcaagagcaagtcggaaaacaaataacctctgtacaaagtcatatacagaggggttatacagctagagaaatactacttaattggcaagatttcaacagcttgtacataaatacccccccattcttggtagaggtactagtcaactatacctataatactcatacaatgatagatacaggctgcctgacctatggggtaatcagtaacaagtttgtcaagatatattaaatacctattatacctatctgcctgaaaccttttaagggagtgactaggaatatagaggagattaataagattatacaggttcagctagatatcagggcatatacagaaaaaagagcctacttctatgtaatacctgataacctgggctatgacttgatcttaggactcccctggctggagtaatatgatggaagattagaggctaagaggggcaggctgtacctctgtactactagagtctgtctatagagtactataaagaggcccttactaaagctgaacatagcacagatatctgctgcaactataggaggatttatacaaaggaaaaggtactgtggctaagatattaagatatttatagtcttattagcagatatacagaaggtactggccctaaagagacatattgacccctgtacaaagctactaaggcaatactggaaatatctaaggctctttgaacaagacaaagtagaagaactactaccataccagggagataggattaatcacaaaattaagcttatacaggaagagagtgggaaggatcctgaagtcccctggggccccctttataacataacccaggaagaactaatagtcctccagaaaatactctctaaactattatagaaaggctttatctgcataagctattccccagctatagccccagtactctttatataaaaaccaggaggaggactacagttctgtattaactactatactctaaatactattaccaagaaggactgctatccattgcccctgatctatgagacactgaaccaaattagacaagccagatggtttactaagctggatgtgtctgctgccttctataagatctgcatagctaaaggccaggaatagatgactgccttctatacaagatacaggctctttaaatagctagttaccccttttgggttggctaatgcaccaagcaccttctaaaaatatattaactagaccctccaggaatatctagatgaattctgctcagcctatattaataatatacttgtctatactaatagggacctccgccagcactggaagtatatataaatagtcttgaagaaactggaagaagcaggcctatatttagatattaagaagtgcaaatttgagtataaggagataaagtacttgggctttataatacaggcagggaagggaatcaaaatagacctagagaagatgaaagcaataaaggaataggaaacccctactactataaagggcgtccaaggaaacatgggctttgctaacttctaccaggttcatccctaacttcttagggagcatacgccaacagaacaac

SEQ ID NO: 4784 - DNA, 6253 bp, Emericella nidulans
gcggccgcaattaacccctcactaaagggatcttattatgccctccaaataggctataaaatagaagtactcttatattgacataatttattcgagatataccacaaataatgataattgcggctaagaaggtattcgggccaatcttacatgctccagctgggcctgcgcactaaaccacacgaaacctttcgggaagatattgatttccaataggcatagagtagaccgtgaccgtgtagattgtgttccttttcttccccgctagccttatctctgttcttgtctcgcaaaccctccgcagagccgccacactcctccaagcaaaaccctccaggaagaaataacccggcaagaaaattgccggatgaatctgccgggcgaaattcatcataggtttacttatatgtacattgcgcaggtcagctttgcagacctcgacattaccaaacacaacttaccaatctcaacgatgtcttcttcagattccccgaactatggcgatgccacgatgcccattgccatcgttggcatggcagcccggttctctggtgaagcaactaacccatccaagttatgggatatgatggtacagggtcgaactgggcattccgcagttccagagaatcgtttcgacgcggaggcgtggcatcatcccagccacgaacgaagagggactgtaggtttatgaattcaaaattggcaaaaaaaatggattgatgcaacgtgctaatgatgccatatggctagatccaaccacgaagtggcttcttccttcgtgaggaccctgccgtttttgacgcaccatttttctcgatgacggcgaaggaagctgcaggaatggacccaatgcagagaaaacttttagaaatttcttacgaggcttttgaaaatggtaggctgtccgataagaaatatccgtaaaaacagaaatgctgaactcaaccaacagctggcatcccgattaccaagttgcctggtacggcgaccggcgtctacagtggtgttatgacgaacgactatgagttgatgactgccggtgatccaatgcagttgccacagaatgcagcatcgggaacaagccgtgctatgcttgccaatcggatttcctggttctatgatcttcggggtcccagcttcgcgctcgatacggcttgctcgtccagtttatatgcgctacacctggcttgtcagtcactgcaagcaggagagactgaccaggtacgcatactcactcgctaggaaggaagaccagcgttgacagtgattacaggcgctcgtaacaggagtcaatcttatcctagcgccaaattttatctcccagctttcttcgatgcacatgctgagcccagacgggaagagccattctttcgactctcgtgccaatggctacgccagaggcgaggcccttgctgcagtcgtggtcaaaccactctatcaagcactcgctgacggtgacactatccgagcagttattcgaggaagtggtgcaaatcaagacggtaagaccgttggaatcacaattccaaacccgcaggcgcaagcagaacttatccgcaaaacatacgctacagctgggctgggtctcgaacagacagggtatttcgaggcacacggcacaggaacccctgtaggtgatccaatcgagctgagcgctattgggacaagtttcggcgagcatcgcagccagaactgtccgctttttgtgggaagcgtgaagacgaatgttggccatacggagggggctgccggtctggcaggcgttgtgaagacagtgctagctctggaggcgggtattattcctccactggctgactttcaggagctgaatgaaaagcttcgacttgaggagtggaagttggctctcccgctcaaagcaactccttggccgatgccgggtcttcgccgggcaagtgtcaactcgttcggttttggaggtgccaatgctcatgttatccttgatgatgcctatcattacctgaaatcccacgggctgagcgcaaaccatcatacaacactgtcggaaagcgaggactcatcggattcaggtctggaaatggactcctcaaccagtgacagtggggaagggcagtcgagcaagttgttacttttctcagcgtatgatggcgctggtattaaaaggacagaagcctcgtggaacagccaccttgccgatatcctcgcagacagcaaaaccgtggacgagaccatggggatgaatgacctcgcatacaccctttctgaccgccgcacgaccttcgacttccggagctttgctgtggcatcgagcgtacaagatctgaaagctaagcttgagaacgacggccttccgcgactgaacagggcctctcgtcgctccaaccctgtgtttgtgttcacgggccagggagcccaatggcccgcgatggggcgagaactgctgtctaaccctatctttcgcgccagcatcgagcgtagcaaagccgttctcgaacttgaaggctgcgagtgggatgtggtgcaagttttgtcagatccgcaggaccagcgcatccatatcccagccttttcccaaccagtctgcacaatcttacaggtcgctcttgttgatcttctgcagtcatggggcattcaacctgcagcaacggttggtcattccagtggagaggttgcggcggcttatgcagcgaaaatgatatcccaggacgaggctgtacgaattggatactggcgaggcttctacagtgagcaggtgaaggctcgactagaaaatatacgaggttccatgatggccgtcggtctatcagaatctcaggccacttcgtacctaaaccgggtaccagaaggcagtgtagtcgttgcctgtatcaacagcccgtccagtgtcactttatctggcgaagatcattcgatcaagactctcgaagcaatcctgcaggcagacggccactttgcgcgtaagcttcgtgtggaggttgcctaccattctcctcacatgaagaccgttgcagatgagttcctgaacgctgttggcataatcactccacagccttctgaaatcccgatgttcagttcggttacggaaacccgggttgaggacccagcgactctcgttgcttcatactggatgcagaacctgatatccccagttcgtttctctggtgcactagcaaccctactaaatgacacccccagtgtaaaggcaaatactcgccgtcgacgcactgctggtattgtctggagtgctctgatcgaggttggaccccatgaggcactgaaagggccatgccgtcagatcatgtcgggcctaaacaccaaattagcagaccagattccttatatgtctgtccttagccgcggtaagagtgcagtggagacatcactgacagcagctggcctcctttgggcgtcgggacatccgatcaatatacgtgaggtaaaccagtatcgggatactggtgagagggtgatcactgacctgccaccgtacccctggaaccatgaaaagggcttttggcatgaacctgcggcctctatatccgcacgattgagaaaagaaccacgcaacgatctcctgggtgtgccagtggcgcagcaaaaccctttcgagcggtgctggcaaaactatctctccgtctcagaatgtccttggcagaaagatcacgtcattactggcactgtactgtatccgggagctggacatctgattatggcctttgaagctgccatccggctggctgctgacaatagaccgctgaagggagtctcgttctctgatgtccactttgacaaggggcttgtcatcccgtcggacgaccatggcgtcgagacacgactctgcacacggcctcatgagagcctgttagactggtaccactacactttatactccatcaacgccactggagactggacaaaacactcttggggctcgttcagcctccactacgaggatgctgtcagcgtgcagcaagcgaaacgcagcaaaggcgaatacgacgatatcaacactcgtgcatgtcggaagctggatgttgagtcgttctacgagcagctcctgtcaatcggcacagaatatgggccgacattccgcaacttagtacatgctgctgcggctcctggttaccacagcggcgtgggtaccatcacaataccagacactaaatcagtcatgcctcacgagtttgaatatcctcacttgatccatcccgccacgctggatgccatctttcacttgatattcgtggccatgggcgagggcaacgcgctctccgagtctgccatcccaacacgggtagaccgcatttacatttccacggatctgcctcgaggtgtcggagccaagtatacaggttacggtcgcgcggagcctgtctccagccgcgataccttggggactatcgtcgtctcggatgaaaattggtcagcaggacccaagatcattgttgaagggatgactgtcacggaagtctctgctggtgcttctacctcattcaactccttgcttataccggggggccaaggtcgcattgccacgcttgaatggaaggaggatgtggactcacttgtcgggccgacggctgagtcgtggctggcccagaaagggccaagtattgggggccaggccagcgatgtgactgaagcggtgcagcgcctcgacgcttggctggaactttcctgtttcaagagcacagaccttggcacccttgttatatgtccctcgaaattgaaaggcagttttgaactcgtcaagaaatatggctctaagcatggagaaaggtatcggttcggccggaccacgatcatcgaattttccgagaatgatatttcagcagcagagagtgctttcgcaccgcacggaattgaatcttcatatgctgctatcgatctttcagccactcctgagcatgctatggaacaattggggatgttcgatttgatcatcgctgaggagaatgttattgtccaatttcccgatgtcacaaagatactgcatcgggaaggcagagtcgctattattaggagtcatgctttacccgatgagcgccacttcgcagcaacaaagggcttactgaaggaaatctcatttgagtctcaggacggctctatcctacaaattgctggtttgggattggaaatggatccagccattcgcagccttgatgacgttgtactgttacaacatgtagatgcttccccagctgccaaaaactttgaaaaaaggcttacggcccagctaaccagtctcggtgcgcatgtacggagcaataccatagcaaacgcgagcagcctttcaggaaacatcgtgatctctttgctagagattgattgtcaatttgtcatatcatggacatcggaagaattcgaacaattccgccagctgaccaacgcgagatacgtcctatggattacgcgcgggggcttgctcgacgcagaccgggcatcgcttgattatgcgccgtccaccggccttctgcgtactgtccgcgttgaaaagccccaaattcgactgcctcacttggatctctcccctagcctggacttgaactcggatcgcgcggttgaaattgtgatatctgcattccactccagcatcaagccctctgtaaaggaaaagaatctcgaaatggaatatgcagagtccaacgggctattatacatcccaagagctcgagggcatgcggccttagaccacgagcttgcccttcggggtgagaaagtgtccagcatcccggggccactgtctgcgcctggaatagcacgacgacttgagacttccctggctggaagcccatctcaggctcgctgggttcctgacgagacagtcggagataagctggcagattttgatgttgaaatccaggtctctcacgtgggcttggagcacagtaaggtcgaaaattatctaaatggaaaacagctttcgctagcacctggcctcgggcgcgtggcagttgggaccctgaccagggctggtgcaaaagtttcacgattcattcctggtgaccaagtgtttgctttgcacgccgcacctttccatacacacctgcgcgtcaccgaagacgctgtccacgcagtcccggacatcctgtctccagctcaggctgcacatcttccgctagctgcggctcgagcctggcactcgcttatcgatgttgcagcgttccgcgctggtcaatctgtctttgttaatggtgcaagcgatactgtcgggcgaccaactggtgagctggcgcggcttctaagggggatgtttttgcaactgtagctcgat

SEQ ID NO: 4785 - DNA, 3981 bp, Emericella nidulans
tcgcggatcgccaccgcagtgtggttccactggatacattcggcggcaatggcgacgtcgatagtgccagtctgcacagagctctcttcagcgccttcctggggaatctgaacgatgcttctgatgatgccgggtccttttccaggaggcttcgggcgagggtgccgtagccatcattgggatccgacacgatcacgctggggaactttgcagcgagacccgcagaaacggaactgcacccggcaccaatgtcatgggcctcagaccatgaagacccgagttctccggcacggtaggaatagatgagttcgaagaagggtggtggatagaccgggcggtagtccaggtagtcggaccagttgacaccttgcttgaaagagaagcccacttctttggctggtgtggtcgttgcaaggagagacgacatcttcctcttgcaggaagttacttttgacgatgtgaggctcgttcagggattgcttttttcgccctccattcacggggctttgggcttatgtattgggcatattatggcctaatcggagtcgaaggaacactattcgggctcaaaagatatacttgatattctgaccgagagtgcggtatatcggggtctatttgagtaagagctattccgagctggactgtgacaacggaatacccttgacaggtggcataaaaagcagtttgtgacggggcaatatcagatcaccgactacattcgacacgagcatagaatcaaactgcaagcgaacttactgaaatgccagtgaaagtcgcccctagcacccagggtccggaagagtggaagaacgagaaggttgccaaagcagatcggaatgtcgcctcgtactaggcagccctaaacaatgtcccagatattgccagggtgatcttttgcgactactctggctttaggtaagagatcgctcactcgaacacacggcgggggcattgggctgtacggagacctgccaggcgaaaagatgatgaagacaagtctcttctggacttggagttaacttgttccactcgtgtatttgcgcaagatcgtgttcactcaacggggagatggagtcaagcaaggcctggcttgcggcatctgtcagctgtttgacgactgcctcaaactgatgacttagattccctgcctggcgagctgataacaactgttcatcgtactgaagggtaagcctgactgttgagtcagtcaagatggtgcacgttgcgatcagaggatatgggtgatgctccttcttgcccagggcgtccacatactccaggcccagatattgtgtggccggaccgattgcatccgcaaactccatagactgaacaaccaacagcgactcgaagtcagtaagacttgaacctctgttcgccaatatccgtcgtatatttgaaagccctgtttgctcaaacggggatcatccccacagattgcgcccgaacgtgagtgagaaagacccgccgggctgctgtgcttccacgcggaggacgatggggactaagttgatagtagggccagtcatccgacttgccccaggcacatccgtcgttcggccactgttgatagcaccgaaaatgatatcctgtgtgccggtatagtgtgagaggaggatggcccaggctgcgcgtaggaggagcgccctggtcagcccaagcggcatctgttgctgtccaaaatgtagcaaacgttcgacagttgcggctggattgaccagtgtattcgaacgtggtggaggtgaaaaggaagtcaggttgaggtcttccaatgaatgccgccagaagagcctttgctgttgttgccgttcaggatccggcataaacattgactcaataaaacctctaaacggatctcgcggtaaaatggcgtcgcattgaccttggcatcgcatcgctacttcagccaggatctcaggaatggaggcaccgtcgcatagggcatggtgcgccgtccagacaaagtactgatggctttcatcagccacaagggcatatcgaaagaacgggacgccggggttcatcgcgtcgaccgcatccttctcgagaaacctggaaagacttatctcagaagcggaccaggaaggggcttcttccactaccgcctgcagatatccccgctcaccgggagcaacgcaaatccgcgttcggagaacaggattggcttgtactgttcgctcccatgcctgcttgaatacatccagtggggtgctttgtgcaaaccgaaagaccaattgccggacatataggttagcgacaccatcgagttgggcgacgagtgattcttgcatggggctgcaggagtacacgtccgcgatctggtcagttgatagccgacattgggaagaaaccgtgtccaggatgtcttgcagggtgccataaccgagatcctgtaatagagcaaaggctttgggagcgtcgtccgcatcctgtttttgcagtttgaccggtaccacctttgccacaccggccatctcctccagcgaagcgttcaaaaagttctgctccatggtgaggcgtatgccccgtttctcagcggcaatgatgagtttctgactccgaaccgagtcccctcccacgtcgaagaagacgtcctcgtctaggaagttctctgggccgtcctgcaggacctcggcccagatctctcgtagttggtttttaacaattggcagagctttggcgtcggttttctagacaggttaacttaggccctacttttgcatgagaagtgcaaaccttgagcagtaagcgcggagcgatactggagtcattactggtctacggcccgtgaggtacgcccgccgcaaatcgtctaaaacagaacacagatgctctgtgcgttttaaatcttctaggaaagaagggctacaaaatgtgatagcccatctggatgaaatgaggagatagtaatgcatatcttatatttaataatatgacttttgttcttgtaggttagacgtataactctggttataaaacgtgtactggagcggttgagatcacatgcgaacagtccgtctactgtataccatatatccgtattaacgacaatacggaatactcaaaagcaatagatcaagctcattgcgatgcaaattatacaatgaaataacttcaatcaaacttgcgcctcgcagtttagtaacaagccacaacccgacaacaataccacgaatacatgactgctgaatagcctgccaacgtagcccgccagggattatatcctgagaacaaccagatgagtgttaccgtgtaaagcggcattagttatatggccggcgctgcggtgtccaaatcggaaggcacgatgggtgacagtcaggcccagtcagttcaaatgccacccgtgagcattgcgccgttttgagttacaggaaagctggagtctggcgatacccgctctgctctaggagtaacggcgaagtgcttccagtcgagaggtgtgaggtgagactgggaggtggacacaaagaaacgccatctttgcccggttgattcgccacctctgggcatcttatactcaaagaactgttagagtcaccaagagccggggtttggtgcagacggtgattgagctagattcacttaactccaacgtctgcaagccagcgatctcatactcaccatgcccagccacggaagtgtgatcctccagtctacactcctgaaaacggccgcaaacctgacggtccagggggccaagatctggacaaacaatggctccgcgatccaatgcattgattggttgtccgtggctgagtttgcggtatgcggagttattcaagcagaaattggctggcactggcataacttcctggatgatgctttctctacctgtcagccagaaccagcaaacgattacgagaagcaaatacgccgagagcgaaaggaattctggcttcatatatttatcaaactcatgctggaccaaacagccggctcattcatgatgaatacagtcttcataatctgcaccgc

SEQ ID NO: 4786 - DNA, 1309 bp, Emericella nidulans
aaaagatacttaagcaggataaagagtataataagataatatagtatttaaaaaataaaataagaaaattttccttataattatagttaagagtaagaatcttagaatactaattaaatatctaagactatatattcttctataaaaaaagataaatatctagaagtaaatagctctgtatagatataatttaagctatatagaactctatattaacaggacaccctggctaggagtaaatatatatactaattagctgttaatatttctggcctaatatgtcccaagatatcaggagatttgtctgaaactgtgatatatatagaaggacaaaatcttggagggactagagaaagggactattaaagcccctccctgtacctaattatccctggcaggaggttttaatagattttattatagacctaccagagagtaaaggttgtataaatatcatggttatcacagaccagttaaccaaaggtgtgatactagaaggaatatcagagattaactctaagagcatggcctgggcccttgtacaagtacttataagcaaacataggatcccaaaggctattaccttggacagaggaagccagtttacaagtaatatataggcttatatatataccctgacagggattaactactaactatctacagcctatcacccccagactgatagatcaacagagaggataaacagtatagtagagacctacctctgcatctatacctgctatgactagagggactagaacaggttactcctacttacagagctagtaattaatagctgtatattaacagcaacaggggtcagccccttctacctaagccatagatataacctcagcctatttagccttactgaggaggtagagcaactagctgaagaaccagccaagagtcctatccagaaaggggaagctattgtacagaaagttaaggaagccctagactgggcttaagcctctatagcctattcccaacagaatgtagagaatcaggctaataaatacaggagcccggccacaaactaccaagtaggagataaggtctggctaagtctgaagaacatctgtacagaccgacccagcaagaaactggactggaagaatactaagtacaaggttataggcctggtaggtagctatgctgtacagctgaatacacccccagggatccatccagtcttccatatagacctgcttcggctggctttatcagatccacttccttcccagaagaatgatgataccctagccccctggcatcattatgaacggcgagaaagaatacatag

SEQ ID NO: 4787 - DNA, 4443 bp, Emericella nidulans
accccctttttttctccatagcgtagggatctttccatcttctaatttgggtttgagtgcaggtgttgaggcccaggttctgcctatgtgtagtccatgcttcttcacgagacaaagaactcctttgaccgccagggctgtgctcaagctttgaggctctagttctgaggatctgcttgcttattggtgagagttatcgtggatagagttcatgcgctcagactcaacgagtcatactgagcagtttctctgttctcgatatgtgagttgctgtcaaattatttccagaaattcatacatagtatggttgccacattctagcatcaaacccttctgctagacgagaatttctgtggtctcgaaatttggagtgtgcaacatatagccgtgtacgagttgtatgtagatgcgcctcatgctctagcctctgtcgatctgcacgccgtcttcaccgtgccgggattctgaaccgatccaatatggcgtgggactgccaaagcaaggcttatccaaggattcactagcttgttgtcatcaaggaccatctcacaatttcgcccaagttgggcagtatacaactggtttatagagacaatctgctggctgctaccgttcaagaactccgaccagattttttttgagggtcgcattgggctctttgctctcagcgccgttgtcatggctctcagtaccgcaacccttaaatggcttcatggtcgcgtgaacggttttggaacgtctatgaaagctcaggcccgaccgggttctgtgaaggcgaacggtaacctttaaagggagtttccggctgtgcaatggattagatacactagaagtacagtagcatagattgcttacgatattagcactgctgcatcatttaggctgagacatggcctggtttgatggtatttcagtgcatgaatttaccataaacgaaggctcagtcatggtcaagcggtatagactagatcaaaattagattatataatgcgccgaccggtagttacctaaaaccatccacatatcactagagcactgaactaggtctcgagactgctgtaggtttttattttttatattattttttttttaccagagaggtcagagtgtacactgactgtgcggtaacagcaggttgtgagctttataccctggccctacctaagtcggctttaaaatccatagaaaccctatgattttattgacaacaaggtgatgggttatataaataagttcatggtgaacgctcaaaaatccttgttaacagtacataggggtaagaagcaaccccgggaaaagttcaagcgagggataatagtatatgatgccgagaaagtgccggcactagttgatatagaacagaaatcatttgatgaagctgcgccttttgcggttatatgcccgctggtccttaagccattgtcggtaaccctggacactaccaatcttctcaccgtagtaatcggggacagggttcgtcatcgagttggaagaaggatcaacacggtatcgcttgattctgtcaaagaactctttctctttctgcaaatttgtcagccttcatattccaatactgctgggacgaaacgccaatcaataacataccaccaagaacgccttcttgtaactacgattgacgagtccccaaacagcgttccccaagaatggcccaacgagccagccaacagcaccgcaggccgccgtggccattcccagaacaacaaacggatccaagcccataacctgggcgcccagattctctaggttctggcttgaaaggacctgaacgccaaccacggtgctcactgccgagctcacgatggaagaagcgagtgtgtaccgtcgacgggaagcacggagcttgaagtatgagttccagtcgagtttggcggcctcctcacgggcggaggtggaggtggtcgagttggagcggacagagattgtgttctttgcgttgatgcatgacgtagcaatctgtgcttgcggacgcgcggatgaggttcggagcgtaggagatgctttgaggaatcggactgtggatgtgctggatgggcgtgtttggttcttgagcgagatggtctgatagatagcggaggtctggagtgtgacggggttcaacgtggtcgacgacacgcgagtgcacagagcagcgccgcgcattgagttactgagaagagtggtatgcattttggggaatcggagggaagaactctgtgtagagcgttgattcgaaagttgcggatcaagctgttctaagcctttcgtcagttccagagccgggcttggcggattatgtaacactgtatatagcgacaacacaagcctggcatcacgacttgaactctctgtaaccatgctttcttcaaccatttgccgacgagtttaaagccccatcacctcagtactgctctctgaaatgaaaatgcttgtttatggcgatctacttctaggtctggccccacaactataacttggcctctcttcccgccgagcttcttgcttggtcccgcagtatccttcttaggatctttcctgatgcacttttgggtatctcgtctatgaatacaactccaccccggagctgcttgtggcctgccagattggacttgacgtactcttttaactctgcctcagagacactgcttccagccttgatcacaacatatgcccgaggtagctcgttacctggagcctctggatcgcgtgcgccgaccacggcaacatctgcaacgccgggatgtgtgagaaggaatccttctatctctaccggagagacctgcaatcctttgtacttgatgagctcctgggcgagggttagcagttcacttcgatggtgatgcttatgtgcttacctttttccggtcaaccatgattatttttccatctttatagactccgatatctccagtcttgtaccagccatctgttgtgaaggcttctgcagttgcttccgggttttcgaaataacctttcgtgatcatcggccctttgagcaggatctcgccctcgtctccacttctaacgtctctcatccgttcatcaacgagccgtaacctcatattgggtagtaacggactgatacccccggtattgtcggattgtccccagggcatggtagtcacgcttccagtggattcggtcattccccaacgctgactgatggtgcatcccagcatcttttccgcttgctcttgaagctctaagctcaggggcgctgcacctgactcggcccggacaagggtcttgaactgatctgtcacgcggtcactccgcacaattccatggtaaaccggcggggccgttgacaagaaggtcactgcatacttcttacaatagtcaatgaactcatcgatattaaacctgggcatccagtacactgtccctccggcaaccgcgggtgtgatgaaacatcccagacaccctgcaatatgggctgtggggaggtgtccgactgttcgatagggaacgttcagatgtggcttcccttctttagagtcccgcaacaccaactgagtgaatagggcttcggaaacaagattcatgtgagacaacataacccctttgggcggaccagttgtcccagatgaatagagcaggcagatggtggtattttccagcgcatcaatatccgcaatccgctcccaatccagctctgccgttgcttgcaggtaattcctcccgaaattaccttggcataaaagccgccggtgccccatactctctagtaccaacaccctatccggtggtataccacattcccgcgcagcgtcccgcgccttggccctattctccggacacgcaacaatcactttactcctggactgccttagctgctttgagacttctgaagccgtaagcgccgtcgatgccgctgtgtagacaccccctgctccgatgataccgcagaacacggcaggcaaaagaacttgattcgccgaaatacacataacagcatctttaccggggccgtctgcaccaataccaaattcagaccggaatacgtgggcgaggcgcttggttatcgtgcgtgcctgggcttttgtgatgtggtttgttgggtccgccgcttcggcatggaggattgttgactcggtggtaagggatagctgggactctacagcagtcagatgtttgccgtctaggcactctcagaatcaacgtaccaaataacaaagtgagcagatcaagcctaggaagctcgtagtctttctcaggtaagtattgcatcgttgaattgtaggctaggtaatcttttctgttcgattgatttgaacaagggaataatctaattcattcaagctgttgaaattagactttgaaccattatcaatcgcaagttcgtggaggctttcatataggctcaaatctcggctaccccaacttgcggggatcccgaggttcttccctttcgcggggtggcgtactcaagagcatgctatgtat

SEQ ID NO: 4788 - DNA, 8635 bp, Emericella nidulans
ggaacgacagaagcgtcgacgaagtcgtatcagagccggcctccatgaggatcccaccaagatacgtcgtatgctcatcgtccaatccgttctttacctgatcatcaatgagcttctccataaagcaccccgtcctaattcccttagccatccgctcttttgtcgcattataaagccgaaaatacaacgcgcgctggtctcgtcgaatctccttcgccctgcgcttccacggcgctaggaactcaggaatatgccgcaggaacgtgatcccgtcgactggcggtgcggcgccaggttccaggagcgcagtgaatcgattctgaacgtcgtagagagcctgtacgttcggtgaattgaagtctgcgccgcgttgaccaaagactgaggcgaggataacggctgtcgtgtatcgctgaatgtgttcgtagtaccggtctggggaacggattaggtcgaatgccgtctgggtggcctcggcttcttggatggggaggacgccggcgagttcgcgcggggtgaagaggccctgggctgctttgcgcagggctttccagccgtcgccgtatggggcgaagaggatatgggtgtggttcttgcagatgagctcgttggcgatgtagttgtctgggcgggaggagtagatgtggccgcgtttctcgaggagtcttggacggaatgatgagccaagaataatttttatatttgatttatttgattttatcaatgaataatgaattactatactcactcttgaacgtctttccagttattaaggaccacgacgtttgttgggccgaatttgagtccgattatgggaccgtacttctttgtccattggtggaaactgtgtatatgccgttagccgcaggccagacttcaagtagaagagagctgacgaacagtaagaatgccttcgacggaggaatcagattcagatttcctatcaatggcagtggctttggtcctggggggaagttcttcggtcgcaagctggcccaggtatacggagcgagtgctacgaccaatgatgtgacaatggccacaagtaacgagacaagcaggatccagaggtcgttgcccagtgagagacccatgattacgattggagctctgttatgggagaggaggagccgccggcaccaaggaaacaggtacagtttatatgccagactcactaatctttggtgattaacccaagtctccaacaaagtcaattggttcaataatgttataccgagagcgaaattacactccactgcgcagcatagccataaatccagtgcgtactaatgatatatagacaggggtgaatgccaatgagaaagtgccaggcacggcccgcccgatagtagtcggtggagaatcaatccgaacgattccttagtcgatacgcacgtattccgactggatcagaccataatatgcctatatcaggcccattataggttgcggggccgaaaatagaggtcggttagaatccgattatgcctgcaggcttcagggtccttggttcttagcgggaaattttctcccgttcagatatcccctgctatcccatcacttgcaggcccatgtgttcgatcaaagattgggcagcgctgccaccatgactttgaatgcggctcagaagacgaatctcagcgtgacatggatcctaggaggaattgccaccattacagtcttcacccggatgtacgtgcggttcttccagcaacgaactccaggatgggatgactatgtgatgattctctgctgggtatgccacccagccggtcgaacgaacgagctacatcagaagaaatgaaaaatgaactgactctgcaagtgcctagcaataacctcagcctctctcgcctccaccgcaatccactacggcctcggagtggatctctacggtatccaatccccagacgacagagtcaatgcgttgaaatacctcactctcgcgcccaatccaagcattctcagcgttgccttcggcaaactatcgattgttctgttcttccaccggctgctgggcgtctcaatgacaaggacgctctcgacgattctatggatcctcctcttcatcacggcaggtctttctatctcggcagtagttgccgtcctcgccttctgtaccccaaccgaatctatctgggataagacaatccctccaaaacgctgcatggcaccagaaacacagttgggtattggccttgcccaggcttgtacgttaatatccttcttttcgaaaagaaggccggtctgaccaaggacagcctttaatgcctttaccgatataatcctcggtctcctcccagcgtacagtctttataacctacagatgcccctacgccgcaagatcggtctcatgctgctttttggggttggtgtgtttggatgtgtcatcaccagtattaaagcgtggcagctccggaacctgacagggcatgataatctgacaagtatttatttcctgaattgaacctaggtaaaaccatactgacacgatgtgtctagaatcatggtctccaatcacaatatggaatacgtatatcccccttttatccattacaaataagaccagggcagctaactcattgtcaccatctcgccaacctttagtgctgaagtaagagcaaccacatcccaaatcccgggcgtaccatccactaacaaagcttcagatgttcgtcctgataacatgcgctaacatacccatgatccgctcgctcttccgccgtatcttcgacatccactcctccgcccctgcctcatacccgctcgattctacgccgcgaaacaaatcactctcggcaaggacgaaggatcgatacttttctctcggaaatagtcaggggaacacgcagagcagtgtctctgcgggctggggaaccaggcgcaatagtgtcgatcgaatatacccgttgacacggcaggatagtccgcctaattccggcattgatggtggagggggggagacggggagtcaaaagggtattgtgaaggggacagactttagtgttagctacagttaacagactatatatacaaatactatatacacataatatagtcacttattcgtctaatagaatgtttaaggagtcagttgcaccctgattactctgtacatcaaagacatatacttgaccccatagagtcacatagacatataaccccacccacattcagctacgtaggttcatcactcagctcagttttcgcatgctgatattgctgctatttcttgactgcgtagtctgggtaagttgcattatgccattccaacggcaattcttctcttattcctgcccgtagctagttcgcaatacgcacagcatacgcagagctaccacagactggaggcagactatcttcttcttacctgctttagcacagtttacgttctgcacagtaagcacatattgaacttcccactcagcaaaaagggaaagggctaacccccttggagacttatgttgactaatatactggttgtcggcacacttcaggtacatgacccctcccccccacgagatcggagccgaaaggctatccatctttggacagctagcttctgactaatataccgcacgtggatccacttcactctgctcaggccaagtcactccacccgctctcagactcccgtcaaactccaactcactgcccgcaatctacaatctcgcatttgaggatgaagcccaattagcaaggcaatattacatatttaacctgtttctacagttcttcctacttcacctgcatcatcgtgcaatcgggtcccaagaagccaatccagaaaaagtataacagtcgcttacaatggtgcgggccgtgctcgctctacttgcaactgcttttcaggctcgctgaatttctgcaagggctattagccaacgcattaagtgtgctaagcctgtggctcagagtgtcattttgcgcttgtggccgtgtcgtgggtatggcgagtttgcaatggcggctcaccccatgtcgtcgggaatcatgtactagatcggtatttcaagtttggatggcctctagaaggcaatgctgtcttcgctattgcacagattgctcccttatatgctattgttcagcaacgggggagagtcacaggttttggtttatctgaagggagggagacaaaacccttattggacagtagctctaaaagactattttatttgagtttgacgtggtttatacacgccttaatcctgttcctcatatacgacttcgattggacctagaagaggcacgaccagcttcggacgctcatcaaggccagttggataaaccactgtgcccatgtttccagaggagaaagaggcaagggtcgttgccagatctctgggaccccccagctccaccattctataacgcaacccctgtgctgcagccgaaaaacatcgccgtgagctgaatctggcggaaaatcccaaggttctccatcgtacgcatcaagggtacctgtccagctttcgccaggctgaagacacacaaacaaccaatgctgaccgcatttaaaccctcgaggcaaatccgtcaggtacgcagtcacgttgcagggaaatataggcctgccaagttcccatgtcgccccgttccgcagtctgtctagctggatggatgactcgtactgtatgacggtcccaacatacaacattataggctccgcgggtgcattgcccagcacaccgtgataggtgactttaattttcccgtcatcaacctcgagagtcactgttaagataggggcgccagacctgcgggacggaatatgttgattagcaacgatgaaataccatgcgacaagagattcaggataaaagcacatgaggaaaactaccaagtataggaagcaagaaactattcaactctgcagatggctggatcaaagcctgtcccagccggttttggttttgatacgggtcctgtaatagtcactgaggggagagggcagtaaaccggaaacgaggtccggcaggcaggataatcttcggccctgaaggcaaggcctgaccctgactttggtgttctagctttgtcccccaggcccagtatgcaatttcgcccccggcccacagtatctcgtactggccacaatattaagccgcggtccgtgcctttttgggagagtcccgtacagcgtagtttcggccgccggccagagctcaggcacgtctaagccgtctatgggaaatggactgggagaatcaggcacttggcgaggcgctggaccctgcgactcagccaccggcgcttctttcatctccccataactggcagaacagagtcccaggataagatccgagggcctccacttgaagatgcagggcctatccacgccgtcttcttcgcgtttgattctgaatattatcgcgttggtcggccagtgagcaatttgtgcggataaattcttccacccggtcaaggagagcgtaaggtgttgtgttgtttctaacgctgctggcttaggctgctggcgcggggcagaatccatcctgatatttggcacttagtttcacttcaggtttttggcttttcagggttgagttataggggataccactaggattatttccgcactacttcataggatcataggggaagagcaaaaagccaaagagggctagtatgaaattgcgaagagcaccagcatgggcttatcacatacttaaagcctttcccgctagatgagcctgacctggcgcgcgcttgtgttagcttagatgcgagtagtttcgacacgtcattggtgtacagtatgcatgtatgcttaaaggggaaagggtagaaggagctttgtcggctagacctacgtagcctaaaaaaccgtatgccttttagacgatttatcctctatacctctctcaatctctttaatagatactcgatacaatgcggggtcaaatctccagaggctgaagatcatggtgaaaacgctgtatcatgtgacattcaagggccctaatcgcatacacggtgtacgggatgagcttcgcataacattttcatggaactcaatgttgaatattgagaaagtggagtgatatacactaaactagcatctactatcaaaccaatgcatttgccagctttgacgccggctcacaataggcattcaagtagaccaaataatttatctttaacttgatcgtcggcgaactgaaatttgatggtattggtaacatctataccttgctctagccatcgatctcgcattaaggatgtgcgagcaacagtcgctgcctgagcgaaggccgctaggatgcgagagcgaagagagagcgaagttaccgcgatagggccttttatctcctgtgctgactctagtcgtcgttgtcctgggttccgttattaagaagagcccagttagagcagcccaagtcccatgtgctccagcgaggcgaaggacatcgacgggtcccattgaaattccgagatactgtcttggctaggttgtaggggtgtctcgaacagcgttgatgacagaatatggtcgccgtagggtgatactgcaccagtttcccagacccctgagctattaccaaatgccatattcacgtttgaggaggaactgggagttgaatgctgctgttgtggttgctgttgttgcatatgaaacgatacctccgcggcgtgtcctggcgcggtctccatcggtagcgacttgatatacttgtttagtagagcctgcagtccacgaccaatccagtgggcgaggtggtatgctgtacacttgacgccaaggcaaaggctgatcacgggtgcgatggagttgatgacggcgccactatctattgatatatgctttccgtaaatcgtggcggttttgagtaggaacgagcacgcgaatgcgatcatggtatggtagtagtgcggtatatgagcaaatgccgccacaatgtctgggtcgttgactgtgaggtcgaggactgactttgcagagtttattgctacgagggccaggggttgaaactcggccgggagtggatcctggacggggtcgcgtcccaggccgcgaaagacgtgtgaagagacgagaagcttagagaatcggtggtggagcatgattgctttgcttgggtatgcccctatggttggatggtcctctattaaatgccgttagtgcgcgcctttggagtcaataacgatcaggcagcttacggctgagtcccaaccagtggttcacccattgatcgatctgttggttgaacgcatccaactgcggtttcagcagaatgggcactcgccgcttcgagtcctggccgaatgtctcggagactgaccgtagaatctgcaagagcgctacctgacttagaattcggatatcggtgggctgtcgattcaccgttagatagagcggccagttttgaatcccttcatcttcccgcatgatgtaaggacggccatagaggatcgctaaatgctgatcgcagatatacagtaaataccatatccggacactgtcgacgagtcttttcgaccgctcatcgagctgttccagcgcctgctggcttttgaggctatcgacggccgcagtgaacgatttatggagttccatctcgactgcacggcggattgcgaggcttgagattgaccaggatatatcgctgagccaaaagcacgcaatacaaagacctcgaaggtcctccagtgtcactgtatgcgagaagaggaaatctgccaccagggtgcggaactctgcgtagcaaagacgaaacagctgctcgctgtccgcgctctgcaacgcctccacggttaaaacggctgttaaaaggagtggcgacgcttgtcgcatctcctgcaaggttttgtactcgctcgctatcccgtagagataatgatctgtctttcgcaggtagcggttgaccagcatttccgcatcatcaacatttattaccttgcgtgagatcaaatcggtctgcgagcgggtggcagtggctgtattgtccgctgcagttgcaagaccctgcgagcgtagactgcgtaatcgtgtgatctggtaaagcgactggatgggaggttgggtcgccgttgtctcatctcggctgggtgcttcgggatgcttatctataagttctgtgctaatgtcgaccggcatcatatctccctctcgcacggttctatcgcctccacgcagctccgagagcacagcgatcgaacgcaacgctgggaggtctgggaggtcccctgctgcccggagctcatttactgcaccatggagcactccaagatcgtccaataacgcattcaatagccttctagagttagttttaatctgtccaatgctgaaatattccgcctgttacataccgattttcagacgacggcagcggatacgttgggcccttcttgaacacacaggaaagatgctttcctgagcagcgctggcatggtggctttcggccgagaagcacacaacgcacctctcaatgttagctaacgacctagttggatgtaatagataccttaccttatgtttctggcactctacgcaggccgttgcccgctttgataccgggggaatctgctgggtagggctgcaggtatccatcacaaaaaggagatcaggaatcttacaagaagcatggagagtgctatcgaaatactttacggacccacccggcacacatggggc

SEQ ID NO: 4789 - DNA, 2896 bp, Emericella nidulans
tatattacaactaatctttaggtaataaatatagtaactcttcttttttataattccaggctgtattaattgtaaactttatacttaaatttatataaaagggtagtccttgaaattgtttctaataaaaaaataaatatcctaggtaataaagacagggatagctttataagtagcagatattctagatataattatagagataactagtagataatttcttagttatatgttctatatagtataattctatttataacctatcctttttttcttagagctattatttctaggtttatattttatataaagctcctagaattgctctaggaataatataatattatcttattttattactatagtaaaagatctaattattattaagattagagagtgattcctaatataataggatatatttagatagatcttcctatctagacgtgctgtatatacaagaaggaattactaaagaagaaataagaaaaaaaggattattattataaggaagtcttgtaggtggcttactgccttcagaacagcacaggccttggccgagtcactcaggtctaggtccttgtatgggcaaggatctataacaatagatatacttaggaccaagggaggttcccctgtcttagggaatatctaaggtttaattttaattatatttatatatataaatagtttctaatactgtaatatattactgtattttatttaactatgttgaccattgcttttagaggtattgatctgtatatttgggataattggatatccgggttaggttagaattatttgctaaacctataggcggtttactgtccaggtaacctaccccaaaatctgtgtagacagatcagctaggcctgaaaatccgccttagcccgtggtttaacaagtctctgcattataataaaaaagccagtttaaaaattactctaaaaatattatatttaatgggaaatgctaactctataatttcattcatgtacccaaagaaatgataatttgaactcatagtatatagtaaactttcctattagaaaagatatgatatcttgagatacctgctttccaaggggacttatggtagggcttcatgaaggcaccctcttcccagaactcagctaattaggggccttgtataagcagatatttgcttattatggtaacctcctctctatatactggatttatcccctcctccccgacaaacccttattgtatatacagcaggatattgcctagaacaagcatatcatccctttacagttgggtaagataatcatgggacgtggagtgactgggaattatgttacaaccaacctataatgaaaaactagtcacttatatactaataatgttgtatctaatgtgcacaaaaaactgtacaagttgcccaatataaaaagaatgggccaatatgcgcagcaacagtttgagtgccctgggaggccgttccatatgattcctcctaatcatcaagctggacatagttcgccggaaaaagccctgttttgccacggaattcacctagccaccagtcatcatcggggaattcctattgtagaacaagataattaattattttaacccgaggaacagagtatttggtgagaactgtggataaaagactgggtgggagttgttgacttacaatgtttatgatttcagccccctcaggaaagctgagttcattatcctcggccgcctcataatcataaagagccttggcagtgggcttaacgtgagagcctgaggttggagtaggatcggctagtgcctcagattcatgggcatcagcaggccgggtatcggactcggcgcggctctgacgaccatcttcaaggagctcaacatagttactaggaaaaagtcctctttccccttgggcgttcgatcccaaccaccaatctttgtcgaccatttcgatttcggtgacgaattcaccctccctcaggtctacctcgttatcctctgctttctcatagtcgtaatgcacaagagctcgcaattccccgacgccagccttgccaataggcactgcctcaaagtctgcattctgagtaagacggttttcgtcgctatcgactaaggaaacttcctctggtcgctctaaaggttcggccatcgtggcggcatttcgcgtttcgtggtcgtctatggcgtccttcgcaactggcatggcaactcggatcggtgagctctcaccttcagagcgttcgagtgtcgaggactcaggtatttgggtctgcaggacaggtggctgcggagcttgtggctcacgtggaaccccagccgtagcttcagctgggatagagagggaagaaacaggttcgccagcttcaggagagctaggcgcttcttttggaggtccttgggtgagctggtcctgggcaataccctcgctttgctgtgccgtaatagcctctggagtaggcatcccggcagcaaaagagcctgcaacctcagtgcggttattttcaacagactttcccgtgtgcgtagtctggacgggggcccaggttctcccagtgtaagagctcttccactccctgacaccactaagttggctttgaacggttgttgcaacacgaggcttggttgactcttcagcaacagcaggctcctggctgcgctctttcgctttttttctgcccagagctgcgcaagttgtctaccaccttggtcggcaaggttctactgcgcccctttggaggccaggcggggactaacgcttgccccggaagggcgctttggccgaaaccattctcctgggactattgggcccttgcttaggaggttttggcgctgatcatggatcagtttatctgccaaaaacctggggggcgactccttccttggaccaataggtggcctgccatga

SEQ ID NO: 4790 - DNA, 3336 bp, Emericella nidulans
gaatgagacgggcctcctgggagactgcggggatcggtcgactgtggcggagagggtatttgcaaatttttttcctcctgagcttcttcgtcatctgtctacatccaagagtctacatcctcggtttatcgaacgctttggaaacagacttccaccctcgggtgagatcaacgatggtcagacctatgcctgggaaagcatctttggccctggcaccgcagcagacgaagccttcatggcccactatatttcagagtacgtaggccacgtcgctgatgcgggaaagaaagcatacccgatccctctctacacaaacacatggctaaacttcgatgacccctcggttttggatctccatgggtatcctaacgttgttggcggaggcgcgcggcccggaatataccccagtggagggccctgcccgcacgtctccgatatatggcgcttcaacgcaccggcactcgacttcctcgcgccagacctatatttccatgactatgaacgggtatgtcaggattacacagtccccacaacgaatccactgtttatacctgaacaacggcgcgatgaccatggagcaagaagggtatggctggcgtacgcaagttatggggcactaggcacgagcccttttggtgttgacacagaagctacaaaaatcggaaaagaatataggcttctttcacagacagcagggtatctgctcaactcccccccaaggcagcggatgggatttttcttcgatgagctgccggagaccggttcaccaaaaggaaagcagaagtggacaaaggtgttcggaaacatcgaagtgattattgaacgcgcctttgttttcggaaaacctggtcctggtgggggcatgataatccagctgtatgacgaaacgtcatacaggtttcttgtggttggacgcggattccaggtccggtttcgtgggctagacgacaccgttacattcacagggatcttggaagcgcaggagaaggaggtcgatagtgaaacaggcgagcttaggacgttgagagtgttgaatggcgatgagacaagaagcggcgagtttcttatcatgccgaacgaggacccagactatggagggttccctattgctgtcaccatcccggcgaaaacatatattgcggaggtagaggcctatactatttgcgagaaaaaaatctaggggcaggcttagggaatgaatgtggaacctactagacctagagaatcgagagtcgaccaccgttcggcattgccatgtaactaacgcctgcagtcttatatacttcgactgtgaagtacttacaatgctcttaagagcccctcatgcttaaccacccaacttccatcctcaggaaacccgggagcatgtccttcagacccttcccagccagcagccatatacgcaactaccgcgcccgtcagtttcatgattcccatgaccacgacaggctgcgacttacttgcaagcagataccctgcattcccaggcatgaacggcggtggcgtcccccctaagccataaggttagtgacagtctgagtaccaaccagctcgggaagcaaataaaaccaaccatcaccccctctaaccgcaaaccctatcccaacaattagctcaccttcacgaataacagcgacaaaattataagaagccatacctgcatcatcaaaaacccatctttcgctcgtcagatgccgtatcgcccgctctcgttctccaatgcgtgcagaattgattgagaggacaaccctcccccatcccctgacatcctcatccttccaaatctcatcaatcttatccgccgttctcttcgcgatctcaaagtccacggcgggtgtatccggcaatatcccctggagcatgatcaggctccgtggatcgtcggtcagggagatgtcattccaccaggaactatccagcccttcgtacacggcgtaaaggccgtcgactatgggaggcggtgcgagtctggtagcaacggtcttccatttggatgggaccggtttgtctagcgttgttttccagaagattgccacatcgagtgcgtaccgccagtatgctatctaatccaatcagcttaatatgtgatgctagggtcgtggagagggggagagaggggttacttcgtaggctaagttcatagtctcagtgggcggggtgttttcagtgacgccgtaggacctgtataatccttcggggtgagcaaagtatcaagaaggcttgggatagggagaacccacggcggtccaagatcataataccctgaactcttgtttgcccatgcgtacgaaaccaagtaatccgctgtagccgttattacgcgatcccatttctccagtgtcttgcgtgtcggagaggctttgtaggcgagtttggcgaggtacattgggtgaggctgtcgagattagtgtttctgaccgtagctgcggatgcaatagaaaaggaaacagcttacctgttgccacagcagaaggccattgatccctccaggcgaacttacgcccgtttttgtttcggtcattttgggccacctacggagtcagcattttgcagtatagggcgcgggaatgcggatacctcgccccatcccaccccattttctgtgcccgttcaatcgaagaaggaagcaagcgctcatacagcgctggaaagatggcatcgaagaattccttccgtccccaagtcacccaatgcgcgttgtgccagacaaccatcttcatatggaacttgccataccacccattgttcataagtctgatcttctgcggagactgagccatctacgtactgttcacacagacatggtactgcgagagaatgattcgcagctgtagctcatgtgcggctgcgttagagtagtaggttagatcgtcaaagccacccgtctgccagtagttgttccaggcgagcctgttgcgccggcggattgtggatgggagcgccggtgaggatttctccggccaaaagagggcagagaaggagagggttgatgtcttggaacgcggttggagtgtgtatctgtgttttgctggacccgttgcattctgaggttgggcgaggtgcaggggtgaggagttcggccagcggagactcacaaaatagcttgtttcttgcagttcgtgatagatatacgctgcgttcttttggcggtacgggagaagggaggtcgtatggttgtccgggaaatcataggctccaacgaaaacctcatacttgtattttgtggagtggataggccgatatggcaaatcgagctggacagacaaatcaccagtctcgatccaatcagacacaattacaaaggccacggcgcccgacataaacagtgccctgcag

SEQ ID NO: 4791 - DNA, 3956 bp, Emericella nidulans
ctgcggtggttcatggcaattagcaatgactctaatatcttcggcccccattcgagcccttgtcatatggattcgtgggcgttggaatcttcactacctgattaaggaatttagcagccagacctccagttgtggtgttaacacaattccaccgccaacaccttccaccgtccttatatctaggtgctccgagccctgctaacccaatttactactactatccctccttgggcttcattggcaaaggtgaggattcattgcagaggacgagttggggtcaggatcattgttaagagactcattaagcctatggaaggttgcagctaggttcaaggaataagcaaattattggtccagttttctatgacgtacttttccagaagctattgacataccttaactcacactaagctgggtactaacctaaacatccttctggaaacgtccttgtaatgcttgaacaccaattcgaattcgaaagtggcgatgattatacgaccaatcatgaacggaaatggttgattcgtttatgtctgtcatggcgagctctactaaaatcacgtgattattgaatgactcagaaatttcgagagctttcgcgacgcgccaatcgagaatgctcttggcgattcgtgcaacagttacggctatccagaaacgtcgcgccacatccagaattgacaatgtctaccgtcatcgacatgtctcgaatgcaaataaaaggtataaaagcagttgcgaccccgtgtcacttcgactaccaggaagcaaagcaagtgataaaccaaagcattgtctgaagcaacgaagcaactgctatacaatcttctaccataacaacttatccacttcgtcccccataaccatcacaatgtctctcttcagaactatcccgacccctggagaattcgctcctctcttccgtcttcttgacgactacgacgtccaccgctccacgcgcggccaaactgtcgtgcagtccttcgcacctcgcttcgatgttcgtgaatccaatgaggcctaccaccttgacggtgaactccctggcattccacagagcaacattgaaatcgagttcaccgaccctcaaaccctggtgatcaagggccggtcggagcgcgagtaccactccaacgacgagaacaaggctgagcaggccgagaccgagaagccagttcagggtgaaagcagcgaggttgcaaagaccggcgagaagcagatttccaccaagaaggccgctaacaagccgcgctactgggtcagcgaacgctccgtcggcgagttccagcgcaccttcaccttcccgactcgtgtcaatcaggacgatgtcaaggccagcttgaaggacggcatcttgtccgtgatcgttcccaaggccgtggctccctctgcaaagaagatcaccattcagtaaaaccatcaaaacatcatgagcgatacgaagtcacgaattttccgaatgttttgactaatcaattttcgatgtttcaacttcacgactacctaaacttggctttcaaaggatttgcatagcagtggtgttgtggtgtttgctgttgcactcgttctttttggtgtttactaggtcatatttcctaaacgttcccagatttctgtacttttaaggattactttaatgatctaattcagtttccaagtcgaggttaattcagatttcctcgtgcagcttgaacctatcgagtaaatgttattagtgctgggtttgagactgtaaaacatctttgctatatccaatctacgtatcaaggaggtacggatgtcatcttgtaagacacctccgcacgtctgggaactcccagctgcaagttatgaccagtaataactcaccaatgaatgatcttaattcatactaaaggagtggtgctggctaactagcacagtaactcggctcggtagctcaggcacctctcctcaggataccatagctatgtaagataaagaaaagcccagacatcctttcatatataacagtgcttcaagcagccaaggtgctatttccataaggcccatatactgctacatcctcagtattactcttgaaaagacattgtgcaaacgtcattgtgcaaaaccggcaatagatagaaagcccttaatcaagttctccaagtagtggcaatacgctaggtggcaatgaagctgtcaagtcaatatccgcttctatagccctgtagatccagtcctggatttccagctgctcgaatggaccctcgtaaaaaccgtccaggtgctcctataacagaggaaatcaagaaatggtgcttagggcgtcgtagacgcgtggtctccgaatatagcgcaatatcgatggacctcaacggggatgcctgtgtgaagcactcactagcccacttggaagctgtgactactctgcaccggtggttggtgacggatacgggcccattgaaactgtggcatgctcactttgctagacagaaatataacgcagctggagcagaaatagaggaaggggattacgcagccacaagaaacgcggtcgacgaatagttgacctgctgcgtggcttcgtgtgcattgctgtacagaggctgtgatagacttgtatgattccatattcagcaaccaagcctcactcgtggctttggggtattgtcgctgtagcaacgcgtgtccgttggaggcttaaagacaagctacggaccaccacagataaagcttgcaaaaaatatataaaggcaaggatttgatttcatattctgtagaaatgtaggctcaaactttactctcagctcctcccagacatggtcggataacgacgaatataggcgtccaatgtggcaagtcatctctttggcccgagtatccagtaccgttatcatgccgcagtcagtcatggcaatgagggggttctagagaagctttaaacttagggctgacatacatcctcaagcggggcattgtggacttcgcctgtaggtggcttgcatgatataccagtgattctgatgcctataatgataccaggcttcaggtggtcacaaaacatttctgtttgagttagtccatttcgcgcagtctacggaatatattaaccaatcagacagattgacgggggccagaatcctagtagaaacattaaaacgctcataataatctcggtcctattcaaaccaagcgcgtgtcctttcacggctaagggcaacggaggttggcagagttccctgccaactgcagcaaatagtcactgtcaccagaacatgctcctaaatattctttagtatttacctacaaccaaccctcctccatatcgttgatgtacaatcgacttaccggtcagcatttcagtcgatattggctttcacaaaggccaggatgcccggcgattccagtccacgttcaatggaggaacagcggccactggaaaggggaggactggtcctattctcacaccagaactcgatgcgctcgaatatagcaaattaaagacaggatagctcgtcctaatgacagtatgaccactggcttgaaagggaagaccctgatgattttcaggtggacagaagactatcagacagaatcgcaacatgcacggcacctgcggaggagggacaagaggacattgccgacaaatatacttgttctcgctgatacgttttgttgctagtctgaataaaagcgaatggaaatatatggtctttggactttctctctcggccatttgtggtggaggtaatccaacccaagctgtcttcttcgccaagtgtattacagcctctcgcttcctctctcagagaactcccagatacggcaacaagccaatttctggtcgccgatttatttgattcttgcctttgtacaactgttcgctctcatctctcaaggtattgcgttctcctactgtgcagagcgacttacccatcgggttcgcgatcctagtaattcaaagtgtcacctaaatcgtatgtgatatcata

SEQ ID NO: 4792 - DNA, 4468 bp, Emericella nidulans
aaaggcgagagcgagggtaaccgccaatggcagccccctaggctttgctacaacgacgatggtgacggccacgataagaattcgcaaaaaggcctgacctttggcctctgcaccaccctcaatctccttgaggcggaccaggaacttgatgaagagcaccacaaaaagtatcaggcctgaggtaaggccaaccttggcaatataatccgccagagcgtttagcttgacttgtagcggtgtgatctcgccctcatcctggagagacatgactgttcggccgtacgtcgtgtggacaccggtagcagtgaccaggaaagtccccgtaccctcttcaacgctggaccccgacatgataaagggatccatcttcttcaattcttttttttgtgcaactgcttcataaactttgtcgcctggggttttgcgaaggaggtctgactcccctgttactgaagactcgtcacatttgacaccatgcccctcaatcagaattccatctgccgggatcatatcgcccggctccagatacatcacgtccccggcaataatatcgtaggtcgacacctccgatatctggcctgacctgataaccttgacataccgatcttctttcttcttgttgagcttcgcgaattgccgttctttctgccaatcattcgccgcgccgacagtcacgacaacaacaatcgctgcaatgatcgcggctccctctacccattctacgcccgttcctcgcacagactggggaatacccacgacgagggagacaagcgcggcaaatgacagtaggattagcaccttatcattgtacgcaatccacacgagctcccagatggacttgagtttcttctcgggaagcttgttggttccaaacacgcgttgccgatccacaaatcggtcctgcgatgcgtccgcaatagtatcacgtgatggcgttaatggggctggggaggcagacttggttgctggcacgaaggtccgtgaaaccgcctcgttgaaactcaccgtaccatccaacacggtttcgtccaggctcaagccgctctgcacgttggttcgtagacctttttccagcccgcgcaaaccaccaaaggtgccgaaagcgccgaagttcttagggttcaagagtttatccagctggtcgggcgagaaggcgaacttgttgttttccattcctgaatcagatttcccattgggttctggtctcttagtgcccctcccattaacagaattgtccttgttgagtgtgcagttcgacgcacgcacatcgctgtttccatacttacttgatgactgagtgccgtaccctggatgccctgacccgcctcgtggcgatgtaaggggcctggacagcgcggggaaattaggctgggccatgtgagggttagacacctctgctgatatttggcctttggtagaggaagcgttaaatagaagtggtgtgcaagcccagttcaacaaggagtaagggggtagcggggtacgggggatatacgggggatatggcagttcggcgcacctcgagaacttatccaaagggcagccacagaataccggtcggtaactggccaggccttcccatcatggagtcattgagaggtacctgaaacttgatttgatgtcgtgatgatgtggcagttgacgttttgtgccaatcagcgtctaccaagggtgcttgctgatgataagtcaaatctcatctggcattaaaaagaaaccatgcatatcacttcttcagcaacgtaactacctattgaagaaaaacttggcgctgtagccttcccttccaaacactttgttaccaaaacccacggttattgctcctgatagaccttccggataaacctgtaacagcaggtcaaacacaaagagattctcttgaggtacttctttctcgggtgatacaaggaccatctcaacgtgggtaagaggcggtgcactcataatgacatcacacttaatcttgtcacctgacagttgctgtgtttaaacttggtttatgacagagagcaagttgcagttcctccgttaggaatcacctataagccgataccaggagaacctcacaggagctatcacggcctattgcaccgccaatacctttcaccgacccctatggcagtgatcaacttccaacggaaaagcgagagccttgaatcttgtccacaatttcttccataataaccctagtgaacctttttttagctcaatagatatgagctcaatgcagatctgcactgctaacaaaaacaggcaagaagatttctggatgtggggatgaactcggcattaccgtcatcacgaagacgtattactttattatgacccaatcacaacgctgcccacctggccgagaaccagacccacggatagcgtggtcttagccggcaggcctgagagtgggatgttcggttcggatataatttaatataggaagttccctattttacctatcttgatttccaaaactacgtcagcaatgtccttatattaccatattctgttagcagtcacctcttaactccacatggtatgcaaaccatttgccacagatgggcgttataaggagcgcatgatttgttccgtggccggggggtggggggggaagcaagattttaaattttgaatcaatataaatgtcgtttataccgtgacatgcagatgaattactatcaaaaatgcgtaaaatacgccaactatatccgacagtaacacaccgtcgtggctatttcgctttttcaaaacatagtgctccgaacgccaaatctgttcaccgttgcagtaatctcggagaagagaaaaaaagtaggattgaaaacccaagcagcagtgagtcagtggaagggataacgtgtggtagcaaattttcaacatatgaaggttagattccaggcttctccagttatcgcatatatagaaagctaatattcaacagaacatcctgtgtcatctacagcaagtaacgatagcaaagaatagtatagcctcaagaattacagagaggggcctaatactgagagcggtgataggaagggaggcgatacacataataaggatatcaaagaataggtttgaaaagcgttaggcattgctgtttatatagatattgagcagacaaactcgcagttggagttggagtatccgcttccatatttctacttaatttctgaacgacatagaaccgaaaaccataaacctggcactgctgatgactcgctagtcagctctgatcccttccaaagaaaaaaaagccattaacttctactcaaaaacctcttcctcgcctgcactcctgacatcaaacttgcagcgccagcataggtctagctgacccacggtttccacaatctgccaatatgtgggctatacataagggccaagtaagtctttcgtgaaagccggaccccacaaacgatattgtcgtaattttcaaatggggtctgttacagaccgttttggagggaatttgtggggaaaaaggagaatccagcgggcgtatacatctgggatagtctccaaaacccaagaagttcgtctcgagtcacgtgtacgacgtcatcacgatcacgcaccacccaccaccaaagtcttcgcccaatcttactccatccctgactgtctaaagaatcaccgcgttaacagtttatgcaaaaaaggcaatatcgtcgtcatcgcactcatcgccggcggtgcttatgtctatagacatcgtcatggacacctggtcaatgttgaacacaagaatctagattgagtctcttgatgaatcgcaggaagttttgcgagcaggtccttgtgaggcgactattgcttctcgagagactgcgtggaaaatagctgcttgctcgtgagaagtttcatagttatcttcttgggaggagttcgaggcctccagagagttcgcatgcgactgaatcatcacatcgcaagagggttcacttgcgggttcttatgcgtgactggttgcgccatgtgaagctggatggcagtttgttgatggatgaaggaacgttacacgtgaagtttctagagggatcgattatcgcatcagaggttgcatcacgggatgttgcagggccgtcagaggttcgtggagaggcattatcgcgagaggctgaggaactcatgtcattcacatattcgaatctagctgaaccacctcggccccgtcgcagtccgctcaagacagtcagtgttcaacagtcataggcagacaaaggcggcgcagttaattcagcatgcaaccgagaatgaccatccgaaagtctaccttgacttgatacccacaatatcagccagatccccgcaaagtctggctagatgtagcagaaaccgaggtttgtcttgatgttcaataaacaaaactgtcggtctaccttgaccattcaaagagaatggtttgcgggcatccctttcatctgttgaacagcagtcaacccaggtctctgaacacggctgaacgaggttg

SEQ ID NO: 4793 - DNA, 4975 bp, Emericella nidulans
ctatgcatatatgaagggagccggttcttcgcaataatgtccgagatggatgatccgtttcagtaaatacgagcgcaacatgccgcctagagcaacgtgtatttgaacagagattcaatgacacaaaggtaaggacgtggaaagaatctttcatataggcggcatacctctcaggctcagccttgctacgtttcggaattggccgtccatgtccctgtcaatatagatagtcttcattagactgtcgccagcaaacgccattcttctcaacgccggtacccatgcagcatgaattatccgtgagcaataaccaggcgccgcgtaaacccacaagtcaacaaaatagacataataacatcggaggctaaatatacatcagaaagcaaacaggtgtaaccaatgaaagtcctcgagattaaactccatggaagccgctttgctcaacgacaacgtaacgcatcataatgacagaagaaacgatttgaatttgaattagaagagcagcaggagtagaattaccctactctgcagaagccaggaaggtcaaagaaattagaagaagatagtaaaatcaccgcttaatgattttcagtaagggtgcaattttagccttcttactgagtccgacacggtatgggactttgctggttgatgatatgggactatgtttaccgggcccctttacggatggagccttcaagtctgtgcgcttccggggtgtttcgggggcttgttgggctggttgtgcgtgctcagagggtttggcgggtgaggttggtggatggaggtcaaggggtgcttggtctttggttataggttccatgatatccgaggtctgcgcatcggttgtttttttggtttcgaggacaactaatacgccggactcgttgtgagtgtcactcaatcgtggcgtatgtccgcttcattagaggttgttgttgcgcatcctgctcgtctacctctagggtgcgggtgttctttgatcctgctgctcggacatcttcttccttttccgaccgcgctttttaggtgctgatgtttgttctgcaaccttagtgccgcttgttcttgtagggttggagggtttgttctcttcgtcaataggtgtagcaggtctctgttcgacccaaatcacgtcatcttctatatctgactcgtaggtcttcgtcagagtcaccgaagttgttttgccgcgtttcagcttctttttcttgggctctttggttaacgtggcggttgtttgtaaactttgttctagcgccggcgcggctggctgttcgctctggttatcatgcatgaaatcatcaataatgctctgcggcggagcaacatgcacagtaatgccgcctggagcacctggaactgctggcccttggttctcttcaggtgaaatgtctgcagtcttagtgatggggcccttgctaaccgtgtcgtccactttcgctctcttcgggggtcggcctggcttgcgcttttcgggtttagtaggtgattcttcatgaaattgtgggagagaaagctcatcatcatcgtcgttcgcaactacagcctgcttcttcttacagcccttcatctcaatattgggcgcttccatcgtgacaggtagtgaaagttcatcaacactaacagacgacagctgagcactattgagagtggcattgtcactttttgctcttggaatccgaggagaaatgattgatgagaacggttccgtatcgtgcggcgacgaagtcgttccctgcattgtggtccatcggcgaaattcgaaattctgcatagcttccgttcgagttgtgatgtttgagtcacaatcaaagtctgctccgttgagtaggttgcgagaagtgtgggatgacgagtcaaagatattgtatgaagctgtctgcgaccagtcgcttatgtcgaccccgtgggtgtcggtgcgagaggattggccttgtgttgttatattttgaagttcatgagcctcagggttgttgtcgggtgcggcaattgcataattatcgtctggtacttgttcgggttcgtaggttatggtctgcaggggaggagactgcgcttgctggtcatcgtcaaacagtcgctgttgtgcaaggccaatctccgtcgtcatgtttcctatttagcaagagatgctgtgttagtgacccatgcatgaacgttttcaagcagttttgtcaactatctctcgactgtcaaatgtctcataccggatgatccactgtgccccatagatggtatccatcgttcttccctgcgctgctgggaagcggacagatttgtttgctgatcattttgtgattgaagaaataaatcgaagtctaccctaatgtgagaatcgtggctgacatcttgagcctggatatctgcgtcatgctgcattttatcatttaccactgaaacacggttcgttcgctcgcgaggaggctcctcgaagggttcctcgtcatcatcggaatcttggattacacgatcaaaggacatctcatatatgtaggtccaggatatgtaagaaagtaaatcagaggcgattatggctcaaattgcttcaattgatgaggggctcacttcaacgcgtttcgaatctacagtgacgcggattcacgtggtgataagataaacctgcacgccttaaatttcaggcagcagcagtttggcataaatgtagttattcacggaggtacaaagtatcgtgagaagcaagccatggtatttctattccatcgtggtttgtggacgcatcacacctcttccaaaaaattcacttattacaccaaatcggtctttcgaccgttggagctctgccttgaatagatcatgctgatccgctgactcaatctgtctccgtcgaatagcctttatggttgaattatccggtgcacaggctggacattgggcatcttctcctattgtgttgagacagcgttggtggaaggagtgcttgcagaggaagtggacggtaggaagatcgagagacctgttacaggacgtacatcgacgtgcctggaacacaacgggtttggaacccagctgttctagctcctgcattttcgcctcagtttcagtgctgtagcttgatatcaggcgacggttctaagccgcgtgttagtggggccttcatgcgagctaaaggtagatggccatactgaagatatttccttgcgttcccgctcgatattgtcgcttaaatacttcttgacccttcccatagttacgaccgcgttgttgctgagtgcttggatcacttgcagtggtgacatcaggccatcctcagagattctcttcaggacagcatccagctcgtcaccagcctcttccaggatcttcgggctcgatgtaaagtatgtcaacgcatccacgtatagctgaggctcttcagggccgtattttttcaacgccctaatagctccctgtgtatctttggcagcagtgaaagatcgaaatatatccgatcgaaggccagcttgttcccggacaagtgtggagccctcctgaaactccgataaatcggagagcagtaggacattagaggttgagataggaatcttgtggttgtcagtatctccccgagaaaagcaaagaaaagaaaaaggaggaggaaaaaagttggagaatatggtactcacatctttcccttcaatcagttttttagctttattttgccacttttccttctctgccgtatccttctgccgtcccgctgaattgagatacatctcaaaaagcgttgtgtagagatcaactctatcctcgttactgaagaaaaagtcctctttgttgataagtgcctctaggaatgtaatgaactcttgtgggtggctaacaaaggctgagaatgcagtgcgtggtttggggatctggtactctggcgcgcgttcttcctgaacctcaggggcttgggtctcaactggttccgtcgccgttgaacttaaaccagtcttgagcaaaggcaatggaagaaatgcagctaagctctgtaaaggattgccgttttgtgcttgaggctcaggtagcggttcgacttgttgcgtccttggtttgtaatctcctccatagtattctataaaaagctctgtagtcgttgaagggcaattcgacagcagcacacgggcatacttcatcaggttgctgtaagccttggactggtaagcaatagaacatacgacgttcagcatatatgcataccaatacaggctccaacctccagatgtactccagcgcttcggcgtactttttggaatcctcaaccagtatatccacgaccatgtcattctcgccgtattttgtagctagataggcagcttgttcatagtacccgccttgccggcacatggcaatggctgtctcaagatcaaatttaagttcaccgggcgccttaatgaaagcatctaatttttttgtgtctttcaatttcgcgtagcaattgaggagtaaggtggtgtggtcactgaggctcggtcgtgatcgtgcaattcttccaggtattctataagattatggattcgttgcgtgtcgagagactagtgacaacttgtgaatataccgcttcgaccaattgaagttgaccaacctttcttacaacttgagacggcttccgtgttgctaccactacttagactcggtgctcggcaacgcttttttttaaaccatggatgatcccgtgcttctaccaactgcgcaaccttgggcacatcttgcaggctacttcgggagccaattcacgattccactgacaggtcataccggtatttggtaagaatgaaaacgcaatgttgcttttcgatgataattttgggggatttcaccccctccaatggttttttccagtatctgtatgtcctcccctcttggggcaacgtcttgtgccggatcttaaatgcccgtggttcacttcagctatacgattctccccattctctacttttttttctccccaatttttatctctgttctttcatttctttactcttgcatt

SEQ ID NO: 4794 - DNA, 4966 bp, Emericella nidulans
gtatggttttttccgcgattccaatgtttataagacggccaagccaatcagagcatttaaatgactattatggcgttcattttcagaatactaagcatggagaagagaattatgtacatgggcagatcgattgttggaagtcttcgcgaaacaaaacctaaacttgatcccgtaggcggtcacaaatggcagaattgtacacgatgaatgatcaatcacacgaggagctctgtaatctgtgttggctctcgatcacaacacataggactgtgacagtttacagcttctgatttatcagcttctgtcaatttgaggtcccttcgacactttatgcatgctgatacggaaatacaaggccacgtgatctctagtggcttgactatacatcgcgtagttctagaaggttctcaccctctgtatatatatagtgggggggaacaagagagtaagaataaggcaatgaaggaatctatcgtcaacaagataggtgtcaatcgtcatatggcatccgatccttagtaggctacgttggtgtagttgatacagtttcctcctgccctttcccctttgagcatattccacaacacatgccaaccagcaggtctattaaggtggaccaagctcaacatggattagacttgttaaacccagtccacgaaacccgccccaacccgccccgacccgccaagaaatgggttgggttagaccttctaataatctattgggttttggatattttcggctggccggcggggcagcctgctgggttgccaaggcatctaaataggtaaggtactgtatttacgttgcatatatataggttggataggatgctgtattttaatactattttatttaaatgtgtaaatcacttcctataaaagtagtgatctgcatatttgagccgcaacggaaaagctacatgaaggcttagggagatacagtctaaatttagaacgctagactcgaaagggctagttgtgcgagagcctatgtgggatgaattatgatcgtccaggagtcaagatagccttgtctatgaccaagctttgatttccaagctcatgatactagttattaagttgagccttactaaatttttgtactatagttagaaatccagctctttctgctagcagagtattgacgtgcttaccatggtctaaggagtaaaacttgataaatgtcgaccgtatgtgacggctagtcatatatggaactttcctgtttgggatatcggaactgcaagctccggctcgccgatgcttatgcagagacttcagctatttccacggttcaaaagttatgtctcttccaactgccgtattaggctaggttgcttattatttcttatgtatttaaaccgacctatagagctagattggaagaagcagaccttcattcttttatattattcgttagttgatgctggtaattacgtcgatccggatgctccgtagtaattcatccagtacataataatttgtacagtaaatttcaggctagctgccatggccttcccgcatatattagacctgcttcagggttcgatagcctcgaagatcaattcaactgcgcacagctttggcatgaggcgttcaacatgtaaggtttgccgagcagtctaacccctgggaacaacctcgccctctactcagacgtataattctcggcaatggtcttcatcggagatgtcttgactcctggatctatgcttagcggtgtcgcaaatattattgtggcccggcagtccattgctcacatttggtgctacaagtcaaggcaggcatcgcggatgaaaccatcagggttgtcatcgatagcggtaggaatggactagaggcagctgagcagctcgctagaaaggccgcccatgatgaaatgttattagaggtgtctttataatacacttatatcttgttggccatcgacatcccgccctgtctgctcacattcctgctgctttcaaagggctgagaatcttgtgagggcgacggatacagcattcactcacagccactctctatagcatggcatcttctcattaacgtagcggagaaacaaaaagaacttttgcagctggaagctctcgagacagaataccaactctttcaaacgcagagacccgagcccaacaccgttgtgccagatcatgttgccggggtagaccagaaccggttctcgtggagccatatctgtctacattttcccgacattcggtaacttaacagcagaaccacactttaaggaattaatgaaacattatcactttaataagatctaaacaagcgttttctgtgaattggtcttttgttgcaccctttctatcttgatatacaaaacaaaagagcaggacaacaactacgcctaaactcggcaagtgcaacacctgcaaaacactcctcggtagccctgcaagacatcctttccttgaccattgacctggctctcgacagtaccggaaaagccaaacccaatggagatgggacagttgacaacgtagtcaccagtgacgcagccagatcctaaagctggcgcggcatacctgactcaggataatcgtagcagcgggaaacgacgaatccatcccccatggaaggataataatctcaacattgtcagcgctcagtagatatggtacacaggcacttttgcgaagatgacacccgatgagggagaaggtcatggagatcagcataaatgtcgacgcgcggaagttgtttagaattagacccatggcgtccgcagcaatagcccgcttatgcaatgggcgtcctttgtatggtacggtagaagtaaagaagtcggggccgctatacacagaatacaattaagacaagaccatgggcaccagacatagccgcctacgaagaacagtttgtgctcaaagacgtcgtcgaagcggctaccgatgaggatgaaggcgcccacagtgagagtatctagggggaatcagctcagcctgtcaggctggttgttgatgtcaaaggagcgtctaatgatgtgttgagggacgatgctgagacaagaccggcttgagtaagaaactgcgaggagcagatactgacgacaacgaggaccttgctggctttcgctgggagggacttgggacgttcgacgttggaatcatcttcactgtactgacggcctacagttttcacgcaattcacgcaattcacgaattcacgaattcacgatcttcactcatctttactcaccttcactcgaggcttcaggttagctgggtagcaggttatgatggttgccagagggcattttcactgtgaattgatgtttactgacagtcacgggcctgggagcgagcccctgtagactcgtagaaaaggtagggatagggtttgagaacggagtatgtatgatcgtgaggctgtgctcgagtcaaatctgtccacccgagtcaccattagacccactcgaccgtctgacactggaggaatcggtgggaagatgctccgtgtgtttgtttcatttaagaacttaacgccgctcggatggatatggagccgctattgcggagttacgatgttgagcacggctatggcggggtttcaggctgcagtgccgccgctgcagcgagatcataagccggaatcaatataaatttatcatgatccagctgcattcgagtcttgattccttcatccaacccagatcaatcacacacatcactcaagcaaaatgtcattcgctaaggatcaacccgccagcttcaccaatgccattgagagagtcgccattgtcggtgtacgtaaacacctccccctccctccccaagtacgttacaggatgagactaacagctactaggccggaggtactgttggctctgtcatcgctggcgcgctcctgaaaactggaaaacacactgtgactgccctcacgcgcaaagacagcaccaacacactccccgagggcgtcgttgtcgcccccatcgactacaacgatgaggcctccattgtcgatgccctcaggggccaacagttctttattattactgttgcccccactgcaccccgcgacactcacagcaagcttgtccaggcagccgccaaggcaggggtgccgtacatcatgcccaatggatacggcggcgacattgagcatgttaagttcggccaggatgtcatgctcggacccgtagcccaggccaatcgagatgagatcgacaagctgggcatgaagtggatcaccgtatgctgtgggttctggtacgattacagcttagcgggcaggccggcgcgtttcgggttcgactttgacaagaaagaattgacgatctacggcgatggaaacaccaagacttcggtctcgaccttagcccaggtcgggcgcgctgttgcgactgtgctcagccttaaagtgcttccagacggcgaaaacgacaagagcctgacactctcgagctggttcaacaaacccgtctacctccagagttttgttatcagccagaacgagatgtttgagagtgtaaagcgcgtgactggtacagcggacgccaactggacgatcaccaaggaggatgtccacgagcgatacgcagacggtctgaagatggtcaagactggcaacatggctgggtttgctaagctgctctacgcgcgagcgttcttcccggaagatgccggcaaccactctgacaaggctcagaacaagctgctgggcttgccagaggagaacctggacgaggctacccaagtcggcatcggtatggtcaaggcgctgcagagccgcgcggagcgcatggcttcatagagatgtacattcttagatttgaatcgttgaattaaaatcgttgaaaacaaaactggccccgttattgaatcctggtgacaaaacatagaacggtccatattagcttaataaattaggtctgacctaatacgggattcacttggtacaggattatctttcccgagccgagatccactggggcgatataaaccttc

SEQ ID NO: 4795 - DNA, 10276 bp, Emericella nidulans
cccctacctcacctgtgccctcagatgttgtggcggccgcgcaaccgcaaagcctccacaaatcgccccgcatcgctcccacgacccttccaacaacctcaaacggtcagacccgttccaattcggctcccgcttcctcgaggaaggcgatgatgtatatgagttcaacgcatgggaccatgttgaaccggacgccgagttcctggcatttgcagaggctcaatatgcgaaacagcgcgaagcgcaagcctcagatttcgacaagaaacgcttcaacgccgacccggtgaaatggtggaatctgttctacaagaacaatacggcgaacttcttcaaggaccgtaaatggctgcagcaggagttcccggttcttgaggaagttgcgaggaaaggggccggcaagcaggttgtgctggaggttggcgctggcgcgggaaatactgcgtttccattgatccgaaacaatgagaatgaggagctcatggttcatgcgtgtgacttctcgaagacggcagtccaggtcatgcgcgatagtgagcactatgacccaaagcacatcacggctgatgtgtgggacgtcagtgccgagccaaccgaggaaagtaatgggctgccgcctggtctcacggaggggtctgttgatgttgttattctgattttcatcttttcggctcttgcgcctgagcagtgggagagggctatccggaatgtataccgggtgctgaagcccggcggccaagtcttgttccgtgactatgggaggggagatctagcacaggtccggttcaagaagaaccgctatctggccgagaacttttatgtccgtggcgatggtactcgagtctactttttcgacaaggacgagttggagcagacgtggagtggatggactccggagaagggtctcccggagttgaacgtgccttctgatgccgaaggcgaggctcagacttccgtgccagctgctgcgagagagggcatgtttgacatcaagaatttggcatatgaccgccggttggtcgtcaatcgccagcggaaactcaaaatgtaccgctgctggatccagggccactttataaagcgccaatagctgcggttactccctcagacactacgttgtaacaacttacgcagatgtcggttcgctcatcgggccctacgtctgtcacttttagggctcatcacggtccgcctacatcgccgccaggagatgctcgactcaggacggatgaggcccgtcgttacaggaatatactcacttggtagcaggccccgaacatcacctgtgcaagtgcggggtccattgctaccggtgtccaacaccgaacttctgcctctgccacaagtgcaggatgtccccatcctggctgcgcacaagtgccgatcatttgatatcatgccgtgccttatcgctctcgcaacctttggaatgaaccatcctccatccctataaatgagaacaatgacttatatgattgttgctcatttggtagacttagcgtttatatatagagcattcctgttagctacgtctgtctagatagttagtgattttcatcaacggccaagttagatgctcagagagttgaatactcttcgatatcgattcacgcaaaggctcaagaatccacatcttcccaaacccatgccgtcctcaaatctcctctcccctacactattgtctaataattaatttctcgcatcgtcccaaccaccagtcccataagcgccctctgctcgttcttgtccgtaaaccgatccgtgcacagattaattgcaatgcaagccgttccgccggctggtttgcactgtcgattcgacagcgctatccgcagatctccagcacgagcttcctgattttttcatcaatagcatcgagctcttgtcgccgcgacggcccgagtcggagagtagtaggggcgaacgctataaagaggatgtcgaggagacaaagcgtctgcgcagcggttatgtgagtgtcatctgcataccagattccagggaatatactccctgtctctatatccgggggaggcgattcgacctaaaccggcgcgaaagacataggacgcttcgccacccattcgtccctcagctggatcagctctccatagtcaccactagcaccgccggcatgactcccgtagcagaattctagcatcatcgctcccagcactataagctgatctttcagacgtggtcttccgcctcactgatcgtaaggtactttctagacacctcgagcggcaggttcgtgggccgctgctgcgaaaaggcaaggttaaactcctgcctgaatccgacccagaatgctgcttgccggactccaggacccggacacgagagggcggagctggcttgtgcgcggaggaaaacgtggagaccttgcagggcagcctcagttggcgggaagtgaaggggtctatgcaaacgtggacctattagtaactcggtctgagtgagttgggggaggggtcgggaacgacaagcgggagaggaggcatactatccagtttctcaaagaatctcaagacaaccacggccgccagaaggtcctcgtccatcacggcctgggcctcagaggcgagaaccctcagctcagctatacatcgactgtggtaatggatcactgtttcctcggtgatattcaggttaggcctccgaatctgggtatctgtgagaccgtaaagacgcaggctacgtgtcttttgggcagtggagagggtgctgaaatgccgcgctgagacggcgaggatagcgtccagcagagttgagtttgagcgggctcgttagggaatgcaggttgcgaagtagttgcgggggtcggtgaggtcgaactggcctgattatgagctacatgggtctcaggagtgggatattggttagatggcgcagcctctcggagattgagacggggccaaggtagatggttacagcttggggtgacagagatgtttgcgttcacatgcgcttctgctggagaattagatgcgctactggagtgaaaataggaggaaatgggtcctctagggagatgccaggcgggctgttcaattctgcaggcccggcacctgaaccggcagtgcagagtttcgaccttctatcaacaggttgcactgcataccccgtcaggagccacgaaaggatcatgaggaaagcaaagaacaagccgggaatgacagacctgcaggcacagtgtgacggaatctccacctcgtctcgacccgtcgacacacccgacgggacttcttgcagcgcgtgcaggttggatatccaacacctggacagttagcatacaaaaaacccctatatctggtagaataaataggatatacatttcacatgctgtcctactatgatgcgttggtaatgacgaagacaaccacggataataacgcatactgcgacaatcctcacttccatttatacgaaccacttggcaagccgtccacgaacggtaactgccgagtactactcaccacggcctctgcctcggcgacattatatcatatcctgcttgttcacccgacaaaagccaggagtcaaagttttgaagagagacgagtggctagaaggtggcaggggcgggcaaggattccgaataatcggcgatacacctccaacggcccacccaaacatttagcaagatatggcgattctgaatctagatcaggtctgaatgcttctaagaaagtacgtaactggtcagcaggagagccatgactgaggccagcttggatagacattggagaaagccctaatgcggggtagatgatgcttcaaatgactaaagccgccgagaattgcttgttaggaactagcttgaccggcgacgctagcctgattggactctatatcgccgaatcgagtaatccatctaagatcaagccctaagtgacgaatacttgtaaggacaaagctatatcaaccactgggtgcctcaaccaggagtttgaacccatcaattcatttatggcagcttgaagaggcaaacacaatgctcgagcccattcttgctcttctcctcgtctactccttctactcctacctcgttgcaccgattataacctacatttgggaccctaagaatcttcgccgctaccctaatttccaccccctcccaggcatatccgacatcccatttctcctcgctgctcaaaaagtcttcgctctcgcaccttgcacgccctgcaccagcaccacccaattgtatgtgttggccccaacgccctctcctacggcgcaccgaccgcaatcaaagatatctacggccacgggacaacatgtgttaaggatagattctattcagaaaagtcgggctcccatgcccatctcgcaaacgtagttggtaagcaggaccatgcgcggaagaggaaggtgctggcgtctgcatacgcaatcaagaaccccgagggctgagagtacaaattgtctggtatgacggctcgactgatgagagtgtttgaaggcaaatgcacggaacctctcccttccagtgtttaggccacagaagagagagacttaacgattgactttcggtccttgacgaaccattttacagttgtggccattgccaatatcgggctgactgaggacctgggcttccacgagcagggctccgatacgaattctttggaatcaatggatgggcgagtgaaggatgtgtcgtttaaagaatgtcgcgaggcctcaggaacagtcgcataccgacttatctgggcgtatgactggttccccgtcctgaagagattgagcaaggtgctctcgccctactatcgcaaactcgggaagcttgacgctgactggaacgggatcgtgtataatcgagcaacacggcggctgaatgtctggcgaaaagctcgacgacttcttcacggccatgatggaagataagaaaggcgcagcgcacaatctggaaacgggagagatcgtggccgagatcagtatcatgatgaatgcaggatcagacaccacagcgattgctctgaggaatgtcttgtttcttctgctcaagaacccccggtgcatggcgagactcctcgaggagattaacgtggttcttgataaagataaactggtggcaccgcacacaaaggttaaacaccttccgtaccttagagcatgtctgaacgagagtctccggatgctgccgcctgtggtctttgggctcccgagacggacgccaccccaggggacgacacatcctcggcgaacatgtggcggggggatacgtcggtgagtatgtctgcgtacgtggtccacgacgagtcatttttcagagacaacagcacttacctgccagagcgatggcttggcgaggagcaagtcgttgcagtcgtactttatccccttcagtgcaagagcaagagggtgcattggacgtaacattagctatctctagcagactgttgttttggcctcgttggtgcacaggtatgactttgcgctgccggcgccactccttgggcgacgaacctcagtccaggaccaatgccgctgaaatttggaagagggttcatgcatgatgagtgaagtcgaactggtttggcgaaattttgcggtaaataatatacttaatgactatttttaaacgaaactgtattcaattcccagagcagtaaaaagacgcggcagagggtcacgtaaaagctaattctcatattatgacgtgttctatcctctatggttctcagggttgttagacttgtatattctatataagcattagttcaaccaaaatggatctgtcaccgcatataatatgtaccgtctggagacttcgaaagtcgcatatcgacgaagacgcaaatagatatagtctctatgtactggcaagtaaccactgtataaggtgcggcgagattgtccgagtcgtagcccggtgaatcgatgtccataaagtttaaagattggcttttcttcattatcagataattcttttttttctcttttctttctttctttctttctttttttcccgttcaaatctaggacgatataatcattgcaaaatagttaaaaagtagttagtgacttactctcacccaagatacgggtgtgaattaaaaagcgtcacggctgagctctcatgttcatatatatacaggccgttatcgtaccccgtacgaactgttcagcctgctcgagagtcaatgtctggtactgtcatatatgcgccgaatgcgattgagccctatggaactgccattgtacgaaaggagataaaaatagacaagtagtagtgtatacagatcgtcccagacaatggtctcctgggtttcttcgggctgaattctgcagagatcctaagagctgggctatccggtactccgtacgggtatcgtagctggtaatactcacctctggtccggagattagccgtgcatatccttatgagccaagaagaatgatgccgtaacgttagctaactataacgtggttacaggtcagtgtgagactgactaatctaatctgataagatcgccaactgaaacttttctctgtggtaacctccaattctgctcaatccactcctcagccgctcatgcatatcgcaacgataattatagttgtgggaaagacgtccacttgatttagttatataagtgagaacgtggatctgaaacagctagcctgtcggttaagaatggtttaccaagacaagtaccccgagctgcagtacaatatctctccgtcgggtacctttcttcttcgcattgtcatggctatgctgtataccaaactgtcaatcggattgtttcttgacaggaccaagacagcttggtgcgggtcaacttgggaggatctcaataatgagtagatgtggttgtgcctgtactcatcccgactggagtgcaggagcaagggccggggccgggtatgggcagctaagagtatgttgtttgactgttgggcattactctagacctattcccagtttagcggtcaattaatagtctatcttggacatcttttcagtctccaccagcctctcagacgctattgtccagcaatctacatgagaccaaaggatcaccttagtggcggtaagctgctaattcaacgtctattgggagaaaattgaaggctacgaggcagagatcatttcggaatatgtcttctatctcgagcgaggttcttgaacaagccctacgcatcccttcatctttgtctacttccatagactatgtacctgctagggatagttcgtcaatcttagtgtgattgatatcaatatagcaaccgtcacccgcaggtctctgtgaggatctgagattccggctcaacttgattagggtggatcttgatctatttccgtaggatacacctagctagagacaaagcggtcaccaggttaggcctctcacggaagagcttagcattcaggaatccccccacagtggggatgtacagtgatcctcgtgatcgagttaggtgattgctcctcttcaatatcaaggtgctgacactggcccatttgtggattgggtcgcgattcggtcagtactagtacttatatagtctgcgcggatagcgtgggtacattgcacggacaaccaccgagcttaagagtcatagacgcccaatactaggtccggatagagtcattccttattctagatctgccaaggcttctgtccactcagaaagggcagtggactcggaaactagtttacagaccggttcgcagggcattttgtcctaaccacagggaggagatgagccggtttcctgacaatcagatgactttttgcgaatacgagaagtcgtgactgttcatcgtatggctgttcctgcatgttgttcatctgcagttagctcgagaagcgtcgagatactggacgtagccgatagcgggtctaaatatgaactcttagaagttgcagtataaaagcagatgaaaatatcctagctagacaattaatattccaccactttctctgtactctgagattctttttcatcagaaaattcagttcccggagtatcgtgatgcctctttgttctgttctggggattatcaacaaccaactgacatgtccacgaagaccaagttggcagatatgcttggctttcgatcttccttgggcgctgctacgctgtttctgctagtccgaaactctggcccatcgctggtataactggcaggtcgacatcacctgcgaagccgatggcatctttgtcccggaggacgagccagacctcgtccgcttcgtcaaggcccagcacgccaaaaagaccatgcttaggccaggtggcaacggccacgggttcggcaacctcacgacctgcgtcaatgtcggggagaccgagcgagactcgtacatcctcagcctgacaaacctcaagcacatgcaagtgaacagaaacaacagcacccggccctgcacgaacacggcctgcaggtgcagaacgtcggcagcgaaaaggtgcagaactacattggtgctgccactacaggcacgcacggcacgggcaagcagaaccagaacctggctacccagataatgggcctccgtgtccttggtgcccgcggcaatgtccatctcgtcaataagcaacaaaaccccgacctcccaaaagccttttgcgtctcgatcggcgccctgggcattatcactgaagtcaccctgaatgccgagtccctctcatacatgaaacgcacctcaaaagtcatccaggcctccgagaatatcaccgagttgtacgcccagattgccgaaatcggcgccaaataccagcaggtcaatattattgggcccaatctcgactggaatgccgacagacaggacctcgtgctcaagcccgaactcaccctcgtctactgggaagacaccagctacggcgccgtccagaactgctccgatttctgcgccaatgactgcggcctctgtgaccgcgactaccactgctacgactataagatgaacgcgatcgcaacgcctcccgggagtctgctaccgcggcttcatggggcagttcgagcacattgtgcccatcgaacacctcgccgacacgggaatcgattatctcacccacgcaaagtcccaggctgaacgtatgcgtctgtaccaggatgtcgacgtcgacggcgagtcccgcaccggataccgcagcgacgatgtcacggtgatcacccgtgatcacccgccttatcaagggcgacaatacctggttctctccgctaaacacgtacgggctgcctcccaacgcaagcggcgtcttcgcggccctcaagtactcctggattccctcgtacaacaacttcaccatgcagtggtttcaccaggaactggcgagcgagtttatcccgctgtttggggagaagtatgatgtccgtccgcactggaaaaaatgatctttcataacgagacgtatatccagacgatctttccgataatggataactggcttaagctccaggagaagatggatcccaattgccagtttgtcaatgaaatattctttcagctcgttggggataaagcggtgcgagacggtgtttaactgattctctcatgactctgattggtgataagttgctgttgcggtctctacttgttgcatagatttagacttagacccccaggctagcagctgagtgcgagagcactgaacataaatggtttttattgtcataaatttcttgctctcagtgcatccggccggtcacagtgcttgggacgagctctaatataagaaataccaccgatagcgagcctgaaaacataaatatcaataccatgatgctcgactgcagcggcagcatcaccgaggtacgctgctaataacgcagttggaccttttgtcagtatatcacacccagcacgtctaaaaatttgcctctgagtataaggacagcagccacttttgtagttcctatataatatcggcggggtaggggatgagattgatggaggatgcggcctgctgatggtgaatgaaaacggaagtataatactctctacattatatcttggggagacctcattctcaatctgattcgtcatagctcagacatttaccattattgatagattgcgcccttcggaaaggttgctgagcactagtataatatacacactccctctcctagcgcagtactactgcgctcaagacatgacagggtccttgaatggatacccactcactccctcaaagcagcataagcctgcaagagccccataatggcgacaacagctccattcttgctgacgccacccttgaagtaccccactgagctccccagcatggaagcggccatgatgacagcagc

SEQ ID NO: 4796 - DNA, 1902 bp, Emericella nidulans
cgtacgtagtgctgctgctctggttgccagagcccaatgtccttgaatgccaggccgacaatgtcgccattgtgatcgatgatgcaggcgcgagcgctgccggtgccgacgtcgatgccgatgtagtagcctgatttaatctgcatcttgctaggatgaatggatggacgatgattcagcagtaggcgaggtttacccttacccatatatgcgttgtcccattgttcatatcggttcttctatcggcttcgaaggttgctctgggctgactccaccgacatgcggtctagatcagaggctgcaagatacaaggcccaccagcgacggcgaggacggcgttttccccgcaacaacaattttggactattcaatgccgtggaagtcgatgagatatgttggttagtcagatgcgacaccacgaaaatgctcaatgatgagactagccgtatatcaccgcccccaaatataagaggtacggtggttggcagctacatctcaggctgctgctgccgtcaagaaaatataatgcgtaaatcaagaccacagtatatagaatattgagcgactgagcttttagtacggtgacttgcttgctagggtatacaaggactgccgtgctctcgtgacggtggagcagacgggcaaaacggcgaatactccgttggcccaggcgaggcttgataaggcttgataatcctcagtatacctataagcccttccccagagctaatctggacaagcagcatgaaatatggcagttatggcgctttcagacttaatttgagactcaatcggagtgagtgttctccccgggtgggatcgtctttaaaacgcaagaggaaccgtccttcgtcctcaaaggcatccagaatctacaaatttgaggaccggccaattcccaatactgtggtccgcaagatgtgctagtgatatgcactgatgagggtgaaggatattggaacttgtgggatcgaggtaagcgaagagcatccccaatctcttcagagatgaaactggacctgaccagatgcaatattctagatacagtacttggaaaggaaaggcttatctgccccttcgttgtcaccgcacccttgattttccgccacgagtcagctgcatccaaacagtatagtccttttgtgacaacccgccgtcgcccgacggcgtccccccctggagcatggaacatctgccgtcgatgcagccactgcaagtctgggaatacggttgtccatccgtaatctctacagcgtgccaaggaatacgtcttcacgggggacttcggttgggccgcccaatcttgatacgctaaaacaggcctctttggaaccgtcgcggtggcgacgctgcttgcccggcaggcggaggtctctccaggaacgtctcgtgtctttggagcagggctagtcggctactggttagtagcctgggcatttgcgacgctcagattatgggcgttgtatccagcaagactgaacttcgcggccgagcttgccgccgacagggaccttcttaccagcacctgaagcctggtcaagatagctctcagctctggtattcagataatctaggttctgacgtggacgccgtgatcggtgccttgggcgccgaagcatccatcagcctggggctgcgtatcttgcggccggggcacatatgttcaggatggaatgaagacggatagagtgcgcactcatcacaactgtctaccccatgcagactgtcataggaaatttacggcataatgggtggactaagccggtgaatgaggtagtagcgagcggcatggttagggttgagcagccagacggacaggtatgtattgagaatgcaaaggaggcgcttgccagagtgaaggagagtaatgagctcgacgctcgaatacataggggatggata

SEQ ID NO: 4797 - DNA, 4059 bp, Emericella nidulans
tatgtttgcaattgaatctggttggcgacggtgtttgcactttggcgggcctggtgtagatgatcgctccaatcacatacacgcgcagcaagccacatttgaatttctaagcaatggcaccattcacggacctagtctccatcctctcgcccattacaaagcacggtgcaaacatgcccagaaggtagaaaccctggctctcgcagtcaagccctctttcgactacagtccattatccgcggggcgaaatcagtcctctgacctaacacggattgcccgccactagacatgcacacacatgtgtctgtcctttgatatcagcctagacgtcgcagcagatcgccaatcagcatctagctgtcctagtggcctctatttcaggctccttctagttcttggcaggtctcatgcctctgtcatagctctgcaagccagcagatacgaagcccagtctcaaccgggaggatgcctctccttcggcacgttcgagcagaccccatccagacgcgctctttttaagcagaaggtatttagattgtgggctgcgttccctggagagagtggtccttgggcgctgtgattttcaaatgtgacctatgccagctctagtttaaactaaacctgtcgcagttcccctctattcttgcactttgcctatttacattgaattggagcattgcgtgataattgaatacaaccgtttgaaggactaaactacggcctcattggcaacgaggcgtgctgcgtggcgccggaggcctacgaaagaacgggctaattcgcatgtaaacttgccagtcagcgtaatgcacagcagtagaatggctaccacaatctggaacgccagtagatgaggattaacagctagacgagggctggaaatggggtgcgcgtagacatacatcgcttgctacatttcggacgattgttgttagactagaaagttatttaggccaccacgtaatggaacgggctctctgtccatcgagactttaaatactgaagtaggactacgagacacagacatggatttgatttctaacatggcagtggcgcagaaggtggattaccaaagccaccagctcgtgtaagtgcgctgcaaagcctgcaagaggaagactagatacagctttagggctgctagacaaactataataacctactaatgagcctcgtaaacctaatcggaactgccagtggacacaggaagccgaaacagcccctgggtccaggttactgtagccttagggcaagcttaggcccggtacggaagggagccctaagagtactaaggacctaaaaggccatgtttttaaatgcttcataggtgcataaagattgaccaacaacttgtccttggtatctcattcgtgtcccagattagaacttgtacggggttatcgccgtgaccgcggtacctagatcctatccacattcagggcgccagattccgatctctaccagaagcagtccttgcctgtttatgttcccccagtctagatacatatccaaccacaagcattaccacaccacccttttcccatttcagaccaaccgctaagtgtctagaggtcgtccttggtcacatgcagcggcccattcccatcatcgacagggcagtgacctgcatcatcactgtcaaactccacgacacaggatgcatccgttccaatcgagatcccaatgaaagtagtctccttctgtccaacaccagtgcccagcacattgccgttctcatcgcgtacgtcacagttggtcggcgagccgccaaagtcactcaagcagtggaactgccgaccagaggcccagcagtcgccctcgatttggaatgtgcggccgtcgcccgtgttgaagcacggggacctgtccttggggtacccatcgttgtagatggcctcgccgttctcacgaatgatggcaaagctgttgtagttgccggactggtcgccaatggcggagaaggagccggacgaccagaccaccttaaggcgttcggcggtggtggttgtggccaggagggcgaggctgaggcccagggcgagggtgcggatggagggcattttttctttttcggtgttcggaattgaggaaggttgcggatggaatggtgcagtttcagaagggtggtgaagagggtctttatatccctctcgaagatcttcactcagtacatacatgcatacccccttcccgcagaaagtaacaaatcctggtccctcggctactgccagactcctacctaagggtggagaagactaaagtgcagccgaaccccgatggcttgtaccgtgtcggtcctgtagttagacttcgtacccccgtaccctgtctatggaggttcaccatccgtgctatacatattagacagtccttatttgcagtagatctagagtctacacgccttactccaatgcgtggaagtacactatctcttcggtttaaaagcgagtatacctagccctctggcgtcaagtatctgatgagtgctcttgactccaacttccacagctgctcatcgtcatgagcgcaaggaagagagagagagaggaattagggcccgcaggcaaacatggcaggtagagcgaaggatttcttgaaagtgtgcttcgggaaccacatctcagacacagggacagtccatcccgcctggcttggcccctaaattccgggaagatatgcgaggttgagctgcttttcaagttccaggctggttagggtctggacagcccttgaagtggatctcggggtcttcccttggatccactgcaaagggtcaatctgcacatagcctggctcctctggccgtaacctgcctatcagggctcgctcggcagaagattcgcttttgagatgctcttgtcaccgtatttggccccaaactattggacttggcgaatgtctcttatgaggctgatcttagcctggaattggaattctgcacggccttacaatggagtagtagtacgaactatgcagaagttctcgttctgtctagatactgtcaatgcgggacaagccaggtacgcctgccctgtacaatttgagacctagcccagctctaagaatgatgtctgctccaatactttagaaacggtatgcgcagtatgaagtcgttttgttggttcctccagctactcttaaacaggaaggtggcataaaaaggatttttggcgttagctcggcccccaactccatctggtagatcaagtgcaccccacacgggttgtcgtccctgtctgaactctgcactagataccagacggcccaagactgccagcattgtcgatctcgccttcttcgtttcggcccccaacgtcggccgtactgacttagtaaacggctgcttctaaggcaggcgggctaatgcaagcctgagaagaagatgtggtcaggttccaaggtcatggttgcccaggtggctggcgtcaggcggggtcagtcgtgccatgcttctgtccttgacttggtattcacatgcaggattctcctccgcgaaatcctacaatttacggtagaatagggtaattgcatcgggtgtgtttggttctgggggcagcaggagtgaaatatgaggagtacggatttaaggatgttatagagatggactccttcagtctacaagcctcgcaggcttacgagagtgaccgtttcagtactccctagatatcgttttaggagcgctatactaaactacagaaccattcgcacggccacaacccagactctagctgcgccacccaacggtcgtccatagtacgaacgtggctcgtgtcttgtaagatcccagtcgtgaccagaggtcgacgtgggaaaaacgggcattatcgcaagcactacatagaggatattctctcctgtgcgtcatgaagagaccgagcctgatccgattcccttccaaggggcaggtaagtacctacttaccccctgagatgtcactgctgctgctgaggatcaaagacatgttggatggtacggaggcggagagggagggtggacgacgggccgtcatagtgatttgtcttctttctaggctctcgggcagtgtccctatactaagtg

SEQ ID NO: 4798 - DNA, 4103 bp, Emericella nidulans
agagatgtaaggaaaagtgaggataaaaagattgagaaatgagaaggaaaagacaggatgaaataagagagaagagaggggagaaaatgaagaagaaagacagaaagagaaggaagaagggaagaaagggaggagagagataaaagatagaagaagatgagaaagaaaagaaaaagaaggggagggataggtgttgggagaaggagtgaaaggagggaggaatagagagaaaagagagagaaaaaaaagaaaagaaaaaatgaaggaaaaaaagatgagtggagatggaaatattaggaagaggacgaagaaagagaattatagaaagatgagagaagagtgtaatataggtaagaaagtgagaaggcaggggagaagaaagaagggaaagagaagtgaagagaaagagagagaaaatgttatacggtggcgaaaaaaggaaaaggatagagggggaaattaaggaaggatggagaccaggaaggggaaagagaaaaatgaaggagagaaaaagcagagaagagggaaaaagcacaagcaatcttaaggtccgaaatagcgtgaacagcgtaagggacgtaattgataaaaacccatcagcatgccagtccaaccgattttcttgattccaagcacaattcatgaacgcagcacgagtcacggtgtaggtaacggtggctgttggaaatttcgggatatagacagcaaggcgtcggattgccaaaatgcagaaattcctttccatttattccctttcgacgagcgtgcttcgacgaacatgtacactccccgaaattctgagtcaataatcgatagaactcaccattttgatgtggttgccgggtggtcctcgatgtcgggagagaagattgtcgtttgcgtcgtcggccgtcaaactttggagatcgcgagagtcgctcgttgtggtgcggctttcgctcttggcatgggtgccctaagcgagccctaactagctctttctggtcaccgcccaccgtccgccgtggcagtatttcttcccgcagacacggctcgctacaactctacttgaaaagaatgtttaattgacaaaatagttcaatttatgtctattactatggtataacttctaacatcttatttcttctgctctgggacttgcgtaatgagttctcccttttccaccgccgaccgcaagttatccaacaccagaatctccatctccttctgcgtctcataggtcattgtaccgatatgcggcagaagcatcactctggggttgttgagcaggccgagctctacaatcggctcattctcgtacacgtctaggccggcagacatcacctactaacttagcgccatccatcagaaggtgacagtgatcttaccttcttcgactccaacgcggcaaccaacgccttctcgtcaattagcgcaccgcgagcggtgttaacaatcacgaccccgtccttcatcttctggaactccttttcaccaatgatatgacgggtagacgggttgagagccaggttcagactcagcacgtcagacgtagccagcagatcgtcaaacgagacgtatttagcaccctgctccaactcagggctcagtcgcgaccgattgtggtattggattgtcatcccaaaggctcgcgcgcggttggccatttcctacacagagcgtatgttagcaataataggcatagcgggcgcgcggacatacgcgaccaattcctcccatgccgaggattccaagcacctttcccttgggatcgtggcccagcgtggtttgtccgtgccatttgcctgtctcgtcagtccagtacaacccttagcttttgggagtggccgtaccctcgcgaatcgcagtcaatggcacgtaggcctgtctaagggcgccgatcataagaaagatgccgacgtctgcggtggcattgttcacagcaaccggcgtgctagagacggagattcctattacgaccattagctttaaacccgctatgggtaccgtcatgacgcacccttctctgagcaagcaggaatgtcgatattgtcgtagccagctccattgtggcagatatatttcagcgacttgggcaacagcgagatcaattctgcgtcgaacgggccagtgaactgaaacctgtcagcgccctccatcccacgaccactggaattggaatacctttgtagaagtattggatcggtagatggcgaccaggtcatcgtactttccatctttaagattgcggatgaagtcttctctatttcctgaggggaattcctacattgcaactcgtataagacactgcgctgaatatacgaatgtcttgatcgcttaccttcagagtcagaatggacgagaggtcctcccattctttcctggcgtgggtgatgtcgccaatgagtagagcggaaggcatgatgtcagcggggtagaagcagggtagaagcacagaagtaggtatgtgttctttcgaaacgcgcagagagcagagaagcaaaagaaaaatggggctggaaataagattgagaagagatggaggaatgtctaatggattaatatgagggaacggttatggactggcgaggagctcctccgcgtccgtgggttcatttactagagctagaactggggtctatcgacatacagtgtatacaatcggacttcggggcacatgcgatggcgtttttaccgcaccagtcattactgcctaatatgattagccccagatggcctattactaggattcgctaccgtctgcgttaatgcatggcagtgggtggccttcaccagcaattgtatgacctgcaattgaaggtcggctattgacctggcttttcaatacccgacgcggaggaaatccggtgctgcccacccccacgctgcgggtaaatgtccggcagccaccatgaacaaataaatacccaacatcttcaagaaatctgttgtaaagaccactgtagtactatagcgcatttcaggaaagacattcatcatggccacctgtcaagccctcgtcctccacggcgcaaaagacctccgcttggtatgtacccctcccccgcccactctataaaagccccaaatctggactaacactttcatcaggaacccagaccggtctcgtctcccagtgacggagaagttcagatcgccattcgctcaacaggtatttgcggctcagacctgcactactacagccacggccgcaatggtgacttcgttgttcgcgagcccatgtgtcttggccacgaatcttccggcatcgtcacagccatcggccccaatgtacacaacctgaaagtcggtgatcgcgtcgccctcgaagtcggtcttccctgccgcaaatgcgccctctgtttgtcgaacccaagccgctacaacctctgtccggagatgaagttccgcagctcagcgaagatattcccccatctggacggcacgctcatgcaactcaccacccaccctgagaacatgtgccataagcttcctgatactgtttcgtacgctggtggtgcgctcgtagagccgttggccgtctgtttacacgctatccgccgctcgaacccccctgctcaatccttcctcccaccaaactacaaaagcacaacccttatatttggtgcaagcgcaattgggttgggtttttgccggaccctttgaagccaagagacattcgcgcacattgctttgcaacattgatgacttacccctgaaatcgattaacagttttttccaacctttccctttaaattctaaaactgaacggtttccctgcgagcccgaaacaaaaaaacgcttttctttaaaacccaaccagggtttttataaacgcattttttcttgcccccggtgggttactccttataagacggggccccttggtaaccgataccccctccggtaacctcaaagtgtggacccccaattcgtgggccgtttgaaataattggtcgccggacctccccttttttgggggaaggtttaattttccacctttgggtggacaccttttttagggttgggggcgcttgtttaaagccaaagaaaactttttttttaccttttgcccggcggtgcaaataaaaataaaaaaaaactcccccggggttaaaaaaccc

SEQ ID NO: 4799 - DNA, 5910 bp, Emericella nidulans
  unsure (1)..(5910): unsure at all n locations
acgtttgttggaagtagcgccccagaattacactcacggagtattctttggagagttgcgccgtttcataatgaccggctcaatcggccaggcaccggccatcgataaacgcgactttgacattaaccgtcggtcatccactccccacgaaaccgcggctcaagaggacgaggccttgctccactcccgtcctcgctcgaggctttctgtaggcaatcggtttagtgacaatgacgatggtcttctaagtgatgttgtcgaggaaatcgtggaaagggaccgccagaggatgagacgggaagttgttcgtgttgggagcttcgtttggggagtgattacatggtgagacactctcacctcaccaggaccaaatatcggtgcttactgtttctgttctgttcagtctcggtgcaggaagtataacagcgttctcgctctatgggcccttgctgttgactcgtttgaactatacccagctgcgggtaaatgaggtgtcgattgcggcgggtatctctatgtacctccctgtatcactggcaggatacctttgtgatcgctattcgccatcgcccctgacattgttcgcgggaatagcctttggcgtcggttattccctcgctgctttcgtgtacaaaagcggacctcctccagatgctggcggaaacggatggccgttctgggtgatggtggtggcttttattgccataggagtagctacgtgcagcatgtacttggctgcagtaacgacttgcgccaaaaattttggctgaggaaaacataaggggatgatactagctgttcccattgctgcttttggcctaagtgggatgtggcagcgccaggttgggacctactttctatgcgagcgtttgaaggacagcaactgcggcgacgtcgatgtctacaaatactttctctttcttgcgatattacttatgacgattggtgtcatcggcacttttgccctgcgtatcgtggacgatgaagaggagaaatacattgatgaagcggttgaggagcttgaacgaacggcctgttagcggaaagtgagttcattagacctcgcagcgaagtgcaggcggcatatgggacattctccggcgaccatgaagataacggatctgtggacgaccagtccgttactatctcggaggaattgcgggaagctgccagacgcgaaaaagagcgtgaagaggaggagcgcaggaaaaagaattggttactgaattatgagacgcggatatttctcgcggaccacacgatgtggtggctggcattgggcttcttactggttactggtccgggagaggcatatctaaataatgtagttactccccaggttttaacatgatatccgtgctaacacagtgcagctggggacgattgtgcaaaccctcaacttagacaccacagctatcgttgactcgcaccccgccggcctcccatccacgcatgtcacaataatagcactcacctcaactatagcccgtcttctaaccggctccctctccgatctcttcgctccgacagcgaggcgccactttacagttgatcaagaaaccgcaggcccagaccccttcaccaaacagaggccggccctttcccgacttgcctttttaataccctctgctcttcttctctctctaggcttcctccttctcgcgtctccactccccactcaccaccccgagctctcccatttgaccaccgctcttgtcggcctcgggtacggtagcatcttctccctcgtcccaataataatctccgtcgtctggggcgttgagaacttcggcacaaactggggcatagtagccatgttccctgccgccggcgcagctatgtggggcgttatctattcacgcgcttatcaaagcgctgctgatggctcaccgactgatgacggacagtgccatggctggaagtgcttcgggttctggtctattgggtgcacgttcagtgtttgggtggccattgtggcttggctggttgcttggacttcatggaggcgaaggggcgttgttgtttaaccgtttggggcttatttgcctatgaactattttggcgcatctagattgttttacgttcttctttgatgacggcttatatactatttctatagattggattatgatctttaaagactgcatgtgaatggccttatttggaaatcgaatggattgacatctacatctccaattcctataggctgcgttaccaaggagtccaagttcatgaccgcgcgcatccctctttgaagtcacactgtccatggacgcccatggtgggatgggctgtctccgcagtggtgtcgtctaactagcgatcattaagcacatcgaggatcacagcgtttgccgagagacatattgatactgctcaattctaacccgagctctaaagctcttcttgctcaatggggcaattgtttaatatagccgcacacgcgatatggtaatagttgttgttgcttgcctaccagcctcaaagatcctacaatgagcggcaacaccagtttgatatagatttgttcactggttattagtaggcaataaatatgctatgcagatatcgctaacagaaagcaatggactgcctgtatcagagtatcgcgcggtgggtacgacagtgtcaatactataaaccttacgaataggaaacgtacgcaacgccaatgctaagctataggagtcatgtctaacacgttatatagtcaagactgagactaaatgtccgtcgactgcggatccatacccataaacactttgtataggcggcgacttgctgcaggaccgatgcgggcatccgttagggcgccgtctttgttcgccgatttctgattgccgctgtatcagctcactgtatttcaggtttatgagaaaccaaaaacgggttgggggtaccttgacgtcctccaacatccccggcccagacctccgcatccctttgaccaagtcgaccacggtcgggtattgattcaccacaccataggccatcgacgccgttacccgactgatctcctggagcatacggatgtaagtatctgatgcgttctcaccgggtttgacctgtccactatccatgcagaaagcggaatcgttgtcattcatgcgctcgcggcggtagggaacggtggagatatgctctgtaaagatcttgatccactcggcagattcaggcggtgccgtggtttggtgtatgaggcagttgtggttgacttggagattgaggagggcgtcttcgatcgtgtcgtcgtcaatgggagttgtctcaggcttgttggttctcttgcggcgagtcgtggatgttgatgtagttggctgcgataagccctggacttcgtcgaggttgcggcggaactcagcttggtagactctattgcgtgagttcgcgtttttgcgcatccatgcagagaggccttcgatgaggtagattactgtgcagtgtgggtaagcacgcttcaggcggaggatgtgcaactctagctcgctcgaggcgttgagattatcagaatcgagagacgaggtgaccatgtcaacgaactcctgcgccgtcacgagacagagaacatgctcttcttcgcggagatgcagctcgcacggttcccagtatccaagagaactgttgtatatagccttcatctttcgccgccacttaacgacattgcggattgagctgtcgaaaaaggtctgttctacccccagcatccgcatgtactctactgcctggttgccgacactggtgtctttgaatgacgaggcgaggtcgaggatcatttctggcgtggaattcttcttctcaaccttgagcctatttgcttgcgctatgtcggccgccagctgcttgtcttttgccttttcttccttctgcttttgcttccgctccttctctagctgcttttcaagatcacgttgcgccttagctgcctctcggcccttcacttttgcctccttatccgcgctactttgcttgtttgctatagccttctttggcctacgactcgggcggctctcaggcagctcatcagggtcttcatcgatgatttcggagcggctttgtttctttttgcctggcagagtactggtaatatcagcgttgggacggttcaaactcgctagtaagcttgctgtcttgtttgaaaactcagatcgcagcgaaggcgccctgaactccgtctcctggaaatcaaacagctcgctcggatctgacgagaccagcggatcactgaagttttctatgatatcctttcgtaacgtccgtagttccctgcccttatgagaagtgataccgttatcaacatcaacgtcgatcagtgccctcgtagcttgttgtttgtttcttggagacggacttcggcgactcggctcaggagcagacgatgtaaacacaatcggatcggagtctagcgtgataactggcggttttgagtgtgtttgcccgttcgacggtccgtcagaaagcaaaatgtcgtcggagaagagaaatagagggtcctggctctgtgacggcagcgcatttcttctactccctggtggtttggtggaattctcgatatccggtgtcaaccgtctcctcttgattggcttgccaaggtcaacgtcattgtcgaagtcgactcgcgcaaagtctatatcatccgaaaatggaaaggaggataactcggtgggtgcgggcggggtgcaatggagtccccggatggaggaggcttcacggggctccgccggaggtggaggggttgaggatataagactgataacttctggcattttgtaggcatctgtagggtgaagtgtgagcctctatccctactagagcgttctctacactgagtccgctcaaagatgaggttgcatagaggtcccaactgggacacttcacgagtcgcgttccgcgtcacttcacgtgatcacgtgattgaccattactacaaatataccgccatctttagtgtttggtgtttccagagagacagatttagctgtcatagatgagcgctgctctgatcgagtcatttgaatgccattgaactattggcttgatggaggcagggattctcttgggaatagttcgcaacctgtgcttacagtcgatcaattgatgcttcgactatttcgtcccaaggctctcagagaagcctgtggagtacccgctatttaacaagctatgattaatcaataattacctcctgaagagagtccgaatggggaaattattggcattaaatgaaccggaatgggtgtgtaaactctaagaagccggtttccgtacacgccgcaccctcaacaaatatatcctacatgtaccgtgaaaggatattcataggtcccaacacgctctgggatgggtttgaacataaacaaacttgggaacacccaatctgcgtcccggccctctgtagtcgaggactccgatggcatgacccaccgtggagagcacgagactgcaaagacgcaacgttctcctgcaaaaagagtcaagaggggaaagtatgcgtccaaggcgtggtaagcgatgatgccttgtttatgatcggctgctgtcttactgacattttacagcgcaccctgtcacgcccggaagataaagttgccctcgagccatactataatgatgatgaatacactaacccatgtagtgtgatggccatttaccatgcagaacatgtgtcaataagcagcatgtctgccaccgacgtgatatcggatcaagctcgcaagctctggaactgtccagaactgtgttctcaggcactaaggagcgtgggtatgggacagtgccgaagccaaatgagtggtatattaatgttcgaaataggagtagaggacaagctcctgcnagggtcaatcaattagagagccagcttcaacgacttctcgcaataacaatcaatcgggcagtctcaagcctcctcag

SEQ ID NO: 4800 - DNA, 4989 bp, Emericella nidulans
ccactgtattttctggaagacttcttgaagaatgtgccaattgtggccttgtccactcttagaaagtcagtatcgtggtgaaagttctctaaggccgacgtgactttatcccattaaaccggggaaagcagttgaaagccgcggggattatgtgtacctgctcgtttaggaagtcggtgaatcgctctcggaggcttctccgaaactccgccctgctttcgaagtatacaacaactggcgactcagtgagcgagtctctcgtccctaccttacacctagatatgcttgaggaatagactaaaggtagtaagaagtaggactgccggaattacttgcaaatccgcttattgcagtcgaaatttatcacatgctcccaagaatcgtcccttgctgccttaaaatgatggtgctcctcggtttaagccaagcccactaaggagatcccgtaaagatcatgtgattaaatccggcgcgtgctcgtcgcgtgtcgcgtcgtccaatgccgataacaatttcgatataggttcaagaccaacttgtggtttgcgggaatagtttctttccacacgcgcgagattcaggatgatccgccaggagttcaataggattgaccctaagcggagggccaacctcaactacaaaaagacgcaattcgcgacgccgactttcaagcagcaggactatccctatcggctgaacttctacgatacaccacccactgcagagattacgcttgagcagtttgaacaatgggctattgacagactgaaaagtgcgaacctagatctttatttttgtatgacttgctgttgactgtgatagtcctcgccgaaatcgaggcatgctcctatcgaaacaagaccgctgccgagacaacggcgcacatcacgcctcttctccagaagttcctacccctctcagcgaacacatcgtctccaaaaggtgccgcagatccccgaatcaagaatgaacggcaaaaagaccattattcgcactttattctccgtctggctttttcagccaccgaagatcttcgtcgccggttcgcacgagcagagactatgctcttcaggttccgctttcaggcagatgactctcgagaacgacgcgcatttatcgatagtctgaacctcgactgggaatctgtaggtgaagatgagagacgcgaactatccgagtatctggtcgccgcgacgccaggtctgcgtcgctccgatgaagacacatggtacaaagtggattgggaaagagtaccagaactcgtcgaaagacgctctgtttttctgtccaaagggaaagcatatgttccggaaagagagcagctaagtatgatcatcgctgagttcactgcgcgacttgaacgtgccttagaggtatgtgaattcagtttgcaattgagtacgaacattgagctgataactactagctcacaagtagagctttgccccgcctcgatgaggatgatcgcctctcccccattctgaaccacctatctaagaacttcggaagtgcggagtccgtgtacacagaaggcgaaggcttcgtggatggcgctccaattaccgccgccagcattgatcctctttcacaacatttcccgctctgtatgcgtagcctccacatgtccctgcgcaagaacaaccatctgaaacattttggtcggctccagtacactctgtttctcaagggaattggtctatcccttgaagagtgtattctgttttggcgccaatcgttcaagggcttcaccgatgaggagttcaactcccgttacaagtacaacgttcgccacgcctatggtgatgtcggtggagatatcaaccgaaggggtcgcggctacccaccatattcatgtcaaaaaattcttagcgatacaaaccctggagcaggacagacgcatggttgtccgtatcgccacttttccgttgataacctaatcggacttctccaatctaccggcgtgaacgacaaggacttgttgcgcggagtacgcgaagatgtcgagaagactcgttatcacattgcctgcaaccgagtattcgaatatacacacaaagccgaaatcaagagagccaaggaagacggctcagcgggtgaaatcgaacttgataccattgttcaccctaacacttacttcaagcgcagttatctcctgaagcagcttggaaagacaccgagaactgcatagcggtgaatcaggctaatcgacgaagatctgtttacgtccttttacggtgctctaattcgcatccttccaccacaaggtaaatggcgtttgggatggagtacggttataagaaacattgggacatattatgattgcaatgggtataacgcagtgctatagcaatatcaatttttcattaggttcaatctatcataattcgtcaaaacatagtgtcgttgtgaagggagcttgtgaccacagctgattcccagtttatccaaaaggatcggaacgacctttcaaagccaggtgcccagcaacgggccaaatctttcttcgctcgacagaaaaacaactccgtcactgatatgtctcgaagctgagtgttgagtcggcgttatctgaagaaattttggtaaaaagaaaagaagagtgaaaaaaagctcgcggagagtgggaatttaaagggcactagcgttatctactacggtagccgtagcggacccatgccggtagactgcaacctagccttatacaacaaatcggctcacacaacctgaaactccccgctttgcctagctttcggacaacttcaattgtcggcgtgctttattctaaacagtgctggagtagaatccctgagcttgaaatatacgagttaagggataatcgccctcggtattgaccagtttcctttggccttcctccatatacccacctgttctccgattaccccagcaagatggactacgaaggtttgaaggatcaatggagtgatgtcgaggaccgcgatggaatcaggttgagctggaacacatttccaagctcccggatggtaggttttgtgagacgggtctgtccatgtacttgttctgagctgtcaacaggaagcgtcccgacttgttgtccctatcggtgccatctacacccctttgaaggaaagaccagatgctccccttcttcaatatgagccagtgacctgcaaagcgccatgccgggcagttctgaacccttatgcgtatgaatcttgccgttgaactagatggttattgccgctaacatacctttagcaacgtcgacgtgcgcgctcgaatctggatatgccctttttgtctcatgcggaacccccttcctccacactacaaggatatcacagagagtacgataccccccgagcttcacccgttgagcacgaccatcgaatatcaacttgctcgtcccgcccctgctcctccgatcttcgtatttgttgtcgacacctgccaggaagatgacagcctgaaggtgtaaaggattcactgattttgagtttgtctctgttgccaccgaatgctcttgttggtttgattacatttggcaccatggtaggagcgccgccgctataaattatgtccccggcaggatgctgacctgtcttataggcacaagtgcacgaactcggatacactgaatgcgccaaatcatatgttttccggggtagtaaggactacaacgcaaaacaggtccaggaaatgcttggattggcctcgggaatccgccctaatatgccaaacatgccgcaacagccagtccgccctccgcttggcgtgccgcccgattcctcttgcctgttcaacaagccgagttccaaattacgaatatgcttgagcagcttcagcgcgacccttggcccgtggcaaatgataagcgccccttgagatgcactggcgtggctcttaacgtcgccgtcggattacttgaatcctccttccagaatgccggtgcgcatatcatgctgttcacaagcggccctgctactgagggtccgggccttgttgtgagccccgaactgaaagagcccattcgttctcaccacgacattgaccgtgacaatattaaatactacaaaaaggcattgaaggtaagatccagtctttaactcataatcagcattgttgctaaccagcagcagttctacgatgccctggccaagcgcgctgcgaataatggtcacgtagtcgatcttttcgctggctgcctcgaccaagttggtcttctggaaatgaagaacctcgctaattacactggaggtcatattcttcttactgacagcttcacctcatcacaattcaagcagtcttttatccgcgtgttcgataaagatgcaaacgataaccttcttatgggtttcaatgcatctctcgaagttttgaccacgaaggagcttaaggtcaccggcctcattggccatgctgtttctcttaacaagaagtccagctccgtgggtgagacagaatgcggtatcggcaacacctgtgcctggaagatgtgcggtatcgatccttcttcgagctatggtatttatttcgaaatcgcgaaccagggtggtcctgcagccgtacaaccagggcctcaaagggggatgatgcagttcttaacctactaccagcactcttccggacacttccaccttcgagtcacaaccgttgcacgaaacctgagtggtcctgcaggtgatcccactcttgcacagtctttcgaccaggaggccgccgcggtgctcatggctcgtatcggagtcttcaaggccgaggttgacgatggtccggatgtcctcagatgggtagataggatgctcattcgactttgctcgcgctttgccgactaccgtaaggatgaccctacgtctttccgacttgagaagaacttcacactctatcctcaattcatgttccatctccgccgaagtcagttcttgcaggtcttcaataactctcccgacgagactgctttctatcgccatgtgctcaatcacgaagatgtcggcgactctcttattatga

SEQ ID NO: 4801 - DNA, 3024 bp, Emericella nidulans
tagtatttctctagctatatgacgttgtctatatataatattatataaagattatttattttctaatttactcttagttatctatttaatcttattttttctagattataactatctgcctaggatatttagtaaattctataaagtatttttatataaagtagtcaggattattatagtatagatatttatttttaaataatcttttttatttttttttataaatatttaattagctttttttagaatcctagtctcttttatatagaagactataacttctttttataggactataatttaagtataaatagctttctaatctatttaattaaaaattctagtctggtcagtgcctcctgctagtcttatataagtaatatatataaaaataataatataagattctttttatataagcctagctactttctagaggttataattattttatataattaattatagtagttattatataaatcctcctgcctaatactaactatagtctttagttatttaatattaattattatatctaataagatctttagttattatcctaattaattcctctagtattaagaagttcttattaaatttattcaaaactttttaaaattatatctttcttattttattatatttatttatataagagtcttttttattagtcagggttattaaaaatcttatttagtattataaaattttatctatagtataggagtcttagatttctagtaagctaagaactataataatatatactaattagcttttcttcttaagtagtcatccattttctacctttccattgagggagacgctacatcgacgtctagagacttcaatatcaccacctttataaatataataaatttattccttttttatagagtagcaggtagtattaattataaacttagtataaaaatttatttaaaaagaagaatagtccttagggtcttctctagtaaaggatttaatatttagataataaaaataaaaatagctttatttataaaagatagatattaatataattataataataactagtaaatagtttcttagttataagttctatacagcctatagttttatttataagctattattctttttttagaattattatttctaagtctatatctttctacagagctcctggagctgctataataataatataatattttcttcttctattattataataaaaggtctttttatactattattgagattagcaagcaattcctaatattaagggatatatttagatagatcttcctatctagacatgctgtacatacaagaaggagttgctaaagaagaaataagaaagaaggattgctgttatgaggaagtcttgtaggtggctcaccgccttcaggacagcgcaggccttggccgagtagggatgcactcggtgcgggttgggtacagctgcagggtcaaaaaacaatccgcgcgggttgcaggttctttgttgtataagccgcactgcaccaaaatctgcaagatttagaggaatctatactacttaatctatactttttaatactatacttagtttagctacattatataagctactaaactaactataattagattattcttgcaggttctgtagattatctatactatatataatctatataactaaaatttttcttttagaaggaattacttataactctactagtttaagatattttattaattagatagatacaattaactctgcatatctaaaataatagaatactatatagtactattaaaaaaattaggtagtatagtatagttatataattaataaagaatataggtataatatatatacacctcatatgttataatagtagcttcctgacagcttatactctaagatagttattaatattattattaatacagcaatattatactaatacaaggaataaatatagataagaaataaataaataagcagaacaaataagcagactagatataaaagatcaaggtataaaggtcttcttattaggtcttctacccctaataagagccttcaggccaggggccagcatttatggcccctttaagattactaaatagaggtattattaaatatattaattcttaattatccagtagtatatcttttttacctactataaattaagagattaaaactagctggggctaatatatagtaaatttttttttacttagttacttattagctgtatagaataaatataactagtctatataataaatagaatatctataatcctgctaatagaacctgcatggtggcccgcaaacctgcgcgggtcctactattagaacccgcagcccgcgcggactgtagctttcccaacccgcaccacaccgctgagtgcggtggcggtggccccgtgcggttttgagtgcggggttgacaaccctaactagtattcacaagtatcacaagcttagaaaaagaaacaaaagatagaagcgcaaatatcttcctcctccctttatcaacctttctgacttcccggacctgtatgccgacggatcccttccccgaaattataaggacggatcacttttcctatgaggccgcaattccgaggctgtacactgatattgcaaaaaccttatttagaaccaggttgagggcatggccgacaaccaagatccaggctatagcctgtgacattactaagctacagcctttaatataatcagattctataatattagattttaataagaattctatattcttagctaaaatattcaacttataattatagcctgcttttaaaaatagctataagaagtaataaataactcaggactattaaaattttctaaatatactatactagtaacaagatagtagtgtaaatcgattatttctctagaagtactttaagattttaatatatactttcttttcctactctacattagtagattaaaactgtctaaggtcaagctgatatataagaagtagaaatttttagaaccttgtag

SEQ ID NO: 4802 - DNA, 5141 bp, Emericella nidulans
tgtgtgctcagggcaatgctgacaccgtccaggactttgtaccgcaccccatctcgtctttagcagtcatcgtttgctgactcgcaaccagtgtaacgcgatccatcgaacgatcaaggatcagttcaagcaagctattgtctatggtcggtccgtcaaacatcaaccacagcgtgtcggtctcacccacgagctggctgatgaagatattggttcgcgacccttttgcgaggcttatgggactattgggctgacggtgtaacgacagtgactattatcaagcggtaagaaatacaaagatgtatcaacaccagggtgttcggacgaacacaaacaacttacgacaaatccgtgtcgagtaagttgagcaagctgagtgctaggggtgctctcgcaaaggactgtatatccaagagttccgaccttgtgacaaatcctgcgagatgatatgaggggattgattggaggggatgatgtgcgcacgggcagcaatctgccaaatgccgcttggtcctgcaagatcactagctagccttggggtacctgcacaggctgaccacgaccgagtttgcatgcctttgctacccgaagtgatgcgcaatcggtccctatcgcaacatgtgtgaggagggaacggcgagcttgttggtggttgaaagctacccctgaacggtgtttcttggtgagccgtacatccaactttatttttctcatatattctagttcaacgttcgaggcgctcttggaccatgcaaagatccgaattttccggaaatctaaagcaatggaagttctagatcactgcccgggatacctgaacgagtagggccatattaatgctccgataccgtactcatctgtcctgccactgattccgctttggcccctggacaaatgaaacagaacaaataaaaaaactgggattttggtcaacttttgcggtcattggtggacgggcatgactttgcttttgtccctaggtgtcagctatcgtagacgaagcacgatatagaagtcccggcttcagggcagtcaactttggcagcaatgcaatcttgagttcacaagcgacttgaactgtgcgagacaaacagagacacatgcccgcttgcagataccaagggagctcacgcggcgacggctgtgtattgggcttgtccacgacaggatcttgactacagcccgcagcttgagaaacagaaccccctggccgaggccagcagacttccccagtgtcactattccctggtcttcaaaaagacgttcaatgcatatgcgtgacggccccagcggcccggacacaaatcatgggatcgaatctggacggaatcggctctgaggcaggcatctcgaatgatgatttttgcaagaccttgacttagccacggtgctgccggtagacagggtccagggtgcttagcattaggcgagattgcaaacctgcttgcaggagaaaagtcgacgctgctggattctaatttgctcgtaggccaggtatcaatgtcgcttaccgtcttacggtaattagaacccaactacaatgtactctggtataccccggtaagaatgttagtccggtgggccttacaaggatatgactcctctgaagcggtgaggccttcaaagcaccgctttcttaattcagcctagttttgaagctagtaaaacctccaatatcgccatcctcctgagatccatggtggtgagcattgctaatatggctatccccagacctagcacccctccagaggcgcctttggaggtgactgagatatctgaaaggagccaaagttctagatggctaagtcgcgatgatcggattcgcattttgactctacgagatgctggttttacctatcaacagatctcttctcagcttggatttacctatcgtcaggtgcaatatacctgccagaatgagcaatctactcctcgaaagcctcctggccagcgcccgaagctatcagaagaggatatggacaatatcattacctttatctcttcatcacaacgtacgcgccgactatcttataaacgagttattgaagaactaaatcttccctgcggagaaactgcacttgctcgagcacttaaaaaacgaggctattcccgatgcaaagctcttcgaaagccacctttatcggacgatacaaagcgtgtacgtcttgcctgggcccttgagcatgtgaattggacaattgagcaatggaatcgaatactttgatctgatgagacttgggttactccaggcttccataccagaatctgggttaccagaagagcaggagaagagctagatgagacctgtattcgttcgtctacccccaaaaagcgtggttggatgttttggggatcattttatggagatactaaaggcccttgccttttctgggagaaagaatggggctctatcaatgcagagagttactgtgagcgaattgtgcctattattgacggctatcttcgcctgaaccgacagcaaggtaactatctttgtcttatgcatgatggagcacctggccatgccagcaaagatactatagcagagcttcatggcgtagtatctatcctattagttggcctgccttctccctgatctgaaccctattgagatggtatggaactggatgaaagactggatccaagagagatatccagatgaccgccagctatcttatgatgccctacgagaaattgtacgagcttcatgggatgcagtccctacagactttttggaaggccttattgggtctatgcaagccagatgtcaggcagtaatcgaggcagagggtggccatacaaaatattagtaagatattagcattaatacgaacggcagaatccaaaggagtcatatccttgtaaggcccaccggactaacattcttaccggggtataccagagtactccataactacattagacgcacatttcaagggctgcttatttactttctgcctacgtggagcaaatacgcccgtattcatcgcaccgcccccgcccttcctggtcatgccagaaacagctgagaaaaatgatagggcttcaggcctcaaccttgcagaggtatgtaattgggctcctagtcaaactacatttaaaaataagaattacacctttgttgttcaagaatcctgaaagcaggcactgacagtcaactttcgctagatcctaaaggacatttcaaggtatatacggcatcctgtaatcaattagggcgtgtagctaaccattgtttgtagtggagagcaagcagcatcactccttgagcaacacctgagcgacctagagagcaagattgatagccttcttgaaccgcaagacgaaagcgctggaccgacgccggagaatgcctatgcgaacacgcagtcgagctccgatgtgaagcaagttgatcaatcaaaaagctcttccaaatgaaaccgaccatctgtgtccttttctgcgacgcccttctccgtgattattccgtcgatgagttcagagggagtaacatcgaaagcagggttccagacattgatcccctcagccgcgatgctgattgtttccaatctcacatcgccggtggtatcgtcttcccgcgaccctttaactctcgttacttccgaaggtggtcgttcttctatgacaatatcgccgccagacttcgtagccaaatcaatcgtcgtgagtggggcagcaactagaaacttgactccgtggtatctagcaagcactgcaagaccgtaggtgccgatcttatttgctgtatctccattagctgccaccctgtccgccccaacaacgatggcgttgacacgagtctctggccttacaataaagctccgccatggagtctgtgattaatgttgccgggattttatcatgaacaagttcgaacgcggtcagtctagagccctggttgtatggtcttgtttcagtgcagtatgcatgttgcaaagtattgttggccatgagagaacgtatcacaccgagcacagtaccgtagccagctgttgcaagagagctagatatacatcagcattcaacatccagcagcattcttggggtttaaactacccggtgttacagtgcgtaagaacaacggctttatcatggtccgtgggcaaggcattcatcgatatccatttggcaccgttttcgccgatccttgtattgtcctctacgtcttttgccagcataccctcagcagcttgaatgaatacattcacgatgtcttgtgctgttgagcccggagtttgcgatctctcagagacaataacttcaagcttccgggctgcatcgctaagattgacagcagtcggtcgactgctcaccaagtgtccaagccgttccctaatgaaagctgttacgtcctctgccgtggttgagatcttatttcgtatgagacgttcgtgaagctcggacgcgagcgaaagggcagccacaatggctatagcaggtgcccctcggacttgcatattcttgatggcttgccaaccttcctcgctcgttctgatctcaatgtaacgctccgtaaatggtagttgcagttgatcaatgatggaaagtttaccatctttatatctgatggcctccagaaccattttggcgctgtaggtggctgcagttagcgattgaatttaggctcaagttccacttactctacagcaatccagggtatttgctcctattatatgagtgtctatagtgctagtggttgacaaatagaagttggacttcagagacctactactagacaattctatcataaattttctggataaaggccctatcacgataacgcaattctcgacaagccccacccctgcatgaccgcccagaaagattttctataggccctgtagacatcccaaagggtcttttttttacctagacaggccagatataaagcagtaatccaatgctcagagtatctatacagaattggctattcaatccagcagcagaacttgaggactctgagtagatggggagcttttgacctcaacagctgtctgctaggctattttataatcttaataagcttcttgcagctaatataatttacaagcaagctatatacagctgcgcagcttgagcaatatatcatacctagatatagacttggttaacccaacccacgaaacccgccctgacct

SEQ ID NO: 4803 - DNA, 5217 bp, Emericella nidulans
tagcgatttaagaccccaggatttgagcttcagtttcaagctactccaataccccagaggggccatgtctcgcgaagtataggaagctcctggctggaattaaataagacatgtcctgagtgctggaaatagcctcgtttcgacgtcccttgcgacataatccttgtatagcactcagcgcgtttcagccctgtatccaggggctaaatttgaagtaaacctgaatcctaaaaaaaaaaaaaagaaaattgccgatgttctatgccttatctcccgtctaattgttccgaatgacagcctatcctgcagaatggcgacgtcgtcgaggtagatcacctcgcgctgcatccctaatcaagcagcagtgttagcgacgtcactatgcgtatcgatatacgaaacgcattggcgacacattcgatcgcgtttgcgagcaaacagcattttgcggggttcccttgaaccgttgaagatgtgcattcggtagatccacagtggccatggaaccaagcaggttaccgagattcctcggtacacctgagtcaggacccatgaggctaccatgaagagacctttcgatattcttgtaccgagctgcatatgtttcagcagtcagaaatacgttttcgttgaagcgagacttgcgacttttaggttctcgtcacacgcctgtgcctgaacctggcggtctcgatcgagccatcaacaagtcatgcggcccccaagctgcaaagggaaagccatggctcgctagccctgagataggttccaaggtacccaccaatcaggtctctttctgtacgccagtttgccgatctcatttacagagtagtggattgcggtattccagggccgaggcgaaatggcgtattgcgttagggttctcgttgattagtccagacctaattcagaaccaagctgacatgttcaggacaagcaaacaacatgtcggatgtgcgtttctccatctgatatgggtaccttttcgtctccattgttggattcaggggcagccgatgaacgagtacttaaagccctaactgctccctggcgcgcttccgcggaccgtcacggtatctgtgaaaggtagggctgaagtcatcatgttccgccaagtcagttcagcttgtgccctcctgggtctgattctcggtgcttctgccaccaaggccactggccctggccccgaggcttgcggcaacttgacgcagctgcttgggtcaaagacggtcgtgtctaacaccctgagcatcaactacatcgactcgacccaatcctactacaacaccgagcagagcaagtacaagccctcatgcatagtctaccccgtctccaccgacgatgtctctatcgcaatcaaggcaatccgacgttccgattcccgcttcgctattaaggccggcggccacaaccctaacgatttctactcttccgtcgataaaggcgtgctgatcgacctgtctcgcatggctgagcggttctacgacgaagagtcgaccctcgcaacctaccagcccggcggcgactttggcgatatctatgattacttttctcagtggaaccgcaccgtcgtcggcgcccgtctcgccggcgtcggaaccggcctcgccctttctggcggcctctcctacctctccagccagtacggcctcgcctgtgactccttccgcgagctcgaggtcgtcctcccgtccggcgagattgtcacagcgtccgagtcgacgaatccagatctgttctacggcctgcgcggcggtggcggcaacgcctacggcgtcgtcaccaagtacaccgtgcagtcatacccggccaacaccttctacgctggcaacatcatctacctcttccagcagaacaccgccgtgctggacgcgattaccaacttcatccagtacaacgacgatcccaaagccgccatcatcgggacctacgagaaactgcccacgccagggttcgagcacaacctcgacgaggcaatcatcatgttcctggtgtatgatggcccagacgcaggcgacgtcttcaagaacttcaccgacatcccgcacctggccaataccctcaagcaaactgactacaacggggtcgtgaacctgccaatcccgggcagcgccgaactcatcaagggccggaataccttccgcgtgtcggtccacagtggcgatgagaagggcaaagaaagcctcaacaagctgtacgagaaatgggtcgcctggggcaacgagaacaagggcaagtacctcctgacctcgatggacatccagccgattccgagatcgctcaccgacgcatcaaattccaactttggcggtaacgccatgcagatgcctgatgggccatggttctgggtgaatttcctcctgacggcgtcgtcactgctgagcgaggaggaactcgaggaggcgaatcagagctacaaggagatggtcgagtcggtgcccccaacagagggcttgccgctgttcctgaatgatgcgagccacgatcaggatccgctgaccacttttgctggttatcagaagctcaaggagatcaaggcgaagtacgatcccgatgggttcttcagtaagcgaactggagggtgggcttttccctaaatgaggaccgcgcctcgtatatgggcgaaatgtgtatgttggtcccgtatatatatgcttttagatatagtgttgatattagaaacagctgtttctctgagtcggtgtaagcgtctctgtacttactatctcttcaaactatgtcatgaaatatctcaagcaagagctcccaacctcttggccgggttggggctggctggctacccagtaattgcgaagccaccataacaaaccccctttgattttacgtaaagaaaaatgcaccttaacatttagatgagagtaggaggaatatactaagttggcgcgacaaatactcgtgtctaaccaatagcaggcctctcctgtaggcgccaaagtgtgatgtgattcagtgtgggctgcatactgagcgggtgccggcggttagagatttaatgtagccgccatacttaccccgtgtatctgaacttctttaaagtaccatcgttagtgttgtaatgtaggcgctggggacgggccggtccttgcagttgcataagagaatccgctgtgagcaaagtctaagcgcccgtatactcaaatcggaacaaagccttccatttatattcggtgacagaggccggtcagggccctttgtgcagcaagtatatagctaccttagccctctttcgtccataccagtcccaacctgcgatacactctggaccgcgtactcggttactatgacatctcagcgcaccatgtcgctctaccgcactctgctttatctcctctccctttcagctggatctcgcgcaatagaacaggatgaacttcaagatttcggtagatattcttcagatgtttcgcgcatcctactcacgaagacggtctcttacactggacctgaaagtgcgccgataccaacaacatatggtaaccttgttgacacctcccaaagaatcagaagtaacaatcattcagacagaaccgatgccttctccggtccgccgcaacgcaagctttcgtgcccaccacagcggaagcaatgcggcgacacctgcatcccttcaacgcaagactgctgcgcggcctccgagcactgtcttccaggggattactgctatcgccactccggctccgtccgctgttgtccagaaggtctagcctgtttccaaatcagcggggatgtatgctttcagcagactgtcgtgtggtatgaggagattcatattatcgatttgaacgaggaagaaatcatcacatcatgggatatagtagagtcagtataccgtacaagctcaaggattaccatcacagcttcatatcctagcgagggtcgagcgtctttcacgagtctcagtgagggtatagttgaagcggccgcgacaccagtgactttggctctggacgagattcccacgaggacagtggcattaggtgcccatacaacggaggcgatgctgtctgatccttggtctggaggtgaggggcaagttgttatggaattatgaacgttcccaagggtctgtggattatatatataatttcccagtcacttctgtgcacggagttatatatttgattgcctgagtggtcgagtttcgagatgaaggatccgcacttgacggttatgcaggactttgatcttgcatgttcagctcaatcaaaaccacagacgcctccgtataagcatgattttgtatctgagctaatcagtggatcgtgatgaggagacttttggtctggaacttcacgagtcgtgccgacttgagccgccctcgtttagcaatatgaacttcgagagtactgcagcaccggcactgggtgttcctggtgaagtcatgatcgacaagaacttttgggatttttcaaatggcattgactgggtgagctgagtttccgaatgtatcaggcatgccacttactaacagttcgccaggctgaattcgacgcaacagtacagaacttggacatggccggaaatagacttgggatatactagcaccgagcactattttcctacgcgagtgatttctcatcaaatgggatttccgctccttcaggctcccacccgcccaaccgctacaatatgtatgtccatataaggccttctacaaccactttcgcaacggtacatgatttgaaagacttatgtataatcttcgatacccaaatcacactgtcttcatgtagaaattcacataatttcatgtttacaggataaaaagactattgctcctaagtattcaacgcatccattgcaaccgtctgatatcatggtatcattattctttaactacctgggaaggtgtgaattatacaactctgcctgtttctttcacattaagattcgccttcccaggccgcactgtcatcccctttgtgatccaatggatggctggggcccgtaacacctatcgctgcctttaaactagaagattttagggaaactgtcatcgtgccttccagagttgctaggcctatcacgtcttgggagggccttggttgagtagacacgcgccttcgaaaccgagcttttactgcggctaaaatgaatctgtatttaattcagcgaatgacgcacgcttgatgcacactcatgagtctaattaatgtaccttgataatatgactctagtctacccacatacaaagac

SEQ ID NO: 4804 - DNA, 3742 bp, Emericella nidulans
cgggataatattctcgagctcggctagtattgacacatgcgagattgcagggaacaccctgctcagcagcgccacagttagagtaacctatcaaccccgtaccgaaggcacggtatatccctggagctgctttttgggtgctcaattctgcttggaactatgcattaagatcctttgggaaccagcccctcggagtcggttggattgaactaaaccactctgggaggcctactaagacaaccgagccgtcctgcttcctaccatccttgatatggaatgaccggcacaggcattggagtcttcatgaatctggtaccgctatggagtatctttcctgtcgatcacatatcatttgctggaaaccaagagtttataagtataatgctttgactctagcgcatgccgaagcctcggcgccagcgtgttttggaatatcgcaacaactcgcataatctgctagaaccttgtctccacagttgaactgggcctgcatgcagcaccagtcccagagtgagcagcgggctagcgacgctggctgctgcacagcgcactgatcaaggtctggggtaaatgtccagttgactgccgagccgtatccactagcccacctatcacggcgtcgatcagtatatctctcatgccttggctattgactctggtggacacgatacgcatgggtattattgtcacacaagacgacagggatgtggtgataaccagctgatggggaattcgatacataaagcatgtggagctgagtgcggcgtcttctgtgagctctgtatcggaatcattactcaagcctcctttttcaaggctagcccgggcgatgatgcagagcacaggcacagcacgagattcagaaaatgcagaacatgcaatcttttccctgatgacacccgacatcaactcacataatccttgcatcgctcaaggcgatacgaaaaggtttgactcctaatggagagccgtgcagtcaccaagatgttacgaattccaaattgaccgaagcatgttcaagagtgaaggacccgttctctacgctaactcgcaccggttgtctggatccatcatcacagcaggaaggtcgcgaaatttgatacccatctactatttgaaatctgacaggtcaaattttggcctgccacgaattcctgtcaaatcatgattctgactcgcgccttcaacagtcctcccagcttcgaatcagccaacaggaattcttctttttccctcttttccttttaaacgggatccttttttgcttttgttgctcgacgcattcctcctgatcaggcaaggtggcacggttgatattgtgcgatcatccattcgaagttccagacttgttcaaaccagagaccccatcctgagccgttcaatgagagcgcaaatctaccaggtctcgatgagggtcgcgattaataacccgtatacttcggagccgagaagcttttaccttccaggaacagcacaccgctagttaggagtcttccagtaaattaatcttggacgacacttacgattacgcgctcaagttttaactgctccaaactcaaaaagccgtgtcaaatctgtctacgcccggcatgttctgtactgttcagtcgttctcgatatacggcatatcggccacatgcgcgacgaactacagagcagccacaatggacgtgcattaccttcaacgtacgagctccttccggatgaagcatatcgttcaactttccagcatcttgatcttacgactaatggcgatgctaaccccagacttgcgtaaatccgcgacgctgggctatgccagctccatcaaagacgatagatcaaagcctcgtgccgaacagttccgcaacccactctttaatgggtcttaaacggtcaggtatcaacacccaccgtcacggactcaaagtatgctcctggggcacaagggtgtgagcgaggcgaaggaatctgttgagaatttttattcagatctgcggtttctacaggtgatctagcacctcgtaccgcaaagtatatcctgatcaaccaccgggcgcgacggcagatacagtgctagcttgcggacgtcgcaacaaatgatgcgccatcactagtagatttctgtcaaagcaaatcgaatctaacccattgctcagcagtgggcatagcactctttaaactatctatacgttctcgacatgctcgtcggtcggcgacttctcgacaagctcactgcccttgacacctgttcccagcgcatcgctgtcatccgcagtaagccgacgggcatgaccaaacttcttccgctccttgtgcagctcctttgagagcttgacggctcccttctcccggtgtgtgaagaggtagtcaatttcctcaagggtaaagtttgctgtctcgggatagcagaagtataccagcgggacaaaagcgaagttggtgcacatgaagatgaggtacgccttccactggagccggttgatgatgaccggggtgatcatgacgacgaagaaattcttcagctgtcagcacatcccgtctgatatcatgcgtgtattgcaggcaggcttacccagatccagttggacgaaatccccaccgccgttccctttgcgcgcgcatgcaggggcagaatctccggcacatacacccaggggatgcaattgacggatgcgccaaaagcaaacatgtagacgaagaaaaaggcgacggatgccgaagaggtggcgtgctcattctccttgcccttgaagctgagtaggatagacaccatcatcatgcagactccaagggtgaacgacccccacatcatgggtgcgcggcggcctaccctgtccacaaagaaggttgggaagaagctgccgaggacaaacatgatctggacgcagccaccgatgatcatggacaggttgcgggttaggccgacattgtcgtgaaggacggttgggatgaaatatctgtgggctatcagtgttgctcaggtagacgtttgatagctcagtcagggagaagaggaggcgtacactatgaggttaattccgccgacctgattcatgaattgcatcccgtagccgagaagactagataaccgagtcagcgatttgtcatggtcgcgggggctacgcttgacttacactctgcgtccggttgaaacgctatcgggcttgaggatattcctccacttgtactcgccattcttcgtttcgacagccaacgcctcgaggatctcagtttgctccgcctggatcttggggtcatccttaggcttgccatagacgtcgcttagaatttgcaaagcctgttcgttgtgtcccttttggtagcagtatcgtggcgattcagggactccgaagatgaggataatgacgacctggctggggtgagtataccaccaaaaaaagggaaaaaaaaggaaaaagaggaagaaaaagcaaaaaagaaagaaaattaactgggcaagacttacgagtgcaaacagcatttggcatgcaatgggaagtctccatgcaatctggccaccgacgaagctcatgccatagtcaaagaagtagcttttcaaccaaatcagctccatcattcagcaggagcgatatggaagacatgaggacacacctgatgacaataccgacaccaacaagcaagggctcgctgcagaccagcttcccgcgcttcgaggcctcacacagttccgcctgccacatgggcacagtggacgtctcaatgccagtaccgataccggtgacaaatcgaccgaccataa

SEQ ID NO: 4805 - DNA, 2948 bp, Emericella nidulans
aaggacaaccggaggttgattgcgttcttcggccgtcacctttgaactgagaaatttgaggggctctctgaactttgtgctaagactcaggggtgctcacctgcttagaatatgcctactgaatttgtcttgactgtactaacggctatctataaggtgcgaatacgcccgcggaacaactaacctgtgtcaccgtcacgtatgcatcttttttttttcttttggagaaaaactgaataaaagctaatgaattccagaaccggtgccaaatgcctcccggcaagccaaatcccccattgcaacggcctagtcctccatgactgccacgccgagatcctcgccatgcgcgccttcaactactggcttctctccgaatgccgcgccgtccttattagtgagcagcatcaatccttcatagacggggagggagagcttaacccacccgcgccgtcaccttatatcaggcgctggcgacgccaatctcagaaaatcactggtccagagtcaaacgctttatttccaccctttgagatctgcccagacgtagacatctacatgtactgcacctgcgcaccctgtggtgacgcaagcatggagctcgtcatggaagcacaagacgatccgaccccgtgggctctcccaaatacaacctcaacttcagacacagacccagaattaccaagaacagacgcccatatcctctccggccgcggccacttctccaaactcggcattgtacgccgtaagcccgcgcgcgcagacgcggagtctacgaaaagcaagtcatgctcggacaagatagccctgcggcaagtaacgtcgttactgagctacgagagtagcctgcttgttgctgtaacggagaatgcgtatgtcaagggtctagttatgcctgaggaggagatcagcaagtcgggttgcgagaggtgttttggtgggggacagaatgggaggatgagaggtttgaatgggaaggtgtggcctgttaatgctgaggttgatgccggtacgagtcttggctctaacgagcaagcgggaagaaacaaaggtagtgagagtgatagtcagagatgccaccggcacagttatgcattccgcccattcgagatcctgtctatcccaaactcactgctcaaatctctctgggccttccggaaaccaagagctactgaccccgttttcgactgagagtccactgttgtattatttgcgatgattgcgtttgtttttctatgcgggtttggacgggttcttcacgattgcatacttccatctcatttctagggttattcaagaacacatacctatttgcattggtgttcatgagcattataacgctcatagatcaaaacgacttaggaaggtcctttgtttgaatcgacgattcgaataagttaaggtttcacgtggaccgaagtgcacgttggccacgttctctattgattcaccttcactccttcaaatcacgactagcgcagagtcatcttagtgctgcattacaccaccgggattgaggctgggcttttttccatcgccgcccatttgcagacgctcgtcaagttctccgcttccacattatgctgatccgtcagccaaaataggctcagatggcgagccgcgattatgaactagaacacatcctatccttgagggagctgcttccttgaagaattagtgcgcaatacgcactgtcacattccaggacagctgtggttgattcagatagggtgataatactctaggtgtagtgccgctgtacgccataccaagcagctgttgtgcaattttcccctcacccaggaacttcgatataaacgaaccgctgccacccaagaaaagtcagcagagacaagaaacttggcgatgtaacattgtcttcacagcgggcaaaatgttatctcctgcgctttgcttttgtaggtggcaccgccagaaggacggactcgattacgccataacgtacgacgatgaggacccagacgatgtgggttgaaacatggatataaatcgacatccccggcgatttttctgcgtgctatctagagcccagacgacaagcactgatcgccagtccgtttcaaaatgggcttcctcgactttcgatccaaagcggttgatacccaagtgactcagcataatgcaccatctgaagacaccattgtcggcggtgatctgcattacacggctgatgcggcggcaatacatcccttccgacataccaggaggcttcgggggcgccggttgaggttgtctcgccgctgggctacgaggctgggtatatcacgttgatcttcatgaatgtgagcaaaatggtcggcactgggattttttctactcgtgagtaatctttccgtacttggaatgactttgtaagtgacaccgagttatcatgtctagcttcctctgttttcgagggaaccggttctattggtctcggtctgttctactgggtgatagggtttgccgtcgctgcaagcatgctctccgtctaccttgaattcgcttcttactttccaagtcgatctggatcagaagcggtctacctggagcaagcatatcctcgtcctagatactttttccctaccgtcttcgcggtgcagactgtggtattctctttcagtagtagcaatgcgattggtacgtcaatttgcctacgcaagcctgcacacactgacccgggtggactagttttggccaattacctctttagacttgcagagtcggagcctacagcttggcaatccaaaggagttgctcttgcgtcgtatacagtcgcggttttaggttggtttatagggctcccgcggtaagctggtatgctgaccatgaaccatagccgtctcctttaacacgaaatggtctctacagctctccaaagccctcggctgggtaaagctcattacattgatcttgtgagtattttttgcaggtttcgaagattagctttt

SEQ ID NO: 4806 - DNA, 6670 bp, Emericella nidulans
acataaccctgagcgctcatctctttcttaccgcattcagagcctataaacttacatagttctgcagttctaacaatctcacggcaagcctgatttatatcaagtattggactactgcctgctcttgcactccttcgcacattccccaaatgtaacaaactccaccccctgccaccccttgagccatccaatgaccctatcaaccatcccaatgacatgtgccatcccactagtgtccggatgcaaaatcaacgggaaaataaagacctgctgggcgccatcgatagtctcattgtagagatactcaaagcgggccttccagttcttctcgatcgcctcggggctgacaaagccgtgcgaattcgcggccgcagggagaaactgcatgggggtcatgtcttccatgtaccagttgcagggaatctcaacgagcgtactggctgtccggggagctggtggcgggagtggatgcatccacgatgaggctgggactgacggtgagaagtcgattggctggggggttgtttttgtcagcaggaaatatggagaagagtcatggtgggtcaaggaagtgtctagacggggttagaatgggtaccgtgaatggccaagggtgacgcaccgtagagaaagccatgctcttcgagcctactgacagtgtgctcccgcagttgatacaggggtgccctccacccgagcggcttctttccagtcaatactgtagcaagctggacgcatttatcgataacgtctcgctcctgggcctctgataactgcgttgcaccctcatgagcataaccgtgacacccaatctccgctcccgagtcgacgatggctatagtctgctcggggaacgactccattgagtgaccagggacgaaccaggtcaccgacgaggaaatgccatgcctttggaagagacgcagcaggcggggtacgcccacttgggctgtttagtagccactgctgaaatcggcgagcccattggtcggggacgcaccagtccctaggaagccagagacggcgtcgaaatcaactgacagaagaacttggactcggcggctgggcatagtgtgatggaagatgttgtgaggtggaggaacggggatagtgaaatcggaagattcggccgtaccgttgaagggcagcaagtgggagtggagagtggagagtggagccctcagccatcacagatcccaccatgtaactgcctctttgctcttctttgctctacaaagggtcaagtctctactcccaaggtacaccttttcgaactgctgtagattttaacatgatttggactcaaacagtatatatatatgccataaaaaaataaaaataaaggaaaataatgaataactccccgtctccaatagtatacgacactccgggcaaaaacccgcacatagacagtctagacaaatccaatagtccttgaggttggcagaggccctaatacattgaccgtcgtagatagacataggcgcagtctgctgttcgctcagctacgcggtcagagagttgactgattgaatgtgcaaccttgaccattcctttgacttctccagctactaggacccgaaattatttattgtttgagcaattagtccaagagtataaacgtctgataaatctcgacgacttgcctgactggaagttacgaaaagcgcgggcttacactacccaaccaatacaaacagtggtagatttcgaagggtcaaggcaccacaagggtggaaatactgcactggcaagaatgccgggcttagcagccgcgattcctggcttctggggtctgaattcctttatgaatagttttctcagctattgctgaggaagctgaccgcaaatcctcttacctataccgatacagttgtcatcgtggctaaggaataggcgttgaagattcttccactagctggaaccagtgcagatacttaaattacctcaggtcctgccagtatacaccgcacacagtaaggacagattcaatgcttcttttaactggcctcttcggagtacgggcagcccttgctaaagcaattcgagatgccgaagcctcctccccatttcttccaagcatcaagacagactgcgatggaagttgatatcctcctctcttacgagactcgagttcagctaaaggcgccccagtacagctgagacgtacgtggtaagccggcacttatcatcacaatttccgcccgtaaagcttccgtcagctattataagtggtctctcacctccagtgtaatgcaaatggaggccagggggattgataactctcatctacagctcttgggcaatgatgaacaaggagcgaccggcttatcgattgcgcgcattgcattggagacagcaacttcaattgcacaactgaagactgacacttagctggaactttataatgctgtctggcacacatcgtgaggaacaaatgactcaaaagataatctcattgcagccgcaagtacttcgagagcctctcatcgagttgggatggactgacgaaagataatgatatgtgcaagagtttgctccgaacgaacgagtctttttgttggccattgtcacccaaggagtgcagaagacttttattcaatcctctgccattgtgcccaagtaggtgtagaagtcccagataacggcctataaggagtggaggtcggctatccaaatcctgacatgggtataacaaagcccgcaggatgaatgctgcagtcttagcaggagagttctcacatacacagggatttgcgaacagtgtgttacggttctactgtcaggccggcctcacctcgaacgatatcacaaccgtcctcaacggtctgttagacaaccaggaattgactgcttaagcacctcgaattacatagatatcggtatcttccccagtgagtatttgtcctccgctatcctcaagaactgaatccattcggtttgtaaccgggagtgcggtccaggtcgagatttgaggttctcaaaagagataaaggacgttcagttgagtgcaactctaggggattgatcccgctcgaaccccgtgcacaagggaaaaagcacgacttggcttggtaacggaatatgcagcagttctacaaaggaaccggtgttcatggtttgcgatgaggggtgaggctgagagatgaggctgaagagtggatgggagacaacaaacagaagagaagaagtacatcctcagggtagtaggagcaagatatcctttcttctgaaacccatggggcgtacttagtatctacggtcatcaactttcttgacattgttcttgaaccctgcggtcgtcctttgcaatccccttgactggtttttatatttctgcgccacgttactatatgctagcagcgtttcaggctcaaccctagtttcgtgactaaaatatgatgtagcctgggtactttaaagaatcaatgatgctgcagttctaactttccataccttgctgaaaccattaccagcgttaacagtcatggatgtgcagaaaagtcgaagtgcttgaagcctcaggcaggattggtagggtatgcagcctcaggcagaacgcgccgcggggtttgttgacgcttgatcgttgacacgtacaacgtgttcgcggattatacaatccacaacaagccagtttctaaacttctagaagcagtgctcatcttcacataagacggtccatattgacattgacccccacatgtcagctacgcaaacgcccagttctcgaggtccgacgccaagaatgatgcaggcagccagactcaacacgcgcgttgaagatctagtctagatgtggacctcaggacgcaacgaatgaaagcaccttggtggctcacagcggagacctgtgggacgggcgagacagctgattggaatttcgagaataagattccgtgctgcagcgacaagatggttggctagttgggctggaagctcaaagctcgagtggtcggcttgctgacaaaggcggggtccagaagtgccccgcaccgagaatttatgatataaggagctccgtccccagcgctttcttttctcttccttccagtctcactttgctcaactattcccgtcgagtgcctctaataccgtcacaatgtccaacgttttcttcgatatcaccgccaacggcggtaagtttcacgttttttgccgcgcctgtcattcgctaatccccctcaagagcctctaggccgcgtcgagttcaagctcttcgacgatgtcgttcccaagaccgctcgcaacttccgtgagctcgcgaccggtcagcacggcttcggctacaagggctctcccttccaccgtgtcattccccagttcatgctccagggtggtgacttcacccgccagaacgtgagtcgcagtctctctgggaaccgcgagatgcagagattctaaattttggctttttagggcactggcggcaagtccatctacggtgagaagttcgaggacgagaacttcacactcaagcacgacaggccttacctcctctccatggccaacgccggccgcaacaccaacggctctcagttcttcatcacggtgagtcgcgccattgataccggcagaagaagatgctaatgcgatactttctagaccgtcaagacttcatggctcgacggtgcccacgtcgtcttcggcgaggttgttaagggccaggaggtcgtcgatgctgttgagaagctcggctcccagagcggtgccaccaagaagaaggtcgtcatctctaacagcggtaccctctaagcggatcgtggaggaactgaaatcatctgagaaatgaaatgagcttctgcgggccggtatcttactggagcccttgcacattgcccaaatttcccaggcgctaaagtcgtaaatcgtaggctccgatcaaacaaccataaatcgtaggggtattggggcgtcacatccaagctaagtcaaatattgatatactttgagaacgctagtaaaacgatcgagccgtgtggcattgataacaaccaagtatacgcaatcaccgtaagcctatcattcacttttgcccgagtatgtcaaagtgcgggggcctacgatgagtcagaccatccagcaatgtataaacgtcccggaccgtgaaaatgtgtcctccctcagtaaagcacaggaaaatgtctaaccaacccgtaggcgctattgtcgagctcccagttttgacgcacccagcaccaaccactctcacgggccgatcaatcaaccttgtcccgctaaaaatcacccacgcagacgagctctttcccctcgtaacaacgctgattcattccaaaccgctctgtgggattacattccagatgggccatatgacgatgtcgctcatctacgcgccgattttgctgctagagagatttcaaaagatcccgtcttcttcgcgataatcgatacgcgcccatctcgcccgacaactgggaacgcgatcggctacatcgcattcatgaacatatcccccgaacacaggcgcattgagataggacatgtgatttttaccatggcactgcagcgtacaattggcgcaacggaggccgtctaccttctcctacagcatgcgattgaagagctggggtacagacgtgtggagtggaagtgtaatgcgcttaatgaggggtccaggcgtgcggcactccgcctggggttccaatttgagggtgtctttcgtcagcatatggttgttaaggggcggaatcgggatacggcgtggttctcgatcgtaagggaggagtggccggaactcaagaaggcgttcgatggttggcttgacgaggggaatttcgatgagaacggagcgcaacggaggagattggaggagttcagggcaagtgcttagaactaatggggtccagtttctttcgtgcgtatagtctagccattctggcaagtttcgtagcatagaaagctaagaaggttgatagattagaagacaggcaagaacaagttcaaccatgcaagacagtcaaatatggttatatattgtaagcaagtagtgtactcgtcgtattggtacacaaaacatctttaaagtttgccctgtttctctttacttccaacaacgacgtcttatatttaaaagagccactatatagaaatgccatgactgtcgcgccgtgacatcacaagtatgacaagtcaataaatggttcttaactgctcaattctaccagagaatgctgtataccttaacaatagagtctctaaccagtgtgaaagactcacagtgcgtccggcaatgtagatatccataataaacagcaaacagagcaggacgctcgttcccaggaagttttgagcagacattcgacgctctgcatatattatatttaatgaaaaacgtgacaatatgggaaacacctggcacgttgtatcaaaaactcatgtcggattgaaggagtgtagctctccagcgggcctgcaagccttccgaccggcatcaatagttgatgactcgttactgactacttgggctgagtttacagatttctctgctgtaataagtcggcacgggttcaatgtcccaggcgattgtcaggctgtccggcttgatacctactatgagttggtcggttgtccaatattccaagcacagccctgttacctatgaaaagtaaacgcctcagagtgcgggtatcaattgtccttcaaagaggcg

SEQ ID NO: 4807 - DNA, 9628 bp, Emericella nidulans
gctgttgtcatcagtacgagctccttgtaaaacatggtgacggcgaggcctggggacgagtaaatgccgcggtcaccaaggatgggagattcccatcggtcgatgcagggatcttcctcgccgcggatgccgaaggtgcatccgtccaggcaagagaagtcgttctcaattctcccctggacggagatctcgtagtggtcctgcaggttggtgccgacaccgggcaagtccttgataaccttgataccgaacttctccagctcgtcggcgggaccaataccactcaacttgaggatctggggggagttgtagacgcctccagcaacaataacctcacgagaagcggtagcagcacccggaatgccggcagaggcggtattggacagggggctagccttgtagagatgcttgccatcaaggaattcgacgccagcggcacggggtggatcttgggtctcgtcgaaggtaactttggtaacgtgagtgttcatgcgaacatcaagagggtatttcttggagccatcggcatttttggcatctcgtacggcgataataaactcacgagcaccgtttcggtgagcatcatcggttgatacggggatttggtagtagcccggtacggtatcacgagttgttctgtcagcattggcgtcgccagctagcagtgtcccaatgttgtagatattgtcggtccagttgccaagagcaaaagcaccgccggtcagcatgctgagcaactgggggtcctttagaacgaggctcaggggagctgtctcggtctggagccagccatcgtaaccgtgaccctccaagccaggcagcaagtatttgtttctctccagcttttcaaagtatccgcgcatgttctccggtgaccacgagctgtcgccagtcaaagtggagatgtattcaaagtcagattggtgggggtagacagcaatcaaagcattgtgtgctgtgcatcctccgagtgtacctgaaggggcactaaattagattatacacccttgtgactcaatagaaagggtaatgcatacctgtgcgaggatagagggttcccagtaaagttgagccttcaggaggattcagaccggtgtatatttcgccactaggtgtttcgtagctcgtcttgaaatcgcgagcttggcgttcatcatcggcatagtgatgaacgaaaaagttccatgcgagtttctcgtcctccgaagctctagctgagtaggcagggatgctatagttgtaggtttgaccctggtcatcaccagcttcgagtagcagagtcttgtggccagccagagcgaggcgtgctgccaagggaccaccaccagcaccggagccaacgacgacatactcgtagccggtgatgttgacagccctggcgacgccagcggtggcagccaggaagctgaacaaacgaggaagcatcatgttcaaatctgggaactactgccgtgacgacctcaagttgccgggatctcatctaggattatataccataatggaatctgtttcacccctgaaacaatatagacgtgatcgaccacccatacagtctctccactcccgctacagttggtgaagaccgttgggacccattcaagctgttatgccgcggctgtaagaatcttgctcgtggacttgtggaggggcttgaccccaggaagttcgaatctagcctgtttcaggcagctatcaccgaatgattgtcgatagtgtaatttgaactctgcagagctcatctgtcatccctgctgatctcccagaaaggtccacatggggcgtcggtgattcgtcctttccggaccagagtgggtggagcaagcgattgacaggccgcttgcgccaaccagattccttgtcgtgtttagttggcatagtagttgacagcgctaaccatgttgatccttagtctacttgggtttttctctttaggcgttgaccgctctgtctgctgcggactagggctaccttaagtgggtaacgtacacgggaagacgacccagatgtggcgatagtcgaggtagtctaagttccccccgctacactaaagtctctggcaaaaaaaatctaacgcaattgtccacctacaatcccaggagagcacacttctcgggtgtactagagtggctttgattagggtcacaccaggcttgcatgattcaaagcagggacagtgagtctccaaatatcttgcacctcggctggtagcagccacatgtaggagacaccccattggataactactgtcgcctcattcaagcctgaaaagaactatcgaaacgcggcgccataagtggatagccggagaaggtataatctacctgggacctacctgattccttaaggtagttcattggaaagaataagggtggttacaggtcagctggggtacaggcttcgctcgctcgagatgtaatgagctgtgtactcaaagtaaggcatgtcttcggcacatctcttctttagtcactccttgcccctctcagctttttatgtggttcgcgttgtaagatttagagctgcaatgtttaaattatatacgttggcatttcgaatgtgttgtccggcaggctcaggggatttatcttgagacaggaagacaacaagaaggtctccagaataatatctcatgataaaatctgtaaacaagtgacatatacgcaagttctatatgatcctatttatatcatgcaatcacttactataaccttaatagtaggatactgcgggtgtagctgctcaccgcgcatccatgacttgataagaggaaataccccgcggatggccaaccgacagtgaccctccggctggccaccccatatatagagtcactgagattttagcgacctagctcctcaagtgattcgttctgttctatcctgacctcccttatgtatctcccgcaagttgctccattgaactgactaggcatctcgccggttgctgccccgggcgttctgacaactaggccattatcctccgagccaggcccatagatacgggatatggcaaacggagagaccacatgaaacgtggtaaatgttaagagataactctatagtggtatggccgccttatggttagctcagaggatttaccgagttatttgcgaccaccaaaaccgaccttgcctctccttctcaatctcggaacttacttaccctcgcccccggcaggaaattcgataactgctgtggatgcgcatggacgctcaaagggggaaaggcagaaggaaactctaactacacgaacgtagcttgctaaaggattggctggttaagcatcggcgggtgtagttcccttcgtccggtcgttgatgctcggcaagccagttgtctatccggctcgggtgtgatgcctgacggtgcggatgtccgttgttacaccaagcctgtacaataggttgcaacagctttattgattactcctagatcaaaataacaggcatcttttactagaatgctgctaaaagcctcacaaggaggcaaaggaagtaaaataccattttaaatgacaagaagtcattatatcaagccgaagagacctatatctacaaacgatcaggtatcgaaggactcgacggataaagaaataccagacaaatcaaccataaaaccaaccatgatagaggacgtgaagcaggattactctgccaactatataaggcgatgttccagtaattgggcgatgagaacaggcacgagatatataccgagcaaaaacatcagtccccagcttgttgcaatgagcaaggtttgttcgatatatgaagtacgattgattgttaatcgatctctgaggctacgccaatgatatcatttaatattctaccctacggatgaccacctgggtcacgagccgcgccattatccggcaagtcaggcacgtggaaaatggcaacactgcttagcaactatacaaagaaatcagctaatgtctcctctatatacagccctaacatccccccatcccctgcatacctacgacgggagacaaaacagtggcttcgtacagagacatatacagcatatgctagtaaggcaccccaagcctacaagaccctggatatcagaccccatacaaaggaaagccgcacccgcgagcacaagcttccccgttgggtacttggccgactcgtcgccgcccgtacaggccacggagactttacggcataccaccagcgcttcaaccacccagactacctggagagctgctcttgtggtaggaccaagtccccagtgcacttcttcttctgcccatacaccagaaagcgctggaaagataggtggagatgtaaaagggacggcccgtcaaaaataatagactggctcttaagtacagctgccggggctgaagaattcagccgcatcgtgcaagaatcatccttcttcaaggatatatgcctgaactgggcccgccggagtgcttgatagtgcgtcagtccacatatctacctggataaagggtccggcccctccccccaatctataggtagtcaaaacgggcatctgccctcgaagacctggccagggcagcactgggtgcttcttctgctcatttccaacatatattgtccatagttgctgcttcaaacctgtatctagctagttcctaggcagttttgtttaggtagcacgtccagatgccccctgggaggccgcagatcacgtgggccacgtgatccgccgagtgacgttaaataataaaacaaaacaaacaaacaaaacaaacaaacgaaacgaaacgaaacgacagccaggtcgtcgccagctggctccggcgtcggcccgtgacaatggcgcagaacccttatatatttggtcaaagcagctatctctgtgtctgaggcccaggctatacttgtaagaatatgtgatttaaacgaggtagttaataccttttagagctgccttctgcagtaatcaaggtattctctcaaactactacgagtaatcatagatgtcctgtcagtatacatgcatctttgactctattgcagatatacaacacaatccatgcttcacatcctcagatactagacaggatcaatatcggcgcattgggactctatgaaagacaagttttgtgcctgcacgagcgctgggtatagatttttcgacatagatagcttgataaagcacaccctgaagcagcacctggctagcctggaaccttctctggagaatgagaagaactaaatctatcaccatagttcgacaaaaccagcaatcgctgcggtgcctcctgaatcgaggccacaccgtaccctggaatgctggatgatgctcagcggaacgggtatcccatacagcagattttgacttatgtactagtttgcatatatggtgaattctttaaagtagttctgcaagtatgtgtcctcaatgctaattgctctcatacatagtctttttatgtggcaattttactgcccaataatgggaaatagatagctgcgctgcgtattctggttttcagcaaagctttgatgttttatgtagctgataatctgcctgtatgccgccttcggatcccagttgaagatttcttgcgtggaaaattgtcttccttttgcttatactcttgaattggagcctgacctgtaaggggcagagtacctagtttcttgccgaatggaaatcacacaccggctgggttgtatagtgggtgacttcgtgataatcaagactttgtataaccttgatgcgataatcttgcttctagtggctttcctctagagaccgtatgtgcagcatgtgtttttcaattggctttggtgagttatcgtgctctgtcagccgcttgcgctttcgcattggcaggaaggcactgtgcatctagccaggtacgaggctgcttcacttatctggggctatcgacggcagcgcaaatcggtccttgttgaaaagtactagcgatattggcacatgtaccagattccggctgtaaacagtgcttcccgcgggctgcccttccccatggtactgaaaatttcctttcatcgcgataaccatgtcaattacagcgttgacgtctgtataatagcttatgtgttcatatacctctgctgtctccaccgcataccatattttctaacgaaactgacggccacaataccacatactgcactaaagagtccaagagccgtaaaataccaccctaatcctgctgcgtccacaaatggttgaagagtagtgactcctatcgcggccaatgcacatcttgttatacttgcacttgctgctgcggtgctagggttatctgggaaaacatctatcaacaatgtgttatagatcgtgtagaagcaagtgctccagaacccctgaataaactgcagaatcaacagaactgaaaagtgctttttataattcgccgtccagccgtaagcaagcagtgtgcatgtcgatataactaggagataataagtaccgcgggagcgtgccagttcaattgggaactgttgtatgttatcaccggagacacggttgataggctgattatgcttgcgggccgtgactttgtagttatagtccatcatcctaccgttgcagtagctgccgacaatgatacctatccctcttggaaggtaggctagacctgttagtagcgtattgaattgatatatgtctgtgaaaatattgggaaccgtagcggcaaggatatagtcgactgcgtagaacgatccatttatccacaagcaccaaaaggcgtctggaaagaagataattcgcaagggagcggcgaacattcgaatactgaaaggggcagaaattctcgttatcagccggttgagcgttcctggttcagctctaactgcagcttcgtattctcgatggtcttgctcattctcttctttgttgagcaatcgcacagttcgaatataactccagcagcactgttgccatagagtcccctccgtttggtcacctccattcccaacgagattgcgagcggtctcgggcaagaacattccgacaattagtaatagaagaagtccaacgatgaatagcgcccagaagacccactcaatatctccgctgagatatgcaactaggccgcctattatgggacccagacacgttcccatgttcagggctatactaacccaagccatcgtctttcctctctcgcttgatacgcagacatcggcaacaatcccatagcttatagcgaatgcagcactggcacccaagctctgaagcgctcgaagcagcagaagaaatccatagttatgcttgttcaatgccatgccaagattagccaaagcatagatagcaagtgtaagaaggaagataggtcgtctgccaacggtgtcggaaagtggcccaaacactgcaggagatatggcttgaaaaatgacatatattgtcaacgtcatgttgattgcctgaggtgataccctgaattgcccctctagtgtaggcagtagtgggaagtagactgttgcggtaagaggagatgtgatggttgcaaaacccgcaatgataacaatgaacatcgtgctacgagatgtgaatgaagtgtacggtctcgtagctgacacgggagtctctcgtgcttccaagatattgttaggagtattcgcagcgggtgccatatcagtagaagggtttgccgaggacatattctgtatttattttatctcacaagggaacaaaacagctgttgctcgtgacaatctggattttccaagagtagatgagcagaaaagggggcgtttccagatgagagctggcggagcgagcaatctgtaagtcgcagcaaagcaggcggggtaaaacagaaaacagggctttgctttacaactcctaaacaagcgaatcagctggccgatttagcttaaggcgcgtgtatagccaccagaacaactactgattcataatctttcgagattcaatgcaacaagaggggatagtgatatcgcaatacatgctttatgcgaaatgaggattacagactttcacaccacagctcgtaattcaatactccctatacagagcttcgaacgggcctgaatggaaaccctccagtatagaacgacctgacaggtgccacggctacctcaggcttaacaaggattatatatttacttttttggagcatccactggcgcatcctaggtgcaagagatggtgattagctactccaatgcaacaactaatgtcaaaagaggcggcagcctgattagagccgtacagtgatgggccgtcagggcacattgaaaactgtcagtacgagcggctcagttcgcttttaatcacagccacctcatcctccctagggcaaagaagcgtaccattctccaacagcaaacactgttggaaatattctgtcgttgtccagtcgcgtggcaaaaagtaatgacgctcgatggtatcttccgtaaccgaactcttaaggaaaacagaacaaagccacaaatttttatcaagaaagaagaaccttgatccggggaggatgccaagtaccacttccacctgtctcgcaacatctgctgggactattgttgagagcctcgcaatacttgaagtgcttccaggtttgagttgcaaggctgagatatcgactatgaacaacctttccatgcatgtaatatctgtttgatgaatggttgcaaacttgccattttggttaaatctcacacctttgagttttggacaagttgcctcgctgtgcagtgataaaccgtcatataacgcagtagcaatctcggaaaagtccgaccacctaaagcctgtgataccattgtccgcaaacttcagcaaagtcccaggctgtgcaggatggtttgcccatatctgagtgcttgtttgcgcaatttgtttctcgattatcacacatccttcttccactgaccaaatatacgcgctcagacctgaaataataagtagaagggttgagtcgtgactgaaaagaaggtcacatattgcactgccgtccttctttaaaacgggcttcgattggggtacagactgtacctgactcgggccgttgccggtggttttgactttagtgagttttctaatctcaatgtctcctgcgaggtctgcaccggccacatagcctgaatcattactccacgcaagacaactgatgctgacaaaattgggaaattccagaattttccccagttcctctgacttttcatcaaacagtgtcacaattccttcctcgttaccagcgcagtacaagccgtgctctgggctgactctgatcacagacactgcttcataagacacggtatgggcttcggatatatgcgaaatagatgttgatctttgatcctggctggatgtatcactgaaagcctcatctacctcaaggaatcgtagtagagtgtttgattgccacgcgtttaataaagagcctcggatgtcatagaaccgtctactatccggagcaaatgccagctccctaaccagatcaccagacgagagctgatatatgaccgacatatattcaaagctccacactttgacggttccgttgctgctgcttgttacgaataaactgccgtcgggactggcagccacctcatcggcagacgaagaagattcctgatactcgttcgttgcagggtgccatttgaataccgtaccatctttgtcaagccaaagatggaccggac

SEQ ID NO: 4808 - DNA, 4614 bp, Emericella nidulans
  unsure (1)..(4614): unsure at all n locations
agccagagacacgcggtcggtcggagaacacaactcttagagctagagattctgttccagatggatggattcgcagactaacgttcactactgactcttcgcacgtcacccgaccatcattgtctcattttatggctatcgtgatccttccatcctcgttctaagttggagtactaacctcttgcagcttgcagaacctcgccctacttgccacttgtgaacgctcccatggaacgtccgctggcccagtctgcacctaggatttagtccacctctcaaacgcaactagcgaacctatccctgcaccataccctatgtggcggtccgatcacggcaagtcaactccacacagaagccgaaggcccgctcatggaatcttccacgggagaagcccagccaggcggtgagcgtcccctgtctaaccccgacggtgcggcgtgcgcagcgttatgctcatcgcatcgcgcctagaggatctcccttcgaggatacatagaagcaacaatacgggtctaggagagcttctggttcccaccctgcagcatgaagaattgcccgtgtggatctctattttgcactcttgaagcttcgccccggattatatagaggtcccttcccgagtacaccgtatgctcagcattccgcaaagatatcttccgtgggttacctatcgagccttcgagatatgttgatactacgtaactgattatgcacacgccaattacaaatcttggaaacccaaaaaaaaaaaaaatatcatacgtggcagaggtaaaggcgcacagtggctggcgtcgatatcggaaggttttctctgctttactagactcgccggagacatccgccgccctcctcccacctacctgcttcggcatggcgcgtctggtaccttcgaccactactgcacggcctgcctcaaacttgcagatcgtcgctgctccagcaagacctggaatcgcgaatcattggaaaggggggcgcatcaaaatgaagcctgcctcggcacttttcaacttctgctatcccggcgaagttcttccgggctaggacggaggaagaccgaagccaagtttggttcgctctattctcaggagacctggaagccaatcacaccagcgacctaaacgccacatacctcatctgcatgggtgaatgtatgagcgtggtctgagccagacttcgaccttttgagttggcgctttttccccgactcatgattgggcaacaaagacgaggcaaggatgcgatactcaacagttcaacaaggaaaaaggtgatagattgagtccgacaatgcgtcctgtggtgtgctgagctgcaaaccgttgcagcanacgctatcggttatacaaatacctatagtactttgtacagtacgtatcggcgagtttcatgctgcgcaggccggggcgatgaatcctcgaaagttgccaggctttctataattaatgagagtctagaactcttaaccgtatgggcttgtgatcctataagccatgtcttatataacgcatgtcatttcacacgcatgggttgttgtaccgcgtttactcggtcgataactcgatatctgaacggtccgccagatatcagccgtgtccacaatggcatttgcttcggctagcaataatatgccagcactcacagcacgaatttgaccttggctcccaatacctgtccagtattgtcatcgcaagttgcgaccccttctccttttgcccctgacacaactgcgcgatttttgtgcaagagcaggactacgcggacgattgaacaaatcaaggaaattctacccccccaatcctgaagctcaaggcgtttagtactactatattccttcgtggtttcaggtgctgtagttacaggagcactctgatggcgtgcgagtatctggctgtgcgtacgggactgcatcgtcaacacttagcgctaccatagctccgcgttatcccagagtagtaaaaccgaccatgagtgatgatatcgagctaagtaataggctaccatattcacgattatagccactacggagtagggttggagacaaagcgcgtcggtactccgagtaccttgctggcttgggtactgagacacgtagagtacgaccgtcaacccgcaccgttcaacgtttgttgattctgggcatcttactccgtattcagatataatccagatatatgctatctaatttgactcggtggcttacatagataatcctttactccggagcttccccagaatagcaaaaggtaggcttcactagcactccaccccagaagagccccttccccctccggcaatttcacaccacgttgtaggggctcgggcttggaggcttggggactcggggactcggggtacaattattgtacgacggtacatgtgagtcggatctacctccaggattccagcacgaaattgtccccttgcaccactttctgtttgccgcgcggccctgcgtcgtgagccgccaaagccctgtcatactacgtaggtactccgtacggggaaagcaggtacaaagttactagtactgcatagagtgcgcccctccagctctaggtcaaccgtcaatagtattgtctccgtacctatacttagacaaggctgtgctaactagtaaccttgcactactaaccgctaaggcactaagcaccaacatctcctcaccctaaaacaggctacctatccaggtggggactttctagaagctgaaggctgcagctagggtagccttagtgcactccgtatcttgatagcatcaacaacccatcaatcacaactacgatttacggaataccgtcgagatccgggatagagactcggctaattcgaataaataggagcattgctctgacttcgttggttgtcgttgtacccagatattcttatatataatagtaaaatacagagaacgggtgagcctagcattcagtattttactctatgtggggaatatccagcacgaaagcaactatattgtagcagtattgtaccattattgtgaagtgaagaatctactcctagccgtcaagaattaatgatgccagggagtagagtacaaccttctatattgtataccagtgtaataaacctcagaacctgagactggtcttggcaacaaatgcggtagacattactatacatgatccatagcccaggctagcagctgctcatgtagacaaacaatttctgcagtagccatgttgttgttgttgttgtcgtagatgcctactatggatcatattatggataggtcgttcatccaggtaagaactaactgcagcacccaccgttcttttcactttgtcgatgtgtcgcatcccatactattactgacgtactggattttaaattgacatgtcgcagtggagcacagctggagaggtctaaactcacccatgcaagaaccatgcagatgcatgtgagctgtaagctacctgggtaagctgtcggggttgcccgtcggcccggccgggtgtaatcgagatcctccgagtgctgtggcagatgtagcagcataagcgctcctggctaactttcgcactcgggattttgtatggagttgctggtaacgcggaacgctcatagaagctgacttgcggggctcactgttagattagctgtgtaaggttgtgatgacgtagagaataaagtagagcacttgtcaatgcacatagtctgcaaaaaaagtctaaagtggttatgatattgacatactctttatgacgagtatatttgcagatggtacaacgttaccgggcactcagttttccttcgacagatgtgggcgcatttcagtcgagtttctttatttctcagacagctcaaggattaactcttatttccaagaaagaacaaaaactggcgttcggaaaactgatccagtctatgagatctgccagtcggtattgctagtgatatcacaacaccatttacaagttcttgagcaggcggcgatctgccgcctgaaagatacttgtgggtaacttttctggtataaaaagcctttccatggcactgactaacagggatccctcactcgagaatactatccctgtagaagtaaaataggggaccaagtaggcgtgaccttgcacacaccttggttcaggcggcctccctgagggtaggagcttgcatagaacggtcgaaagcagaagctagcctgatcacgtatggtatattgtctgcattagtcgtggttggacgagagctggtagtttctgtcaaagtgaagacatcggcaaatattagtgttaaccagaagtataggcatcgactgtcagaccgtgattaaatttgtgcacaaaaactgtcgagttagcggttgatacaattgcccgatgtccagatctctcgctcaaaatctatgtccatttcgcacatgaagaattgggctgcttcctagggtcatactccacgataatgtactccgcgcgtccagggtcttcagtcaaatttctggttctagttctgagccataatttggaaagttcagagtgccctgtagccaaagatgtagtgatggtttatgaggaagatcgcagcacgacttacaaattcattagttacgacctcttgggcgtcgtcgtaaggaacgcagtcgaacat

SEQ ID NO: 4809 - DNA, 4232 bp, Emericella nidulans
gtggttcaggcgcagtgacggcctggtcattctcttctcccaagtcgcgcactaggcacctcccggtgactttttgtgcgccaaatgtcctgccttacccacttgacgttcgccgacatgcggcctgcagccatgatcagctgttcccttgcgcgtgtgtggacaggggtcaagacttgaagatgtctcgcattcctcaagatatcgtccagttgtttctgggagataaaaagtgtttcgttcgcctccctgaccttttgctgtataagcctggttcgggctgccatcaactcttcggctgcacccatgccagaacttggtgatgcgggttctttatccgaagaaaaccgggacatttcagactgaaacgagagccgacgactcattcggttcctctgagcatcgtatttggtgacaaccataccctttgtcccaacccctgttgtgcgaaatgctgcagcataattgagttttgctagccagtcgttcatatccgcctcactgttggctaagaaaacctcttcgagtgagttggggcgtacaaagaggaacgcatgcttgtgtttcttgtagctggaatctaacagagccacagcattgtctgtcgacatcatcgaaaccggattaaaatcattaagtggaggtttgaacaccacggcccgccggcgaccttctttctgatgggcatcgcactgagccatgagggactttacccaatttacatctttgaagaaataaaggtgcgacaaggtaagaagggcaccccattcctgccaaggggaacgtgccctcttcttctttgggtctttacgccacagcaatccaactttggccactttgatatccactaggccagggttggaatcagcggggttctccatgctagctggcatgaatgcgtcgggacgggaccgtgcagagacaatctgcaggatagctgattgggcaaaagctcggtgcaagctcttaatatccgctgggcctgtagtgggattacagcagtaaggatcctcaaggttcataacgtccctgagacttggtcgtagggtgtctagtttcccatccataatcagagcgtatggatcaacgggctctcgggtcgcacgggacagattctcggcactgggaactcgaaacaacgcctttttaggttttggcaaatggcgtgtgccgaggttggagtcttcaatgcgaatgaaaggtgtatatgatatgttctcgtagaagcattccaggatatcttccgctacgccttcgccgcgcgtgttcttcacataatcgcctttttgcatcttgcgcttgttattcttgttgaatacgtctgtgtgcaggatgagaatggagaacgcgatgaaatatgcttggtctaggcagcgaatcagtacgtgtcaacttgaaaaggtcaagaactgaggcgttacctgtagacgcgaagatgcccggattacattcatgatatcggtctgcaaagctctgcaaaaaccgatcaatctgctgcgtctcttttggcaactcaacttccatcaatagttttctgattgccatatcaatagggtctccgaaaaaagagaatcctcgcataaacttccgtaatgcggttttgtaaaagtcctcgcccgattgagaaaggaccccggcaactgcgctcttggggatgttctcttctagtcgtgcaaggtatgttgcgggagtgtcaccctcttcccgttttggataggaaagaactttagtgagaggtgacgaagtgcctttggtaccgctaggtgagctattcgttcgaaaatagcctggctctgaattttgtctcaaccgctgactgatgctaaaaatatcaccaaagctcttgcggccggtggtcgagaaggatgttcggctagatgacggttggttaggagatgggtgcggatcggtatcctgtatatttgtgaccgagtccagcgtggaggatcttgctctattcttgggaagaccctggttgcggccacctctaattgaaggtgtagaatgcaccgaatgcgcagagttagacgaatcctttcgaatgataggtgggcgcgaggctgataaaccagcagatgaccgagagggtgatggcaaaggggatacgtggtcctgcccatccgaggcgtcagatccccgagttggcccgtcaggaacggatctagactgggtcaagcccggtgtctgcccattgtccgcggtgggttttggaggcaatgggaactgaacgcgatttcttttcaggcgtggcatgcgaaatcgtttggtgccggaagctggccccccgagcggggaattcgttcgagatatctcattgttggttgcagcgctttggtccgatcgagaagactcggagaatcggccgtccaccacggaggatcgataggagccgtttggtcgatcgcgaccggtacttcgaatggacgtggttgaaaggcgtcccggctcttcagcactaaccctcgatgctgtcaatgaagtgtcggcgctttgtgaccccgtcgagtcctgggatcgcttggctttctcgttgcggacggtttgctgttcagcgtgtgcttccatggacttcctgggttcggggaagatagagaatttgttctttcgcttcacgggctggtccaattcatgactcgtgggcgcggtcgtgattatggtaggagctgcaatgcagaagaaaaataggtcagcgattggagaggttgcgacaaacttgtgacgttcacttacgcggtatgttgggtactggcggaacttccgttcccgctttagcataagatttagacagttgagggtcagaggcatggcgaagtctcatgagactgaaccggctcccgctgcggttcaatgcttcccgactagagttaagagcattagggaccctgctcttgagcgaggaattccccggagcgggagcacgattactgccctccgattcagcctggccatcagcatccagccctgtgagattcggcgagcaagcagaagattcggagatgcggggcggtaggtttgtcgctgagagggtcgaacgagccagctgctcgctgtgacgggattgtggatcggctggatttcgtttggattcgctatcatataacgcgccgagtcgtaatcctttccaatgcatggcgatggcgaagaagagccgagcctggtcctagaatatcctgcagcgaggaatgtcccaaagacccataggcaattccattcacatccgtctgttcctgcggtactgtagctggtggtgaagtgcggtgggtgcgggaatgcgttgggttcggattggatcgaggaaccaccattaattaggagtgcttgtcattgcgaatcgaaaactgggagggatagagacagttgagccgatagggaggcgagagacgaagctgacgatcaaagaaacaggagtgaaaccgggcaaaaaggggcgaaggggtacgggaaagccgacccaaacgaaaacaatagacgcagcggttccagaagcaatggtaatggccaaccacctagagctctattcacatttcttgaccgcagaatcgtggagagaaaacaggctgataagacgcgcagccgacacagtgaggggagattagacgggcctggaggatccagggtacttgtgggatagcctgggcgggaaggttccggcaactgaaataaacgttcttgacgcggggtaaagatgaatttaggccggagaactgtcgagcacaaagatcaggcgacaggaggagttcttgaggggagcgaggagctgagatgacgatgcaggatgatgatggatgagaaattggcgggccggcgaacaggcctggcagtgtgggcgaggcacgtgtgttctgggccgcatacagagcatgcccagtcagaactgcaaatcggtcacgaaggaattcgtaagctcgtctgctgcccacaggctggatgccaatcggggctacggagtaatggtgtacaacccatgtagatgatgaaaaggctgcgtcgtggtggaacttgatggatggttccatttcgatgaaccacactgctacaaagcaaagaacataggagcctagtccacagaagatggggaacacaatacacaaatcagagatatagcattctggagaaggattgacactctaataaaagcgtgagcccgttgatgctcagtacagtacctgtagacaatgacctgttagaactgctgaagggctggtgcagtaccaaaagcgcggtgctattat

SEQ ID NO: 4810 - DNA, 5350 bp, Emericella nidulans
  unsure (1)..(5350): unsure at all n locations
tcagttcaggctgctgtactagctaccgggacggtggaggcttcgtctgttaagtccggggtttcgtagatatcgggagcgagatcctgggcgagtcagctaagaaaaaggtacattgctttgtaatatataagcataccaggtccgggagaccagcatattttttgttgaaagccatagctagaatattgaaggatcttagttgtcctatccttaattgtatggaagcttgtgtttgggtccagaccacgtgaaaggggaagtttgggccttgttgcctggggcatcaactccactctttccgccgaggggtaaggaggagtagcacagcgatccccagtaaacatacaaagcactcaacatcattatcaggtcatctcgtaacaattcaatgctgtcaaactgttcattactccttgggaaccttgctctgttacactagcgctggaatttcaattcatcacatgtcaaagatgaagacagtaaatcccttggcatcaagcagtacggtgtccgcagaaaatgagaccaggacaacaatagctatatgttcagccatgccaaatatcaagccttgtctgaagcatactcccagcataccctttgtagaagcttcctcaatgttcagagctaagtccaattcagagctaagtccaagggcatggaagccacatgcacgactaactagccaaccgaggcctcgaagcggcggggatcttcgtcccgaaccccaaagcagcagttgcggagacgcaagcaatcacattcaccgaagattcccagactcccaggctatttggtccagtacacgacgtgaaactgcaaagtcatacctagctcaggcgcgagggggtataatttcacggaccacctccacttaagatttgcaacaccgattcccctcccccacttcaagacctccctccaacgtaccgtacttatacgttcgaagtctcagctgtacgaacctaatcgagatactctgaattcctcattcaagtcgtcaatatggctactcctactgatattaccttcgaaaattacaatggcagctggacgatggtgcgttgacttgactacattctgtaacccctcagacctcctcgctccctcccagtcacccttcagcaggaccaaataattaggaaagacttactgataatgccttaacaggatcgaaccatcttcgaccctaccgaccctatcctcgccatggttcaaacctcccttccccctcctgctacactccttgtccacgcaccctaactaactaacccttatagcaaggcctaagctggttcatgcgcacaaccttagctagggtaactataacgctgaacacaaaacaataccaagacgccgagcatcccgacgacaagacaattcagcacattgacgtcgacacatcgtgactggcggtgtccaaagaaccagtgaggcccgcgtgacggattggatgaagcgcgagcacaacgatacgatcttctgccgtgtggagggtcagtccacctcatccgcggctctgcgaaggacggtaaggtgaggccagatgtggatgtttgcacgagaatccaggatgagaaaatcgggcgttttctgcgaggcgagattggtgcggatggaagcgagacggaggggttccttgttgaccctgcgggtgagggatttggtgagggagagggcctttggttacagagttgggtggagagtgtggattcgacttggacggctgagcaggtaatttggtctcattttgttgctggtgttatttgagttgttggggctaatgaaattatagatttggggctttgagacgattaatggccagcgctaccacactcgtcgggtagtctgcgccaataacggcgaatatgtccttgctaggctagtgtatacctttgttcctccccggaatgaggacgaggacattgcttactaggctggtcacgacgagttctatgtataggtggattctcactttagagtgaatatactctgtgatagcgttatatttcgcagtctcgaatttataaacttcgacttgggtaagttaagttttttcagagaactgatgatatagaaccacgggaatcgccgaataactacatatagaatagaacaaagcagtcaattggtcatcatgcataacctatccgaagcaccgtataacatgagatccattggcttttttggacttatgagtgtgtaggcatcacaacatgagccttagtactgacggcatcctcagcgcgccacaagctcgtcactgtcttctgctgggtgtagaactggagaccaggcttgccatagaaagtgttggcaccaccaccggcaatactcttcttgttaccagtgaaggagaacataggaagaggaacggggatgggaacgttgattccaacctggccggcttcaatatccttctggaatctggaggctgtagggccggagcgggtgaagatcgcggcaccgttgccatattcgttcttattgatgagctcgatcgcgtcatctagggtctcaacttcaaggcagacaaggacggggccgaaaatctcctgcttgtagcacttcatccctggggtgacgccggtgataatggtgggaccaatgaaattgccattggggtacttttcaggcttgtaacctcttccatctaggaggatggtggcgccctcctcttctgcactagcgatcagatcctcgatacgcttcttgctctcaggactgatgacggggccgaggtcagcgccctcttcgaagcctccattgacattcagcgccttggcacgctctgccatctctggcagccactctttggtttcaccaactgtgaccagtgtgctcagagccatgcagcgctgacctgcagcgccgaaagcagctccaacaatagcattgatggtctggttcttgtttgcgtcgggaagcacggcagcgtgattcttggccccaaggttggcctgcacacgcttaccattggcggacccgcgagtgtagatgtactctccagcacggttaccgtcaacaaagctgatggccttgatttcgggggcatccaggatgaagtcgacggtcttggcagatccgtggatgatgttaataacaccgggagggaagccggcttccctggccaactcggcgaggatcatggccgctccagggtcacgctcggagggcttcatcaccatagtgttaccggtgatagtagcaataggaatacaccagagggggatcatagcgggaaagtctagactcattagcgtttgccataaaaagacgcgtgcgggaaaacatactgaaagggcagatagcagcaacaactcccaagggctccctgtagctcctggtctccatgtccttggcaacttccagaacctcaccggtgatctgcgtggtaatgccacaggcagtttcagcgacctgcagaccacggaggacatcacccttggcatcagcaaagtgtcttgccctgctcgagagtaatgcgacgcaggcaaacttttctcagttggcacggattaagttcacgaacttaaacataatctgctgcctagccataatactcgtagccctccatgcagggaaagccttctgggccgcttcgacagcggcgcggagttcctcatcggtactctggggcacacggctgacgaggctattgctagccgtgtcatacaagtcataccatgtgctcgcctttgacggcacgaactcgttgctaaggaagttggtaatataaataggattgggaatggcttcatgggctcgagggcatacgtggcggtgctagccgcggatgtagatgatgggaccaactgctgagcagtagcatgaagtctgcgaagcgcagccatggagccgactaaaggagtttgtgatgcttttacgcgagaagaagacatgcaggaggttgaaagagagcgcgatgctgatgctgctgctgccctggcggatgaaatgctggccactgtcgtgcggggagatgcagcgcggagagcggggatggactgggtaagggaccgacgggcggccatgttcaaagtcaaggggggaatataggagagttgggaaaggactctcttggggatagtcaacctagtgaggaaggagaaaagcgaaagtacaagggagttcacgggaggaagctcgaagcaggggatggaatggtaaagacggtcaagggagatatatgtacctgtatcgcggtacgttacatatccgagtgtatcttccccgccaggccgagggaaaccgataagacctcggcggacccagccaatcacaggattctattcttttaggaaggcgattcctctggatatccttaccccggaatccagccaatttgaccatggtcgaactggaaccttcaagccattcagcagtaatggaaactaacnagctggtcggttcgcatgatcttctacatcgattgtgtatgtctaccctggtaccgtgtcctgacccattgtaatcggccgatttcgtctatcggtcggaaccccgacctcttagttggggtagccccagtctcgcgtatcgcctcaggaacgcttaaggacggtatgtagattaattgcactgacgataggctattgaaaacaaatcagctattttacggaagacaagccgatttattgcagagcaaattgctctccctttactattgcccagtaagacctactcagagtacaaacgagcttggcggagacttcccaactctttcccaacccgtgctgatcttcattttcaaggtttacgtgagcgaccacaggatagcaattatttgcttattcaatgactagttctaaatcaataacatattatctgctgtcggtttgattccagcatgacaattgaaggctgaaagctcgctggtcaaatttcattgtacatatggttcattctcatagaaatatcatgaggacaggatagaattcttacttcaaagaatactgcaacagctatgaaaccggatggatattatagcgcttcatttggtgccgtgctttactgttttaaaaaactctttgcgatggtaggctcttttcactcatactggtcttactccgcagacgatcgggtggtgcgcttggtcgctccgcccttggcggtctccgcagcggagctgacagcttcgctggccttctcctttgaagctttggcggcctccttgcccttcttgacgggggcgggcgcggggctgctggctccgatggcaccaacaataatgaggatcatggtgacgagaagggcaccaaggccaccagcgacctcgggaacctgcttgacggcgtttatggggtcttccttggcgaggccaacggagtggtcaacactaccacga

SEQ ID NO: 4811 - DNA, 2293 bp, Emericella nidulans
catttgggtacatcgagtcaacgacatctagttcccaacttcgatatcgggctccatcgttccaccagcgacgaaattgcctgtcgcgccgccgttctcgcgggattttccaacggggaagtccaaccattccaagcacagcgggatagccggtagcatgatatcgtggtgaacgtagagattgtccgcctcgtcctcatagacataaacctcgagtgggctacctcgtcctcgaccttacccgccagcagcaagttatccgttggaagaatctgtagttcctcacgctcttcgtcctcctcatcctcaggaacaaccaggtagggatcctcctcattgggttgatggtatgcaagcgactttacgttgccgaacatggtaatcttctcgccatcctcatccacctcgtcgctatcgtagtgctcgaggtcatattctttcaggtcgtcatcgtcactatccatcaatattagcaccaccaaagctgtcgacaagcacgttgttttggcttcttacatcttcacaggagcatccttcttgttgtccttctctacattgtcctcctccatagcatcctcatctttgtccacaacagggccattaccctgcgccgcgctcaaatcctcgcgtgcatcttcaagctgcattcgcgcaagttttgatatgcgatccatctccttctcatcaatttcatacttggtcggaaactgggctgcgacgccgcgccgcacccaagcggaggtggtaatcatagaggacattgggaaatagttttgagattcagcccaacaaataaatcagataattaatgggctcgacgcaggtgcacaatcctgcagcaatataatgagaagctgagccaagataaggctcgaaaatgctttttattttcctccacacctttggggagatcttgcttcccgtatgtttcccgtcgattttttttttttgagcgggacaccgtttgatccggcagaacagctcaccggaaatattaccgccctataatcagtccactcaggcgtcggatctatccaaggcaaaatggacgcccggccacagggaatgaaccctcgatttcaacaaaaacaagataatcagttgccaaaatgcattcgcatctccataccccatacaacattagtacgtctcctgatatctattgttatcaacggcacttgggcgctggctaatcctagcctccagactgcgaggagatcatgactgccctcgacgaatgccacgcaaaaggcttcctgcacaaagctctgggaaattgcaacgatatcaagcgcgacgtgaacaaatgtcttgctggcgagcggtatgagcgcgcaaagcgcaatcgggaggatgcgcgggaaaagaggaagcgcatcgagaagatctgggcggatgagagagctgctgcgctaggacctagcgcttgtgagggtactacttctcctgctgctgctgctgctgctgctgctgctgcgggaatggagaagcagtgagtggtcgtgatccgatgttttagaagtgatctctctctcactcttctacaggggtctctggatatggatgtgtatagtacttgcatccgttgggtgtttgggtgtctttatccatcaattctactatggtatctcttctcagcatatcggggctgatgattgttatggataagaatgtacgatactatgtgctgtatctgatactgattctgccgcactcaagcagtcgccataccgattcgaaaagttgaacaggaagaaaggttattttgatatggcacatcgactattggtccgtcgcttcaataggcgcggtagtagtcgcctcagtctcatctccaccggagtcgccctgcttcgcgcctttatggtgtcgccgtctcctctttggctttggcgcactctccgtcctctgctgctttctcagagtcccgtttctcagcctcatcacgtggccgttccctctctgccgtagctttctgttcaaccctcttcttcggcttcttcacgctcaacggattcggccccttcgctttcttcggttccctcttcttcttcttctccccaccatctgggccaccactcttctgcacactctgatcagtcaaccccgtccggagtttatcctcctcaaccccctccctaataccctcagaaggtgcactcatcggctctaatatcatcacagaccgcttaacatacacgatcggcacaccgggtatagagcgcgcaccgctcgaagcgcctgcgaacgctttcaacgcctgtaatccatcatcggcatcccgtttacgctt

SEQ ID NO: 4812 - DNA, 4828 bp, Emericella nidulans
cagggattataacgaaggcgggcctagctaccagagccaaaggcacgacaaggaccataccaaaggaagcacgcaagaagaagcaactccacaagagggaaacaagcctgacacggtgggtagcgcagggctgtgataaatagatctccagcgcggggaggagagcggatctcgcgaaggcgccttcacacccgccatcatccgtgcagaacctaatgcaacattgcgcacgccggacccaaatatccctgtccaagtgtcctgcaaatgtgatcattggctgcgaggaggcaggcgcttcgaacaggagggtcttccctgacgctgagaggcaggctgggaggtgcacaaagcaaccaggcagatcatcacaccaatcatggccgggaaatccttattgtgtctgcaatgaaccgcccaaggaagttatggtcccagtcacttgaaattgaaatcgctgattggcgtgatgaacgaactgcaagcgccgagcgaactatctttagaacgaagccgctgtcggtcggcgaagagcacagacacaggcaacctggcaaattttgggctcgaacccttgacggaagcgtcaattgagtcacctgaacatcgtgaccttgtccaactggcgaaattactgattctggaggattctgtgcagtcagcagacaccacgacggagtcattaggggtctttccggtgtcggtcatgcacagcgacaagactatccccaagttgatgagaatctaacctccaacaagaaagcaaaggaagatattccacaatcggttacctggtaattagcatggtttgatgctgtacccagagtcctaaatgatcaagagatgttaaggacttgagatcaacgaataccgccagcgcggaatcaggcagaaaggcgaggcattgatggggacgaatctaggcttgtctgccccacttcacttgtccacgtgcgatgcttggccctagcccttacaggcaagctcttcttcccaatcgggctttccggagtgacgtcgccggatagatttaccgatagaaaagtcggtgatatcaataatcgctggcaactgggcctgcgcgggagaggctgctccgtagacaaaaatcataatagcataataatcgaaaccctccactttaacattcctctaatttacatttcgccactccctactcagtgctcccaggtctatttgcttgtacctacttcatccggtcagcggtctagatctaccaaagccatatccggactattgtccatccacacataagatcaacacaacggcacaatgtctcccccagcaataatcgccccctctatcctcagcgcagacttcgcaaccctcggcagcgaatgctcgaccaaaatctccgagggcgccgactggctgcacgtcgacatcatggacggtcactttgtgcccaacatcacattcggcgcgccagtggtgaccaagatccgctcgcatgtgcaccgcccttcgcagccgcagggcaaagggacgtttgattgccatatgatgattgcagaggtacatccttaacctcacggtatactcagctagagacgaaagctaatataggagcaacgtagccgcaaaaatgggtcaaggacttcaaagacgccgggtgcgatctatattgcttccactacgaggcggcggtttcttcagtcgccgccaaggaaccagctgataaggagacaacgcgcaagacgagtcctaaggagttgatccgctttattcatgaggaggggatgcaggcagggatagcaatcaagccggatacgccagttgatgtgctgtgggatatcttagctgcggatgatgagaaggagaggccagacgtgagttctctctgctccacttcactttcgttgttggtaaaccagacgagcgtgagctgacagctttctgttactagatggttcttgtcatgaccgtgcacccgggatttggcggacaaaagttcatggcctcagagcttcctaaagtcaaggcgttgcgtgagaaatacccagacttgaacatcgaagttgatggtgggttgggccttgggacaatcgaccaagcagcggaagctggtgccaacgtcatcgtcgctgggtcggctgtctttggcgccgagaacccaggagatgtcattcagaagctgcgcgatgcggttaacaaacaccgaaaagcgtgactatctcccggcgagatggccggaagtaggttataaatttcacagcgagttctgaaagcatattatggatttacgaccgatgttttgtttgttgcgaatagcaactttcataaatactacagacattccttgtgctctgcacaacgctttctaccgagttattgtacagtagtgtccgtgaatttgcaaaacttgattgtacactgatcagcccgaattacaaccattggaaacccgagaacagacccgaaaatgcaacaccgtggtatccgtacatagcaaaacaaacatgcatgccgagtcgtacatccgttgatcattagcagcgaaaaaaatagtacacgtaagggggctgtcatctaaagtgcccgctagccctccaatgcatcttcgaccgtggcctcggcggcgagcgtggccttatgctcccgcaacgactccagagcgggattgtgagtccctgaaattgacttgcgcagctacttggccattttctccgcctactcctttgactcggcggcgatgtttgaatcacgatgatggttgatcagccctaaagcttcagcgctatcagcacgaaaggtggcagaagacttcgcagcacactcgggcaccaaaggcggccggtttgaaccatactctgcgatttcagaaccgcccaacatgcgacgtacactttgttcgccacctccctccttggtttctgcgcctcggtcagttttagaagcaaaggtggaggtggaggtctggggtcctgcggctgttggcgcgctgggtttcgaggcgggttccttggctttggccgcggcctcttcgccagcttggcgaagtgccttggtgactgaatcgtcgacttgggattttttgtcgcggggctcttggatcttgattgtgcttgtcttggaagctggagcatcgaccttgggtgcagacgcggaagtggtgctggattcggcgacagggaggggtgtgtcggtgccgggacggtcgtcgaagggctcaacgctgttaatctgcatcttcgactcgccgaattcattccattcttcgatctgttcaaggtcctgagttgcgtcctcgtcagcgatgtttccaagatcagagactcaacccccgcttcgccatggaagcgataggtcaagaacatacgccgacaacagtcccgtatttcaccagtcctggcagtttcttcccccttgaacgacgaccccaaagtttcctcgcggcttcgtcggtagccacatcaattgcgcggaaggagatcttgttggctttgaggatggtctccaagcgcgaagtggcggtgataatgtgggaggaccccgcagtaagggaggtgtaaagatagagcgtaggatcggacattgtagcaagtgtctgcaatgattcaaggtgcggtagtagcgtttgtggagagatcaaatgtagatacaggaaaattactagtagtgtaagtagaaaagcaatcacggtcataaggatcgtggtgactgtctccaactgccttttctccgccggcttgtagctcttatgacgtggccgtctggtcacgtggcgatagcccaccttcagggcttgtcaggtcttatcgatgtcattgtcgaccgcgaaatccacgtcgatcattctgcaactgtagttgccacatctcaggccagcaagacggctttcataacactccacccccatttactttggattcaaggggtgtaccactgatgttggcagccaaccttgacgccgctgccatcagacactgcgcttcattcgtgaaccgtacttgagcggcggcaggattcaactgatcggagatcaatccgtccagtatgagggccacccgggaccgttcaacttcaggcccaactttgttgggtacacgatgaagtaattcgccacagccaccaactttcagccttttgtactgtactatactctgcgctttttgcacgccattacgccaaccatgcactgagcatgcggaggaacgattctactggtgggctactctttataagggattatctatcagatgtataggtataaccagcttttgagatggccttctagcaagtagttgactgtgcctagtgagactccactctactccgcgtctggacaatagagactaggtctcatctacactccatacctccttcaacttgctacagagcttcggacgacctgcaaactacaggctgcaggaacctcgaatcttcagtgtcttggatctccatagctaatataaatctgtgccgtccatcttaagcctacactcgattgccggaacctacatagattcggactgtcccaagttatcaacattgttcgacgcccactgccttaggtactagcaattacgagagtcaacagcgctgccacaatgcttgcgtgattggacagttctgcgtgcgggctgagttgaagcactgtaatcgttgccggcattgaactgtggagctagcctgatggccaaaaggtcttcagctgagtattacgcatacttggtgagttaagaactgctgaacgcagttcgtgatgcattttatgactcgctcttggtacccctgaccggagctagtgcttgccagcttggaaaccacaaccacggaaacataacaacataccatgtcggcgcag

SEQ ID NO: 4813 - DNA, 4533 bp, Emericella nidulans
aggttctgcgggcagcttaaactccacgcttcccgttgtcttagagtcggatgagtctgcggtgtcggcacccttctctttctctttcttcggtaactgtgtgttgacctcgatcgtaacctaacaaggaaacaccgttagttctgccatcatccctttgagaaatccacgagagacgcgagagctaaccgccgcatcttcactgtggtagtcgacacccaccggcccgtcattgataagttcgacgtccatcatcgcttggaagacaccattcttgactcgctctggtttatagttctcgccgaggcgttggtagaagtaatcgtataatctacgcgcagtgtcggcgcttgcggcttgatgaaaatctggctgtttgcctttcttcaactctccaaaaagtgtaaattgggacactgcagaacatcagtagatcgtagcagggtgatcccgagagacataccacaaagtacttcgccatcaatatcttggacattccgtttccactgtaggttggccattagcgtagtccatacccagacccgtattacttgcctgtttgtcattctccgccgggaatagctttgccttcagtatccggttaaccattgtgtctatgtccttctccgtgtcttctcgaccgactccagcgagcacaaggagccctcgtccgattttggagattagctgaccatcgacggtgacggaggctgatttgactcgttggatcacggctgcatctatgttagatagttgagatgaaacatgatgctagtcttgcacctttcattattatttggacagatgtaaatcttgcctattgctgtagccattatgcatgttagccggcagccgcggggaagcagggcagacttctgtagagaccaccaaccgagtatacaaacaattattagctaattcagctaagtaattagacgtagcaaactgctaactttgacagcattaatttaactcggatggagcagtagtagtacgtaaaaaacacagtccaagctgttccccgcgcaaggcttaaacgggcaaggctgaaaggcagtatatgtgaccgccttctcatcctggcatatccccagcttcgtggccaccgcaaagagtaatggaacattcactggccggtggaggcttttcatcattgtcacgataacacttctgctggaaaaagttgctggacaacccacgttttctttttctgctcacctattactgatcactccgttcagtaccattcctgatttctcatcgagcagcagctgcggaatttcatctcttggcatctcgattcgcatgaacagcagacagcagcgatgacgtccagaaagacgcagcaggagatcgacaagaccttcaaaaaggtcgcggaaggtatccagacgttcgaaggaatctacgaaaaaatccgtgccgcgacgaatcccacacaacgagacaagctcgaggagaacctgaaacgagaaatcaagaagcttcaacgatatcgtgatcagatcaaatcatgggcgtctggcaatgaggtcaaggataaaggacctttgcttgagcagcgaagggccattgagacggtagggtgatagacagaggaaccgttcctagctaacggagagacagtgcatggagcagttcaaagccgttgagaaagaaatgaagacgaaagcatattccaaagaaggcctctctgccgcatcgcgactcgacccgaaagacaaagagaaagtcgagacttgtgatttcctgtccaatatggttgacgaactgcaacaaaaaatcgaggcaatggaggcagaagaggagtcgcttcaaatgtcgatgaaaaagggaaagaaagatgtcaccaagaccaatcgtctagccgatcttgcgcactttatcgagcgtcacaagtggcacgtaaataaactggaactgttgctacgatcacttcagaatggcaacattgaaacaagtcaggtggtggaccttaaggagagcatcaaatactacgttgaggacggtaaccaaattgactacgctggtgaagatgagacgctgtacgacgatctgaacatgggcgacgatgccgaagcacaatttggaataggcggtgacaacgaccgggtgtcgtcgcaagacactcagtcaatgcaagacgaagaggttgaagccaaaccgaagcccaaagctgaagccagcgccactagccaccgcagaccttccgctcaaatgaaatccccgcttccagtccttgcaacactgcatccgtccagctcaagcagctcggcgtctggcatgaagcctgccccccctcccacgcgtctgcccggtgaaacactcaagtatgcttctgccgctgctgccgctgctgcaagcgacaagaatggtgttggaattgcccctctaccgcctccgccaggtgctagccccgccttcccatctgcagtgcccgcctccaaagcttcctctactgcctcacctgttgttacgctagcacagcctgtgccaaaagcaacacctgcagctgcgatagtcgcagaggagggacgctcgcgaacgccagctttcagccccaaggtttctgctgccgtcagcgcatcaaatacggtgccaagcacgcctgcgatggacaaggcagaaaccgccagtacgaaaccacccgctgccgctaatggagagtcgaataaagagaaccaagcaggagaagagtctatctaccaccttccacccggtctgcaggatttaatccattcgttcgaagtaaccaaaaatcgtgcatcggcaaatccctcaagccagccaccttcagtgcagcgcctactcactgcatctgcagccaattgcccagaaccaggggactcagagaagcctcgtcactacaagccccagaacccgtacaatacgcctctttattacccccaggagccactggccatcttggacgatcccaggctgtacgagacagggcggatcgatacagatactttgttctacttgttttattaccgccaaggatcataccagcaatacttggcagcaaaggcgctcaagggccagagctggagatttcacaaacagtaccagacgtggttccaacggcatgaggagcctaagacgattactgaggagtttgaacaaggcacctatcgcttttttgactacgagagtacttggtaagttttccgttcgtgttcagctagctcgcttttctaacagcctacaggatgaatcgtcgcaaggcggacttcaagtttatttacaagtacttggaggacgaactgtgatctggcttttacgtttactttcctgggtttgaagggtcctgttttgctatcttcgatcgcgagtctgcgagtgagacggagtacaagcatttcttttgtttctgtatgggtcttgatgggtccaggaacaggtgttatcaatgggtctgcgggacaggagttcaaacgctgttctttagtggcggctgatggcatgcagccatctcttgagctgctgcttagttaaccaatgaatagacacctttagaggaaaggatactcgttgtttttccccccgcagtaggttaaagcagaatgtagggtcttatacgaggccgtaagatcgaggcattgatgtggctgtgaacgttgtcacaaagaacaaagagtcaatgcagtacagaagattgataaatcaatctcagacacgactcgtcggtaggactatcggtttagattgaaacgaaggatacaaagaataccgttgacaagtatatttcagataaaaatagaggatcgacgtgttgtttatttcgaacgctggtgaagcgatgcgatagcgtgtacctagtttatacgaaactggtcgcggccggcggcgaggtaagtttgcagacggactggtgaaagattaacgtttagtgtacgccagactcgatgaagctggagcacgatcataggtgcgaccgctaatcgaagcagagtcgcaagaatgcaagtactgaggatagaagagaggtgaggtgaggagaggagtctgccttgttcagcctccttccacattcagaccgctcgccttccttaccgaccactcagctttttcacagtccgacacttacgagcctcgacttgtccagcctccatctttattcatcgcaactcagtgcgttcatgagatggacaatcaggttatgacgaaatacaaggctgtccggtgttttagtgcggatcctcgacgcccggccggggaaatcgtgccgtgtcagcgataacagtacagtgtctgcaaagaatctccgtggaagagtgaatgttaattgtacgatgggtcgtacttttacccaccggcaccttccgagagacaaatgagaatcagcaaatgatggtcttgcacgtttcgcagtgaagtcagtccctgctccctctaacggacctgttcgaggcccaaggctgattggcgcgccagaagactcgagccgcattgctctctcgacagccaatacggagtacgggactggaaagtcttagacgaactctgctcctcaatcctcaagtgacagtg

SEQ ID NO: 4814 - DNA, 4543 bp, Emericella nidulans
gttcgcttggacggactgatgaggccctatatacgacacctctttcttcatcaaacataatcatggttattgctttcgagggtacttttgttcttttttgtcataaactagtcagttcatctgtaatacgcgtgtagtggatccgcggcctgtactctgcagctgtataacccataagtatacacggcgattcctattatacagactgatgtttgcctcgtatgtctcatacgttttacccctgttattactgtgcattaaatttttcttctttatggattgttgtcgccacacggtgcaccgccacagccggctggcagcttggcgtctcgatcgcctccaactttctcccggattccccatcgagaccaccaccaagtcatggaccctcaagcggtccgcgaataccagctcatggagcaaccggacgtgggacatatagattccgatggatccggctcatctgatgatattctaaatcccccatacgttgttcgacccgggccaattgtcggcgaaccctacgacacccaaatggcctcgtccaacgttggcctcccctcctctccccttcagactcatccttccctcagttcctgggcccctgctactccagcacgtccccgcggtgctagtgttggcacaccagctttcgataagatgtcttcaccagccgtcgaaggaacgccactcgttgagcgcgagctccgaatgcaacagcgccctagtcaccctgccagaactccttccaatacttatgcaccgcaacgacggcctcccccatatattagctttcaagacgaccgccagcggtcgtcgtctaataagcgaactccgagacggaatccggatgctcagtatcgagcacaagagaaagcgtacgtccaacgcatccgtgaggatccgcagggatggtacagccggtttgaagataccgggatgggtgtaactggtgatgcctctgaccttgaggatccttcgccctcctcggaattgccgtttgaggatgatacatacgatcctgacattcagcttttcattgccgatgataaccagccttcaatggaggagcttaagaatccgaagaatcaggaacggcttgagtggcattctatgttggcttcggtgttaaaaggcgatgtcgttaagcaggagaagcagcggttacttggttccgcagagcctaatagatcagctgctcagaaccatgcaatctggcttggtgttcgagctaggacatgtggccggagcttgacactgcaacggaagctcattgaggatgcaagatctggtcttgggcctatcatcgaaaatatcatcaatttcgagatcaaaggtgagactgagattgggaaatcgcctatcaagcaggtagaggatattgttgagcaaattgggaaatgtgaggcgctttatccaacccataaagagcttgaaacagcgcatcctcgcgttgcttcggaagagtactgctcaagtcgcgatgctgtgttcgcctggcataacactaccattctgatcaatacggagcttgctattttgcagaagtgggtcgggaatgccgagcttgactttagcaaagctggattgaagcctgctaatagtgatctttccgatgaatcatcctttcttgatcgtatcatgaaagaggacggcctcaaaacccttcaaggggagcacaacatgctgaatggcattggggcggtaatccagaaggcgaagaatactttgatagagaacgcaacttccttcgccaaacgacatttaccaccttacattgaggaacttctcatcctcatcaacttcccttctcgtttgatccaagagattatccgcgttcggctatcctacgcacggaatatgaaggacccggcacaacaatcccccatcctggttgaccagatgattacacagttccagattctgatgagagctgccgtagatatcaagcaacggtatcttgatatcgcccgaccggaaccgggctgggatcttccaccctgcatcgacgaaagctttgatagtgtcgtgctcgatgctctgcgatactactttcggctactcaattggaagttgcaagcaaacaagaacacgttcaaagaggcggaaattctggagcaggaatgggatttctgtaacgaaatcggtcgtcagcttgatagcggtgatattgaagttgcggagcagtttaggtaaggccaacactgtcccacatagtgctattatgctaacttttacagtgtcttgactgctagggctatccatcgcttgctgattcattttgagcgcgagctgcacgtccaggaggatgaagacccggcggagctggataaacgatttaaaggtatcctggattcaactcgtattcggcaacggaagctttaccgattctctcggtttttgcgccaattgtttgaaaacgcctctgaatataatcttccggcggacatctcatgggacttcttcgaagccctgtttgtatcggatcactttcttatcaaatccaatgcgtcctccgctcagaagggtgtttattactttgcgcatcctgcgctctggaaccgtccagatgagattgcggctattctcggaacatcattccgtgaagaagaggtcgggaaagagctcacccatgtgccatacgtgcttgctgtacgtcctgaaaagccgttatcctgggcgggcaaagagatgcaggttgagctggttgagcaacccaccgacttgcggcttgggaagctgcgccttatcgttgagggatcacagcagcgcctagtcaacgcgaggcttgaactaactcacttgaccggcattcaactcgacatggccattgagcaacgtgcaaaccttagtcgtgtcaacgccgaactcaataggattaagaagatatcgttcaaactctccatgactattatggacagcgtcgcgattcttagaagacagttaagggagaaaggcgtggaaaacaccgaactcattcaggcatcgtacgccttcgcgacagaattcggtaaacgttcatcgaacgttgatcctaaccgacgtgcaatgaacagtgctagactggcagagttatctttagactgggtctcgttcatctgtgatgattgtgatgctgctgatcggaagaccttcaagtgggccgtggctgcccttgagtttgcgatggccataacgtctagcagacatcttctttcaatggacgatgcacattttgcacgattgcggcagaaagtggcgggctgtatgtcgcttcttatctctcactttgatatcatgggcgcacggtcttcacgtgcagcccaggctgagaagcaacgtatggatgaaagcgctcgttcctggaagattggcgctggccgaatccttactgacgaggaagccatgaggctcgttcgtgagcagcgtctcataagcttgaatgccatcgaggaaggtcgggttgaggcagatgccaaacgtcaggctctaggaagggttcttgaaggaacaaatgaggctgataaatctctcgcggtgttatcttcgtcggcgacgaacgtaacattacgttggcagcagggtcagtacatcggaggtggtacatttgggtctgtctacgctgcgatcaatctggacagcaattacctcatggcagttaaggagattcgtttgcaagacccacagcttattcctaagatctcgcaacaaatccgtgacgagatgggtgtcttagaagtcttggatcatcccaacatcgtgtcataccatggcattgaagtccatcgcgacaaggtgtacatcttcatggaatactgctccggtggatccctcgccaccctccttgagcatggccgtgtcgaggacgagacggttatcatggtttatgcgctccaacttctagaaggtttagcgtatctccatcaatccggaatcgtgcaccgcgacatcaagcccgaaaatattctgcttgaccacaacggcattatcaagcacgtagatttcggagcagcccagatttatgctcgtcacgggaaaactttttctgcctatggacgccctcggccaccggaggaataaagatggcattaaccctaaagacaaccaggtcgcacccaaccggggcaagaaccagaaaaccatgaccggaactcccatgtatatgtccccggaagtcattcgcggcgacaccagcaagctcgtacaccgccagggcgccgatcgatatctggtctttgggctgtgttatcctggaaatggccacgggccgtcgtccctggttgagcctggacaacgagtgggctatcatatacaatatcgcccagcgcaatcagccagcgctagcgtctcgcgatcaactcatcgatttgggcctcgatttccgtcgtctctgttatgaatgtgatcctatgaaacggccaaccgcggcggaactgctccagcacgaatggattgtctcgatccgtcagcaggttgtgatcgagacgcctacgccgagtagcgagcataacggttacatcagcagttcgaactcgggaagtcgacatagctcagcgtatatgta

SEQ ID NO: 4815 - DNA, 4485 bp, Emericella nidulans
cctctatcgctgatggctgccgaatccctctgattctacgcgcaaaccattcattgtcccacgtacttacgctggccgatttcgtgattgggagtttatcgtctgcccaaatctcgtcaattcaatgtctacactgccgcagccatcgagaacggcctccggccaccactgggggcagcagcccagttgccaatcccaaaatcgagaaaaagtctacctacatccgtcgagtctcctagggctgtttctccctccaaactacgcacaccttccagccccagaccgacactcagcaagtctccactttccaactcagcaaccaatatcagcgctgccagatcaactactgtggctagaactcccagcagtcctgataaatccttacggaggacaatcagcattgcggcatttcctcaacccccaaggcctggaagccgcccttctaccgcgtcatcaatgacggcccctcatggtctacaatcttctggaagcgtaaagtcaaagaggggctcgcgacccagtgcggggactactagccagagaagctcaaagacccattcattactgagcgttggagctgctgtcccaggcacagacatggaagcctcaccttcccagagcagaagctcatctgctgaaggatcttactcgacaagcgcgaccacatttgatgagggtgagccggcttcaactaagtcaaaggaaaccaagggaaatgtcatagtcagcgtaagggtacggccaaatgttggtggtgagagctcggcgaaccccgagtggatagtggatgctcgtcgaggtctacttgtatataatgggaaagagggcggtgattactactatggtaagacccctgtcctgtgagatctctgcgccagctaactgattgctagataacgttttctcggcaatggaaaataacgctcgagtctacgactcggctgccaagcgtttggtaaggagggtgatggaagggtaccacggcacagtctttgcttatggtatgaccggaactggtaaaaccttttctatgcagggaaccgcaacatctcccggggtgatccccttggccatcacggacatattctcatttatcagagaaaccccacatagggagtttttacttcgcgtcagctatctcgaaatctacaacgagaagattcacgacctcctttcagcgtccactgggtcttcttcagaggacatcaaattacgcgaagatagcaaacggggtgtctacgcaactcctttaaaggaggaaattgtgcagagtccgacacagctcctccgcgttattgcgaggggtgatcatgcaaggaggacaggcagcactcagtttaatgctcgcagctcgcgaagtcatgcagtggttcagattgttgtcgaaagtagggagcgagtacctaccggcacaacccaggacaggagatctggtctagccccgggcggggttcgagtatcaacactgagcctcatcgatcttgcaggatctgagcgagcggcagatgacaaagaacgacgaactgagggcgcacatattaacaagagccttctcactctgggaaatatcatctccaggctgtcagaaaccaaaggcaagacagctgctgacaaagatggcaaacatctgccttttcgtgacagtaaactcacgaggttgctgcagccagctctctctggcaattcgctggtcagtattctttgtaccgttcaactgagcagcttggttgcatcagagactctgaacaccttgaagtttgctgctcgagccaaaaacaatattgttagccatgccaaaagggcagaagaggcgtttggtggcggcggtggtgatgcaggcagccgcgtgctacttgaacgttaccgtatggaaattcaagacctgggttgtcagcttgaaaaccaaacgaaagcccaggccgagaaagagcttaagctggaaaaaaagaagttagatcaggaggctcaagagcgccacgaagagcagatgctcgaaatgcagctagctcggaccgcactcaaggaacgaatagagcatttgaaccgactcattctaagttcaaagtccacaggcgtcaactcacaaggagccatgtctgctcttggccggctttccagactgtcttccatagacccgggatctcggtctctgcgttcttctgtcagtcaatccactttaggcacgtccatgcggcctgtttcttttctttccgtccatagccaagaattccacctgagcaatgaggatgaggatacgattggggagtttgcggatggaaaggcgagtgctcaaagacagatagctgctcttcaggccgaccttgccgataaaaaccgatatattgcaacactggaaaggcgtttgctccaagctcggcgatccagccattctcgcatgtcattgggaataaaagcgaacagctctacagataatcccaacttcgtggcccagctccgagaaaaagatatggagatcaacgaactccgcctccagttggacgataaggatcgcatgctgacagctcttcgctccgctgctcgacaccgagatcttgcccagctcacattggataaccaatcgttaccaaaagagactagttctccagaccgagaaccgccgccaacctctcaggctcctgatcccggggcgaagcgaaagagtatggatgaagtttcgcggatcctcgatgagatgatccaagaccgtgttgagagtggacatctcataaaaggtgcccgtgggagtgttcgagtggcccctggaagtcgaagggcatccgagtcacatcaggctgcagggcctacaggtacgactccactaaacagtcgtccaagtgcatgatatgcttcttttgggattgctacaaaattgttctattaactggttttcatgacctctttctatctgtgactgtattcgcctttctttcagatacccagattgtattttttttattttattttttttttctcacttttctgtacctatactgcgccaggcgcaatgaccaaccttcctcgtattgatgcctaaatctctaaagtctatatatgaaagaatagtcacgtcaaaattcgtcatttgagcctattgatcgacctgtctcgcctctagacttttcttaagtttaattactgtaggatgaaggtttcctcagattccattatcaagacaaagaattatacagatgttttgtatgtttggacacgtgactccgataaagtcatactctaaacctctgacagtagaacactggactagatgtttaatcgtgcaatcaaagagattttcaggtagagtcaagttcagccaacaactaggccactatttcaatttcagaaacccggtctttggcgtagacgtccttccactcttcccacagcctctcaagttctctcacgtactctgaatggagttgatcaatatagtcgtcattgattttgtttctgtcctgttgctgaaccacatgaattggccggccgacaacaatattcagcgggcggcggtacggcatcaagccaacatcgtaattgaaaacaccgcgtgcatgaaacagcggaatggtgaatcccagtgtctgtttcaccaacatttggaacttgtgaataaggggatggctatctgaacggacctgttcgtatagatcattttctccaaaagccaagactggtacaaggtcagcaccagtgcggatggctagctttatgaaccccatacgtcgcttcaagacaagacgtaatgagcctggtgatgcattgagggattcccgcgcaccacctataacaatcgttatagcacgccccatgccttcgccgtctattccgcctttactgaggaggttttcgcatgattcgcgcgagacactagcaagacccattgaaagtgcgtactctcggtaaaatggtatccgaaaattggaatccagtgtgagtagcgtgtttgtgataccagggaaaagcttcgaaaaacgtagagcctcggtacagaacgctgcaaatgcgccaagagaaatgattccgtgaggatgatatccaaatacatatttccttgttggcaggagaggtgcagagcggtgtagacgggccggaaaataagaggcgtaaagtgaccagatagggagcgatcgtaaaaaatcactcctatattttaacgagcccgatgtggccgcattcgagaataatgatatatgaatcaaatagggtagcagcagaggccaggacagaggtatagcacaggtgaaaaaaaaaactccgagacatatagcaattgtcaaggtatggcataagacgacgagtgtttgtaaccgtcgctcgaagcggatattaagcggtgcccagtgaaggctgacccgtcagtcaaagaaagaaccaacataaaagcatatcttcacgcacccatacttttcataaccctttgactgttggttagatgttcccgactcgatgcctcggctcgacccagacgcaatattagaggtgtgtaac

SEQ ID NO: 4816 - DNA, 1421 bp, Emericella nidulans
taataccaaggcagacggggccccaagagggccatattaggatctggactcccgttcagtaaaagggttgaagaagaggatggaccaagggaaatattagagggtagtgcagcggacctgtgaaaaagaaatgggcgaagcaagccccctaggcttttcttttccggggcgttaggtcaagaatatcttcgtcagggcagtcatcttgctggcactgtggctttgactcgtcataggactgagtgcgagaagactgcgcgctatgggatgaagtagcttcagactgttcagtggaggtgtggccgcgaagatgctcgttcagggttccgtggcgggtgatgtggccaccgttgttttcagcatcgccagtctgggggtgcccagcataggaagatagagaggctttactgttaggccgatgggtctcttcccagcagcggttgaacttaaggctggtcatggcttcgggcggtgcatagtcggtgtccgagacgccgcaagtatcatccttaccatgctcgacagggagactgtcggaacgcgagcttcctgcagccaaggcgtgagaagactgtgaggagaacatttgggccgacgtgtaggaagactgcaaaatggattgttctggcagctgggagttgtcgtgacgatatccgtctggcatggggtatgggcgagaaagggtcccttgttcaagggtattgctgtggtgtctcacgataaaaggggaggacctataaacaaggggaacatcggatggtccgagacggtcagaaatccggcggccatgaggttcgactctggaatggaaagggtaatgcaacgcctcatgagcggcacgacattcctgggaggtcctattgccaaggccatgagcgtgatcttgaggagcttcgtcgttgctgatcccaaaacaagctgacaacacggtagggctcctggcctggttaacgtggtgtttcgctccagtctcggtttgggcatgccaagaataaaagcaagctctctgtgaacttcggactgatgacgctcggcagcggacgatcgaaagggcgaggaggtatttgttctcatgctcacacgcagggtaagcaggctcgttgatgggattgccatagagattatcgcctcgcgccatctggtccacgacaggacgaatgaaacggtcaccaatatcacggtttatcttgccaagcgcctcatagtctcggatcatctgcccaagcatgttataagtcgcattcagcagatacgacaaccgctggaagttcggaggaatgttgggcatatgctcaacgaggtagttgttgtacatgacatgaaagtcgtcgtatagccacacctcgaaaaattgctgaaaaatttcgaagaagttctgttcactgcggcgcgcgcgtttgaggtacctgtccggtcaatag

SEQ ID NO: 4817 - DNA, 2022 bp, Emericella nidulans
ggtatcttgtcagtgcccagatacagctggtatttttgacagcaatattgcccctgacagaggaagcacagttcctgcaatatattaagcatgaatgcagcaaggttggcatccattacatgcagacaagtcagtgcaatgttgcatattatgtagtttggctgttgctgccctgaggcatcccttgcaagctataccagtaattaatatagcctaatatatagggattcatctagtagtatatctagcaggccagtaatagctaggtaattgtatatgctaatatcaagagccaggttgatgccatcagctataagctaggctgtgaggtatactatagtactattctagaccagataggcatgatataatagttctagagtagccagacctgtattattgctgtgacaagtaccttgggtataggtattaatatcccaatatctagtatataatctatctaggttggccatagatactgcttgactatagccaggagagtaggcatacagggcataacagcttagcaagcaaggctgtcattatatacccctagggctgggataatcttaatctgtagattaactaggtattagataccaagttcaagcatgtgcaggtgtacatggaggttattaagggggtggggtgttgttagtatgtccttgaccagtacctggacaggacagttgacagatatatatgccagcagtgccaggatcaggatcctgacaagctgctatgcaatgcctgctagctggataggcaagacaagcaaaccctgatactattactattactatcaccagcagcatcagcagcagaatataatattaatataagtaaccagcccaataatccccctaatatataaaataggcctgttctgcttgattgttgatcttgatccatgtctgaaacctcagctgtattaatcctgtcccaagtgccatgatctgcagcagtagtacccttattcaaggcactggtacctcctgcagctgttttgacagtcccagcagatagcataataccagcataataccagcatgctgctatctggcagcagatggccactatatagtagggcttggatcacaagttccttaagcaagaggcctggcaatagctgcaccaatactatatctgtatagtagctaggtataacagcaattataagctgtataactgctgttaccctgatagccagactgccaaatagtagatagtacagctgtgatcctagattgactatatactattctactgttatttccagtataggatgccataattagtctgccagggctggcaggccaggcaggagtatctataatacagggtgctgatctcaactattacagggatgctgtacaggcctcacagggcttagatacagtctgcctggcagtgccatttggctagatagatggttaagcagcagatagtgtacacacagaaggcgtggtactaggtcaatgcccatgtagtagatatgcaggaggttaccttggtggcggccttccttgggcaggcaatagctgatagacagggtatagagatataggctatattctgctggttatagcaggtttgtcaggagtataaaacagcataatctgacagtaatatatcaagaattagttatatagagagtcatagcagatttattactttattatgtgtgtagacagatagcagaatagaattataggcaagaggaacatagaccaagcttgcaagtacaggctgctagctaaactataagagctgattaatactatgcatggtgctggtaatatattggctacatgtccaggtcatgcaaacctggtcagatgaacttaagccagctcagtctcatacaagccagttgtcagcataaacagtatcatgactaatagatggtaccaggcttaatacaggcattatactgcatgacctatatcatgctactagacagtcagctaaggctgtaatgtgcctcaaagcttggctgtacctgtagtattagatatcagt

SEQ ID NO: 4818 - DNA, 3106 bp, Emericella nidulans
aaaaaaccctcaatatagggcgcaaaaaactttggtggaggggaaattttttcaggggatccaattgagtggtatgttaaggggttcagcaacccgcaggtgggcaggtggccaagtcgataggcaggtcagcttagtaggcagccaagtttcaaaacccggaaatggtgtaaaaaggcttaacctccagggtgcatagaatcgaaaaaaggattccccttcccaaaagtattgactgggcggaaaagaaggaagaaccagttgggggggtgtttttgtgcctggcaaggttagccccgcgggttgaaagttcaaaaggttgaaccttttggaaaattcttatcttctaacctgatgaaatggaatgaaaggagtatcttgtgggcaggacccatatactgtacgcaatagatccaagtgagtgtgatatggggcaagaaccgctgaagatcgctcccaatgtactcccattgtactccaaatgtactccagagacgccagagccacctctatagatcagatcacccgctcgtcgacaagggacagatgagactgaagaaagtccctcggacgggcggcgggccgtagggccctaaggcaggccaaggggactattcgtctgtatgtagcgtgtcaaatgccagtagtggggtggctgcagcaagcctgcaaattagccgcagtgtcatagaacgcactgaggagaaagaggagtcgctcctgggcatctgccctttgacttgctccaatcactgtgcgcgaaatctcttctctgtgggcgtacgactggccgtctgtcttccccgagaatgagcgggctccccccttccccccatacggctatgactcgtagagagtaagtatggagaaagtatagagtaagcatatgcacagaaccttgagttttaatggacgactcgccgactcgagactagtgcgtgacattgcatcgactatagcctgaggcgccgtaggccgaggaggcgccgtaggctgggcagaagtacgatccagccaggctcatgagcatcgtccatttcgtactctgtacttgtagggtattaggtaccgactgtctttgcgggccgtgccgttgcatccaggttcgttgactgtttattgtcttgggaggaggtcaacactggtggtgctctgtctcgcagtaggcggtaattttctatatagccgcctacggtgtatgcggtgtacgcgatacggttctacggtatctggtggtcagtcattcattcattgcaacaatctatctatcgctaaagcgtcgactccatcaatcttatcccaccaatcacttcctgtcacaaggtacttccatccaaccactgcggtctagtaaaaagtgaagttgcctgaatgccttcggaaattactgcaccattgccgccagtgtcaggcccagcgtgcatgacattatctgtcactttgacccggtggtcgtgatgacaaccccgtcgagacctcctttctcgctgatccctgttgcgcttactttcgatagtttactgtgatggcttgagattgtcgccttggctgacccagtacgcggttcgttctggcttgcgtcaagaggagataatcccggttccgtcatgatggctttatgggaaaccaagactcctgcattgcattgtccggttacggccgataacgaaaaagctgacacgaggatgaagacgaggacgacacaccgctgtgcaggctgcccacagatctcgtactaggctggaccccgatgtctcagcagctccagtgaggcactgtgagtctcgtcaagtgtgacgtgcgtctcgggctcgcgggctcgacgtagtgactcccgactgtctcggattagaactccgtccacccagctgcaatttgcagagagatatctcacccaagtttttaagttattggactggagaggatcgagaaatggggaatcccgctgactagcagcacaagcatccggaattgaaacagaacaaatctgtaatgcattggtggcgagccctttcagttctaatcaaccccaccagctgctgccatatcctgcgtctacagacaaccctcgggtacgcgcctaagcgacattgacctcgaggcgcgaggttcgatatcatatcccaagcgggctcttgcttgagctgcaactgcaagtgagagttaagggaacaagagcatttagagttgcggctacgcatccagacaatacacaccaccaggaccaccccagttgaaagtcttttttttggtgttctatttctccactgcctggtatggcgactagcagacgatccacgtactacggataggttcgccggcgacctacagagtacctacctaccagctctctggctttacattctgtagaggcagatcagtggagctaatcagacagtactttctttcatatcttccttccgcgagcccgagcaatcccaaatatggtgtgcatgcctacactttactattatactctttcctgctgatttgtccgccagccaaaagcgcctcatacagagttattgatactgggaactcgagatcgagaagccgcattttagtctagatctccagctcggctcagcgcagttcagctccggcacggctccgagatatctccatcccgcggaatcgtgttagggcaattctacctctcctgtcgcaagaaaactcaaattacgcaaagcacgaggcttgagactagcttggctccagctgcggcgtgtcagctagaatctatggaccaaaactttagtaatggcgtacttttggcgcatctgtagtatccagtttccggtccagagcccactgttcgtcgacgccattgccatggacaaggttcgctttgtcctcgaccgcgcgaaaacatttcggctgcccattagcctagtattatctatgtatatgatttatcgggctaggtactttcaggtctcaagatgcctgtactttggctcgtaggctacccactgcctaacaccgaaatatatagttgctgatgaagagggccgttgtttattttcagcctcgctgagggaacggagaagaactagttacctcgctaaaaagtgtaaaatgtagttcggctagccttttttttatt

SEQ ID NO: 4819 - DNA, 5461 bp, Emericella nidulans
cttataatcatctgaaggagatgaggcacgtgtttactggtcatactgctacgtacacagttatccgagaggtgagagcagataatacaattcggtatttgaggcagcatctaaagcggatacttatcttctagttggagtctaaccacctagtagatatacagtctctgacggtataccttcatgggcagtgtggtgaccatgtggccttgggactggcgaagtagcaaggtaacaattatcacgcagaagttatgtgagcgcttttaggttcaaatttgacatcagagagtgattaccccggagtatttcatcttactccgctgcagtacatctccttaggtctaaaaggcactcgagcataattcctccgtagtcatcatctcgcaatcttcacggttttacttagcagcttcttttcttattaacttaccactgtatctcgtcaccgtgagcacaaccgccttcagagcaggatattatagctgccttccgcgtgctggtctcgtccctggtaaagggtttgcaggttgcttaaaaccgatggttattgtctgttcagaattggagcgagtaaggttgtcgtgatccaattcgttagtccaggttaaaccgctattcgcgtgtcggcaatggggttacctttctcgtattgcctataatgcacgaaccgccaagggcgttggcaaccctgagtggaaataccggcctatgacccgttttcttgaacgatcatcaagtgcctttttgttttttgacagtatatgtatggaccacctcaagataagacgagtaaattcctttatgctgtcctccggctccggaattcaccagcgccgcagttagggttcttatcaatcgatagaagcgcgcattggacagctcagctgacactaagaagaagcatgggtatgtcgtataggggccatctccccttgaagaactgccttgtcgccaaaattgtagttgtaaatgattcaatgattgaaagaaaggaagttgaatgggagccggtctcgtttgataaccctagtacagcttgtaagaatagtttggctgagaaaatgcaaccacctagttcttcctttctgaagatgccatggtttgtgaattagaaggaatgacgtctgcatacttgaagattgactgcacttagaggaataggccagggaaattcacctattagccgaaaatacctgtccgccggactatagcccctctgaagatagtgtaaacgttactccgcattttgacgtaactctcaccctgtcttcagactcgaacagttcctgcagaatacggggcgtggagctgccccctaacgttcggcatctggtcggagggtttccgtacaaattagaggtgacgagatgaacaagatccttaattaaggacttaatagtagatccctgcggtgcgcgttctctcaagacgtcggttcttttatctctatttaagcgagatctaaccctatatatccatcctacattgcatttgtgacttgctatatgcgagttggccggtggtactcctacctcagctgaaaaggccgcctctatagctacgacagactcgttgggctgattgaaatattacctagttgattgtaatcccgcggccggcttccagagagactgcctggaccctgttaggaagtggaaaatcccgacagcgccaaggtgtggggttcgtcagccattgttaccttctaccacgcgccaatctccgctaaacatagctgtattcactacttggcgtcctgggaaaccctacctaggtttggccaatcctgtaaaagttacaaggagccctgtacctatagcctttccattttagcctaatacataagaataagtcagtcttcggtgtgaaaaaagattagacgggcaaaagtactttctaggataccaggttaaattccaactggaacccttctttgctaccatacttaaactcaccgaggtaacacgatttcagactttaaagtcattcatgctatcttgttaaaaagttcacaaactcaacttgaaagaatatcctaatggcactcggcagcgtggccttgagccaatcccttttgcttttaagactcattacttgtgtggggtttgccagagccgacaatccaattgtccaggacatctatactgcagacccggcacctctagttcacgatggccgcgtctatgtttttactggacatgatgaagatagttcgacctggtatactatgcgcgactggcgtcttttctcgtcggcagatatggtgaactggcaacaccacggttcgccgatggacctaacaacgttttcctgggcagacaacgatgcatgggccggacaggttgttgctcgcgatgacaagttttacttctatgcaccagtgcatcatagcacaactggtgccatggctatcggggttggtatcagtgatagcatcactggcccatacactgatgcactgggccatcctctagtcgaaaacggcgaaatcgaccctacggtctatatcgacgatgatggtcaagcctacctgtattggggtaatcctggtctgtggtatgtggagctgaacgaggatatgatctcctacagcgggaacatcagccaggtcgagctcaccgtagaaggattcggcagccgagacgacgcgtcttccgacagagaaaccgcatttgaggaggggccctggctctataagcgggaggatatctactatatgatttatgcagctacatgttgctctgagaatattcgatactctacgggctctagtcctactggcccctggacatatcggggtatcatcatgcagtcacagggtgcgagcttcaccaatcacccggggatcatcgactatgagggacgatcatacttcttctaccacaacggggctcttcccggcggcagcggcttcacaagatctgtggctgtcgaagaattcacttacaatgccgacggtaccattcccgagttgagcatgacaactgctggtccggcacaaatcggaaccctcgacccatatcgccgccaggaagccgaaacgattgcgtggtctgatggtatcgaggtggaagcctgcagtgagggtggctttaatgtcgccaatattgacaacggggactatattaaggtggcaggcgttgcctttgatgaaggcgcctctagtttcactgctcgagttgcatctgcaggcaatggtggaaatctcgagctgcacctggacagcaaggatggaccagtcgtcggtatctgttctgttcatccgactggaggctggcaggtgtgggaaaatgtggattgcccagttagtaacagtacatctactcacgatctgttccttgttttcaccggcgacactaccgggtatctgttcaatttcgattggtggcagtttagcagatgaccatctacgactgcggcagcagctgagggagaaacagatctttataagtactaagcatactatggacttaatggctgcagagattcaaaataaagccgcacgtctgtttatcatgctttgatacaaacctgttgcacgctgaatggaaacgaattcacaacgcattgcaattagcttgacataaacctagtccataattccaagtgttctcgttatttgaagacagctaccataatcgagaaaggttagcatgaatggtatagtccaaatcatagttgaatgattgcacttgttcattagttcagggagatatttcaggataatgcgctacacttactgccgggctctctgaaccctagtgaactacgcaattaccaaatgacacggaaaaaaaattaatgggaagggtttaagagaatggtgtcccattaactctcattgttccgagccaagtatggtgagacaaactaagccagctcagccctatcagaagtcggggccccggacatgcattggagttggggtagatgtagggtgggatttcgacaggggctgtctcatcccttttagccttcccaacatattaaacgaacgcgcctcggttattacaacgcaatgattactcctgatatctcttctttgtcgtcgggaatgccttgcttagatcttgtaaacacgaaggatggagatcataatagccatctgcctcgtcttaaccaagaattgccaacctgagttatgttttcagtatagatcggcctactagtaaatacaagatattaaccgagatgcactaacagccaaagctcttcacggggtccttccgcagctgaccagcattgcgaggggtctctctacagaatgaactcggatccacttcacacctgaaacgtccttcacgcctccacagcccagattataaccccggttctcgctgaccccgcttgctcttaatagtgatcaacgggttgagacagtgtggtaaacggagcggtagaaaggtagatatttaaccagaggctaaatgcacacaatactacattaaatgacagttgtactgacagacaatcatataaggcaccatcgccaagcagctatacagaacacatctgcccaaatcaacgaagcaaactactctggtttgcagctgaaaacccttcctgccgagctgcaaccccttagtgtaccttctggatattatgcgaatcgaccttctcttttgggagacaatattgagcatggctctcccagctgttgccgacatctcgaatccaatttttggtgccgatttcgtggacagttgatatatgccgcgtcagtgacacattctactattccgcttccaatatacattattccccgggcgccccgattcttcgctcttacgatcaattgaactgggagtttgctggacactcgatcccagaattaacattcggaccgaactactaccttgacgatggccagcaagcctatattaagggtacttgggcttcaacattgcagtatagaccaagcacatctaccttttactggatgggctgcattgatggtaccacgtatatttacaccgcccctgatgtcggaggcccctggacaaaagcatcaaccatcaacacctgttactacgattgcggtttgctgattaccagcgatgacaagatgtatgttgcgtatggcaacaatggaatttcagttgccgaactctcagaagacggcttgggtgaagttagcaaccaattggttttccccagtgacgatgctggctacctggagggctctcggttctacgagcgggatggaaaattctacatattcacaacacaccccgcgaatgaggagcatgttcttatgtctaactccgggcccctcggcccctacgagcgtcgcttgctgatatctaatgctggaacgcctgttgatggaggggggtacccccatcagggcggcatcgtcgacaccccgaacggggactggtactacatggctttcgttgacgtctaccccggcgggcgcatccctgttctggctccaatcatatgaacagcgacggag

SEQ ID NO: 4820 - DNA, 5266 bp, Emericella nidulans
aaggttgttgtttataggtccacgtccagtagcaccagaaggattgacgctcaaaatcatgtagcaactaatcttctgcggattagtacagactgacgagagtttctcttcataaacaacccacagctggtttactcagaaatggacaactatggttgatagaacattcctcaggttgggactctgtgactactgggcaccctgcatcagctccagatgaagttgtttttagctgctaagcttactcgcatcgaagaaatataatttgaaggaaagttatggacgcttctaagcgacctatattgccttccgaatgctacggctttgcctcccactgaagttactgctgctgactctattgctaaggagaaatatcaaacgacgcatacggataagtaacaatatcttgtgccataaaaatgcaaatataaattaggataggatcatgttaagttatagtgtctcgttcttaggcgggtatataataaaccttgaataagcaatacgagtagcatgatgcttccaagcgcacaagtggttatgcaaccacagtactatagaagtattacagtattattctttaaggctttgagagccagataaataacgtaacgtaatccttcaatgatgctgctctacctttcctcgctgggagcctgttactgagacaaggtgtatcaaataggatctccatcgagaaatcgtcagctgtttcacagttgtgacaagaaaatcatccttacttactgcagaccaaattgcacggatgttcagataaatcccagctcggactggattggcgagcactgctaatgattgcctcgtgagaatccgcactactaggcacgtgacaattcgtaccctatctgcccgcacctgctacgaccaaagactgtagcaaccacgacgaggggagaacagggccccctactgctctaataactgatctcttacgctttgctcatcgatcattccctccaccccatggaggtggatgactcccccccaggcggagcccgtccggggactccgctcctgggtgaaaactctgaacccccctcaggacctaccaccccgacccccctaccccggaactccctgaagagaagggccttattctccccacagaagactcccactgcagctctagtccctgtatcctatttgctgcaagccctattaatctgtgagcaggtcagcatagtagcagacaaccagctagtccttcttaataattagaaactagcaatgacctctcttgccaaagctctagatctaactgtctcctctctacagggctgcccaagagacctggcctggggcttgcagccagatttgtttccctagcaaaacaggactcccttcagcagattcctctaataacagcagttgcacccccacagccatccaggcagatggaacagcctatctaacctcccactcctgaagcttgcgaaggccccctgaagaggcgaacctcgcagcctacaacctgggcatccctgacagccccaagagctggtcaggggaactggcaaactattgccccagaacaccgtacgcaagccaagcaaccagcacaacgaaagctgaagcagccaaacaagactgaccaccgcatcttcctccgcctcccggcctcctctagcctctgggctattggaccacatggcatccgggtcacccttgcagggaaagttccggacgggattgcacaggtgcaagtgatatcaacaggatatgcaatcactacaactgaacaaggcaaggtcttcttactgtcagagaaggctgcaagcctagctggggatggatactttgaaataccaacagagtatcaccaggttattgtcccccggatcccgaaacaactctggtccctggatggatggatagatactacaattacagatatcagcaatgaagcagagcgcattactggtattaaaccactcatggccaaactctcaaagcacccagtagagagggactctatcacagcagtcatagcctttccaaaaaggctacaacaccccttgcaactctttggcctgtctggcctatcaaggcccacccgccccaagcaaaggcctttgcaatgcacccgatgccactgcttccatgatacacgagcctgccgctccagcgaatgctgtatctcctgcggatccttaaaacaggaatacaactgccgtgtgcagtgtatcaactgctgcggcccgcatgcagcggacttccaaaaatgcccagccagaccccacgtccagaggaacactgtcacccgcctctcaaaagatgctctagctgctatccgcaaggcaggccggcttgccttccaacaggagcagaagaaagcagaagaaagctctaaacaacaaacagataatacccacactacaagccagcctacaagacagctcacccaggagctcttaaaccaaaccctgccctcccctgaactatgaaaattctacaagccaatataggaagggggggcgctgcacatgacctgctactctcctttgaagcagatatcatccttgtccaagaaccttggacaaatacagcaaaacacctaaccaagacccacccacaatatcagctgttcagtcccccaacccaatggactgccaggcccagaactctaacatatatatgaagggatctcccagcccattccctcccggaacctatctctccggatatcaccacaatctacacggcaggccttactattatcaatgtttatcggccccctaataacccagttgcccctgctggtgctggctcaacaccctctacactttccacactcctaggatataccccaccagagaacaccatcctagcaggagacttcaatacccggcacccattctggcagccagatactgagtctcatactgtcacacctggcgcaacaggattattagactggcttgatgcccatgagctggaacttcgccttgagccaggcacccccacccgtggaccaaacaccctagaccttgtcttctctaacctaccactaagggccctagtagaagaccatctaaagactccaagtgaccatgcaacaattggaataatactggaacaagaagagcccccgcctatatacaagcttggatctaccaactgggagaaagccagagccctggcaagcccgcctgacccaaccctactaattgacctactagccaaacaactggtccagatatcccagcttgcaatacaaggcgcatcaagatacaatactcgcagactccccaggaccccatagtggactccagaactaacagacatactacaccaaacaagacagcaacaaaaccccgactataaacagctctggaaggccattgtacaggcaaaggctgaatactggaagcagcgaattgaacaagccacagcacctatagatgcattcaaacttgctaaatggatacaatatccagaccagcttactgctcctcccctgaatatacaaggggcacaggttactaccctacagggcaaggcagatgccttccttaatcacctcttagagaagggggccctgcttccaaatcagacagaagagggacccccaaacaagcccctgggcttactacacctgccaacaaaagagcactgctgggctgctctctgtgccccacccccgtctgcccccagggaggatggacttgccactactgcttggagggagctctggcctgtactaggggatcaatcacacaactatactacaggtatatagaggaaggctgctttctactaagcctgaagtcagcaaagataataatattactaaaactagggaagagggactatacccaacttaatgcctggcagctaattagcctcctctctaccctaggcaaaggcctagagtgcctcctagcatagtagatagctgtaagagcaattcaggcagatgtactagccccctactacttcagggccctgccaggatactctgctattgacctagtctaggttcttgttcacagggtagaagaggccttctaacagggaaaagatactttactactcctactagatataaaaggggtatttaatactgtaatatactaacagctcctttcttacttatacctgtaaggatagtataaaggcttactccagctacttaaagactagcttactggctgctctgtatctgtttatattaaagaaggcactattatagtactaattaaaggaggactcctccagggatcccccctattcctaatactctttctgctatatacagcaagaatagtctctattttagagggctccttctgctatacagataatataggtatattattaactaggaatactctggaagagagcttataataactagtaagggcttataaataaattactgccctagggacagagacaggcctccctttcttaatagagaaaatagagatataatacttctctagaaagtagtagcagtatcttcctatagttactctacctagtataggagagattatactatttctatatatatattggttaggagttcttctggatacaaagcttatttttaaagcctatattaatttagtcctcagctgcaggaaacaactcgcccagcacctaaagagacttagtaatacctagtatagctatctagtagcctccatgcaggtagtagttatatagtatattctcccaacaactctgtacagtacagaagtcttctatacaggcaaaagataaaaaagggtagttaactccctgctttctctcttctgcacagcagtcctagctattatcctagcctataagactacccctactacagtacttctctgtaaagtagacctactagacctagaagctctacttaacagcatcttctggagggtagtagtaagatatataagccttaatactaaatacctaattgcctaaatagctacagagactactataggcaggcctaaaactaggcttaaaaggatcctatagctcctcctcagccccctaccagagcatgctataatagagctgcctcaccctctattatacatactcctaacagataataaagactatagccctgccctattatagatattagtatacttagatagcttacaaactagccaaggggcaggatttagctatatagtctactttggccttattctggtaactaagggatatggccctgcaggccccaggacagaggtctataatatagaaattataggtactgtagaaggcctacacg

SEQ ID NO: 4821 - DNA, 2567 bp, Emericella nidulans
tatatctagcgggaaacgcctatattccgcgtcaatataaagtcccagttcctgaagcggtatccgtcatcaaccaagctctaaactctagcaaaacttctggatcagcatccgaacccttaaagccaatgatctcgtcttcgatcacaccaccgcccccacccaccgtttatccgaaccacatcatccagctgaagtgcttctatggctggcaagcgaccgtggaggaacataccaagcgcgttctgcgcggcgacctagcggccgccaaccgtcttgagaagaagtggttcgattacatggttgctaccgaagaagcaggtcttggtggtgctggcgcgagaagacgacggcggagagcgcgtgaggcagaacgcatctataacgaggatgacgaggaagagccgtatttcggattgctggggggcagacgacgagcacgcagcggcgggagctgtgtggtcatgtaagctgcctttactgcgcaagagttcatggtactaaaccagctccggttcggtggccgatggtttagtaacccgtttacattggtcggatgctgggcagtctcgatgctgtgctggtcatggtcttgctgaggctgcctaccctgctcattcatgtcatttcacgtcatggactgacaaaaatgttctgcgacacagcattgcaacgaacacacaaaccctagttcaatgccaataccgacaccttccttcacacatcctatccgagctcttgaggtaatcgccatgtccgggcggtcattgtcattggccatgctctacctatccaccttccaactatgttgtgtcatatcatgtcatatcctgtctagaatggttggtgaagctcaagtctgatttcaaatactactgggccgcgtctcgcaccatcgaatttcctactgttagcctattagccggccttttccttcttaggctatatcggggatcttgcattttcagcccacatgcatgtgattttgctgttgggagttactgcgtaacttaactacatagctagacgaagaatggttctcatagtatgggtatgacgagtaattcatttgggtatcccttgaacagtaaatcacgtttcagttgcagatgtgcaaggtaatgctgagatatgaataggcgaatggataaatggactcctgagatgcgatgcgaggcgaacgagtattaagcgaatagatgcagagaatctagatctcgaagaacccaccatcgctttcgctatcgctctcagctggcgctggagcggtgtgtttcgcgctcttccctctcttgctatcggacgtcttggtccttggtttcgcattttccttgccaccgactgtcttaacgccggtatccttcgacgatggtttcgattttggtttcgactttgtctccgtcttcgttccaccttcagttacgctgtcagcgtttaaattcaatttgccttcccgaagcagatcaagcgttccatcttgcatgcatttctcgacagtttgcagcatggctttcttctgggccgtggtagcagcggtcacaatctcctcctcctgggttggccccccctccatctgcacatcttcatcctcattctgaccttcgttcttcttctttttctccgcataaatcgagatatacttttccgtcagcgggtagtagatagtgtaattgagattcacgtttgccgtatgcagtcgcacattcagttgctctagcttcttctgcttcgttgcttcatcgatgtcactattcttggctagctcgtctcttttcctggtgagtctcttgacttccttcgttgctgttttgcggtctgtacggcacagaacatgttagtaccaactccacccagcgcaaacaatgaataagtcaagatattttagacatgagctgggaagcatacccaaaaatctgacgaaatgatatttcttaatcatccgcgacctctcacgccgcctctcctcatccgccaattccttctcatacccggccagcgcccgctcctgaataacacgcttatcggcggacaagtcaggtttcgcgaggagacgcttgacgtcgcggatgcggcgcttgagctcattaacggagggatgttgcttttcttcgcggtctggttgagactttgatttcgatttgtgaggtcggtctgggtaaggtgttttgcggggagttcggggtggtttgaagtcttttggcattttgcggttgtctaaatcgaggctgggtttggcttaataggtgcgaagcgtttactgtatagaatcgtttggcagaaataataatgactgagaaaaagtgctggaagattatcgggccgaaggttggagtgcgggcggagcggagatcgggttcgaggccgatgggagtatcgctatcaggctgtcattgaggtcgacttgcttgaagtcgtgcggtcgacaactactggggacttcattgcgagtcgctcaaaacagggcctataattatcttacggtgtgccacaccgcgcctcagttgaatcgcacagcaacatgcccgtcgctgcttgatacgcccagattcatgggataaacacgaatg

SEQ ID NO: 4822 - DNA, 5440 bp, Emericella nidulans
cggcaagggtttaaggtaagaaagggttaactttattgggcaaagactgctaatttcttgcactggtcagcataccttcctagtaggggggtccaggaggcttgcatacaaaaataaccagggagaagtcaggttgtcaaagaatcctctctgaatttcattaaaacagccaggtagccatctcccagacctgccttcttttgctcaatggattcccagtagggaagtgacctttcggtcaatattaacaaatagtgtggacagcattggggtttttttggcttcggaagcggacagggcagtcgtcagttatgcatctagagatgttgagaaggacggcgaactgatgggaggagagatgggaggagtccttgaacagtgcttgggataaaggaccaggtagttccgcaaacccgtagaaatgttcacgcaacctactcatgctgaagagcatcgagtagcaagattccctgactgccctgaccttccctctgactgagcatgcgaagccctcaagagatgtccgccaagcagtgatcttagcatagaattcatcccgacttccacttgatatgccggcttgccagaatctgtcagttaatatacgctcgacgataccccacatatctccgggcaagccagcccagttctccggattgtggaacgcatgagcgttgctgcgggctattagctcagatcatcaaatcatctaaatggtttttacctaacaagttgcaatagggttggcaagataattgggatcaggtcgtgccagagagtacaagcgatctcatacggcgggtctgctttcttgagcttgtcagtggagaccgccatcattgtctttgtgcctctcaaaggtagttgctgcatcgatgttagctttggctgtaatcgaatttcgaggcgtctggtacctggaatctctgtgtcatttcctcctggacctgcttgccttccgcatcaagaggtacctctgaccaatctgctagcttctgagcatgttttgattgcatgtacgggcccacgttctgcagtcctagcaggttgcaaaacccttcaaacgttgaagatttacttcggatctcatcatcctgccaggcttgcttgatcggttccacaaacgatgctaagcgggactggcgcagaaacgggtcgacattgttggcacgttgcctagaggtgtcagtaaccaaccaaccatagaaaggcctatcttacataataataagtaggattgaggtgaactccatgtgaagcttgtcgtccacccgattggccatggtaatctcttgaatttttggctctagaaggtcatagaaggtctttatgcatcagcagggtcttctttagttcctagaattggagactcacagagaagtagtcagcatagcgagtcgcaagtcgacgcagctcgtggctagccagcccgtgtagctccttcacagcttctgaatagttcggaaactcgggttggtcaggtagacgtgtcatgagagtgtactctaagaccttgagcgcgaaactaggtgttttatcaagcgctctggcggaaatatctacaactagtttcacaatgcgttgtttcaaaattgggtcctgaaccaaaggtcagcgatgagaatgtagtagcaaaggacggaacatacttcgaaattcctttgcatcaacttgtacgcccatgtttccaaaatgttttctaactggccgcgcctttgtttctacaaatcgttagtggaagcccaattgtatgagtttggtagcatacatcttgttgtggcattctcccgtgcactgcaacccattttgtgtaccccttcagagttgcctccactaccgcaaactgcgtatctgcgcgcataaaaggcactgagttcttcgagaaggatttcgctaccagttgttagcctgattcagttaaattggagcaagaaacaaacgaaccagtgaagggctcaactccactgtacaggttatctaagttgttgtcgaccccaagaagaatatgtggaatagcctcttcaggccgcttctgaactatcgtctcaatgatggacgaacaataccgtcgatagtttccaacaaaggcatgtttttccggaacggtgtctatatcttcattaaggaaaattacggtgggatcctcagaatcggcgggcagagattcccagtgcacaaggcgttcagtacatatggttagtagtggggggatgaggttgatcacaacgtctagattcccaatctttggattggcaattagtttggaccaaatatgaagaacgggtatcgacacggtgagactgcgatgctgaacaacgtttaacatgagatggaaaaagaatggcaagtccacaccagctgaagtttcaattgaaaagcctttttcttcgagaaatccagcaacataagagaccatctgtttcagtgcattagttatatgttatattggtcggaagctaaccatacctctgaaagcttcttggaaattgtgtacttcgtgtcgtcgatatcttctgggctaacaattgaccactggaatagcttcaatattacatttagagattccgtttcgtacatcagatgtaccaatggttggaagccctcaatgtcataggccgacctgctataaagcgcatgtagtgcctcgacggcggcctaaattattggtaagcggcctattctccggcagggtcagataaacataccagtagtacttgctcatcagtacaggtgaaagctccagcaatgcttggaacacagcctgagagatggatagctttgggtattgaccacactagcaccgacttcaggttagccaaagccttcaaagcagcgtcctttgcctccttcgagtgctgtacgcttccaatgcattgctggagaaactcgcatatccgagtcagccaaccctcattgccacagcgaatagcgacgtggttgtcgcgttccggatacgcttgttcaaatacagccagtggcgtgcagatttctaccaaagctcggttaagatctgttccgcgcaaagacgaaacagtatcctccctgtagaaaatatcgtctgatagcgtctcaagaacaagcaggacaagttctttgtgcacaaggctcgcgttccagaattggacaagacgctggtccatatccagccaatccaggccccagctccgcttggcgacttcggcccatagctgtgggatcttattgcgaatatacgtaggatcttccggttggatggattcggcaagcttcaacacaatgtccctcaaattcgtgatctcgtccgtggcggtgaatgaagtattgcggaggacgtggtcgagaagggtcaacccgaagtagcgcaccaatgcatcattctctctgcgagaggctagcatgaacccattacgagcagcagaggaactttgtttctgcgactccacgaactgtaaagcctctctgcggagctcgttcgttgacgacgggttatgtatgagctcaagcgcgcgaacaataccggctatgcccccatccacgagtccctcttccgcagccatggcttcgccggtggtcacccgagtcaactactatggcacttggagatcgcggcaccaaacgttattcaccgccacttggagaagaaccttgcctgtatccaccttttggaaagcagtgcgtgttgtctgattcttcgttggggtaagctgcgatattagagcaagtcgaccgtatggtgtggtcaaggcccaggcagcacggctagcagttcaaggactggttaggtagtgcacgtaagaatgcggctgaggtccggatagctcctaggtaggttgtttctgtagatgattgtgcgggaaacggggaaggggatgttccaaccttccccgacgatctatgctctgtgcgaaggccaaagttgactctcctgctattgactaggacggacgttgttggtaaatcgttaaagaaggcggtattccgcagtctgggagaattttccacgcgctcggtcgcaatgcccacaccgactcggaggggcagtttctcaccgcctttttcttatcgataagccatcagataaggcaactgtatgaattgtggtctggagcagttgtgtattcgtttatgattattcagatatcagtggtagttattagaaacaacgtgcctgaacgctaagacgaattcataaaagcagcctacatcacgatgcatcctcccgtctgacactgctcaaggtagctaacgtccttcgccgatggtgctgctaatgcatcacctttgcgcttgacacccaggatcttaatactctgatcaccctcgggattgctacaccggagccgctggacaccgacatccctgagttctacgtggtcaatcaaccactcctcctgagctgatattcactttggtatgggtttccgggaaatgatattctgggaggaagatctccgtcggggtatcctgtcccgatatcgctctattcccaacaagtgacatagagaagctacagttccgcagatcgaacacatactcggatactaacccattagtgacgatagggctaggtcgaaggtaagcctctgcagcacggtatcccaatctgtcctcatctagctgagatacttgtgacgatatagaaggtgtcttgatcgcatctttcaagttcctagggcttatctgttggttgctgttgtggctgtggctggacgagtatgaaggggattggtggtctaaccggctagcggatccgtgatccaagaacttgccgctcggaagctctaggtcgtcgaccgaatatatagacaaatcttctccattccactggtcgccccactcatgatcattctgaaggagctgttagggacgttgtatatacgaatccgtggtccagagggcttcttacctttgccgtataaacccacaaagtgaagccattggaggaacttccttctagcgcgtagtggcatgcatccatagcgctgatctggctgctgtaatcaccagttttataggcgtatttgtcatccatgtcgtagggtatcccagtctcggtgaatatcagcgggtggttccccatgtacctaaagctctcgtctctcagaaatttaagctgatcgcgcaagcagtttcggattgccgtctctcctattttcacgccaaaagctggcgtgaggtatttcccacggaggacgcctatcacatccacgttatagagacgattcctgtacgtgttaaaacactaggctgctgaagcgggaagatactaccgaccaatgctttgacatgagtgtgaggccgtcataatagtgaacggcatgaaccatgttcggatcatcatcatttgaccctttgatgtcaggcggaatctccatgactggaggttggcaaagcatgatagcaccgggccatacactcctgatagcttctgtataggctctatagtgctctaaaaataggt

SEQ ID NO: 4823 - DNA, 1349 bp, Emericella nidulans
gctcttacatccgcctccatcggcgtgaactgcgaataccgcgtcagacgcgccgcggcgttcaggatatcctagcgcgtgttcttaccatcctcactcttatccgtcgcctcgcgaataattaaatcaatcatgtccatctcccgcataacattctggaaggcacgcacggtggcatacgaaatcttcgttcccgcggagatgttgcacaggctcggaagatgctccagcacatagtccgacagcttgtgtctcgacgtctcaaggatgatacgctggaattcctccggctcgatgtacccgtcgccgtccttgtcaaacacatggaaggcttgtcggatgcgctcgccttgcaggcctcgaagcatctgcgcgaactgggggtatgtcatatcatgccgggtcttcttcttccctgtatacaacgccgcccactcggagttccaatcaaagggtatgctgtctttcgtcttgttctcattgtatagcttctggaaggtctcccacttgaccgtccccgttccgtcagtatcgaaaagtcggaaggcgatctcgtattcggcgtcaggtttcgcaagcaggttctcgaaggtagcccattcgtgaatgttgattcggccggtccggcgactgtctgcgactctgaagaggattccgtagtgttcacgcttgattttatgctgaggtccatgtcaattggccgttcggtcaaagcatgacacataggggtggaaactcacgtaatcttcatgtttgggagcgatcgcgtcgacgaagtctgcttcagtcatgtacagctcaccagtggcctcatccttgcgggcgtgcttgatgaagttggccttgacctgcttggacagggacggctcgtcgacggtagtgccgaccaaggactctttgacagcttccttcacgcctgtcatggtcataacgaaatagaaaagaaaaaagtctaccctctatgcagagcaccaatctagggaacccaagagagaaaagaaacaaatagaatatagtaaagaccgacggagcaaaagaggacacaaacaggacacccgacaaagggaaggggttgggagagtgcgagtcacggtgtggagaagggagaatatgggagaaataagagtaatacggactatgggggagagatggatcagcaactgacagcgttttcatctccgaatctcttgtctggagtttagaataaataaaattttcatcagctgatactgtagcttataataaagaatttctacaaggaacgggggcaatcctctttgttttttctgttctttgaatggtcgatcaatttgaaaggaagttttttttttaccgtattggccctttat

SEQ ID NO: 4824 - DNA, 5767 bp, Emericella nidulans
tcatgacagccggagaaaagcggcaacaaaaaagaaagaaaaaggggaaagagaaagcaaagggaagaaaaagaagcaacagtggactcggctgataatccatcaggtaattgttacaataagagaagataacaagtcagatcaatatacatcgcgtgacatggaacaccgggtgtcgtggatgaagcagatcggacgatgtgtaggaggtaggaaagtgtggagcgtcaagagtagagggtagcaagaaaattatgaacaaaggaatggcagcttcgcatatgcgcgagggaaaagagagtgacgcccatgggtggtaaggtcgggggtggcatttgatgctttgcaggagtcctgagtgagaaatgaggcgggatggacaaagtcactgtccggcttatcctatcgtaggccccaagcttgaagaaagctgcttctgcttcccctgctgggcagggaacttgcaaaatcatgcgtggcgtggtgcttggtgcaacctcacacgatcgaaattaatgtggtatcgctagcacgtgtttgatatcacccacttggcgcaagagcaaagtcgacggcgcgtatcaatcgcgccgatctgcccaggtggggtccttttgacagatgcaccccgtgggaaccgaaaaattccagtgaccgactgatggaatgttctttggaagccgccatatgcgcagagctgcagtagtatttcgagttgaagaaaatctgagacaggctgcagtatcgggtgccgctagtgattttgataggctgatcatatcgtccccagttcggctttccgagtctcgacacggcctcatccagtcaaagacgacaggatgggcccgtgtcacccaaacccagacggcgccttacaggaatcccgattcagagagaagtctacgtagcaaaaagcacaatccgttagtctcgaatcaaacccagatcatcggtaaagggccattttttttttttttttgagaaagcagaaaagcgtgggtgggtatcgccaggaaaatagaatgaggacaaattgggtccgaacaatatagggttaaggcagggggattatcgcgatgacatgagcagggtttcaaagtcagagcactcatgtctctaccaccggtggcgtacctcgcaattttctcgtcttcacgttctcgcggctccacttccaggcttcgatcgtacatgtcgtgcacatcgcccgccccttgtaagttactgagaatgtactcctgtaattcggtgacaggggtcaaaaggtagggcgaattctggtattgttggatgtcacgaataacctccgccgttttggttcgtttgttgaaattgatcaattcggagggcgtaagagatggtataccatcctcgatgaatgtcaggtccgtgagatacacacctgccaaagttagattatttgtgaactacagcggattccaaaggcttaaaaaaaaaagatagggtctagattgcataccaaaaaagggaatgcaaggcggattggcaagatggagcgcttcccggtattcaccaaagttcttcgtactcgccataagtctgcgcatctgctctaggatggcagatgtgcgcccactgacctgagcccatgtacgagaaagtcgatgaatgggagctgtcccaagggccgaaataatcgaagtcagtgtggaatagttgttcaaggcccgacatttctagtatgagttagtacggtttcgcaaagatggtcaggaacacatacatccgcaacattcacaaaatgtttaatgacaaccactcgcttcttcacatcgctttggttgagaatcatttcagcaacccagttggtcagctggtttgagtgcagaatcagggccttcacatttgcagcgggttccggttcgtcagggccaactttcttctgccatgtcttatttagacactccgtgggtttgatcttggagtaaaggcgtgattcaatgatggtcagttgacgggcgaactctgtacagtcaatatccaagaacttcagcttcttcatgttcttgggaatgattggcgtcggggcgggcgttgcttgcgtgggcaccagtcgcttaacggtagtatcctggcccctcagacgctgctcaataactgccagaagctgagttgaaccaggcgtcttcgtagttgcaattgaatctttggtgaaggaatgcgcacgctcgaggagctgcatgtgcgactcgtcatttggctccatccagtagttttcgaaccaggtcttcaggatattgaccacgcggaaccgaatcggcttttgcttcctgtccacccacatttgcatctcatcggcgttcaagccaaaaggaggctgaatgttgaaccgttgcatgatcatctcaaaaagctccgatgcggtcgtaaaggaacggtaagtgaggaggaaggtgctattgaaagacatatcgggcttgtcatgacgggtcaagtgctctaccaaccctgccagtgtaccgcacttcagagtcggcacgtcattcttagtatcgtagaacacttcgccttcatgatccatcttcaaaaaccacggtgtctcttcaggttcacgggctatttctcgaatgggttctcttgtaatggcggcgggaggagcttgtccgaaaaacctctgagctttgtccatattacgacgcattttctcgggagacccgtccaacggatgtgctgatggcacaccgacctcggtcgaacgagactcggagcgactgtgcaggcccatatagccatcactatcaccgccaatgcgactttcgctacgtagagtaggtgtttcgggcacctgttcaaggagaagcgagagagagaacccaatctgagaaacataattctcaagttgtcgggcaacaccccgaacagcattcaagcgatcctcaagcgagtcaccgcgaagttctgcccattcatcaccaagcggtgccgaaaccgcctggcagctgacgacaaagtcagctatggcatcataaactcgttgcttctgtgagctgaaatcgatgagctggggattttggaaactggtccccaaaggtcccagatttatcgactcgacagcagagacccacgggcggaattgttctacaaccttgacagcagctgcggcaatcaactcgctgagttcctcgtgttcagccagagtaacgatcttcttctggttaagggtcaattgctcctccacgcggcgtatggccccgacaaaagaccttcgaaggacatcaatatggtccagaacgtttggttctaaaggaacagtgggctctggtcgcaagtcccctccatcttggtccagaaatgaagtaggaccagagtcgtttagtgaaacaccattgttctgccaggagccacctgaagagctacccatcacaaagccgggggcgatccgacgaatgtaatcgccacgttgctgtcttgcaacctcaacataaccatagaccccttgcatgacaccatcggcttcttgaaggcacttattgacagcgtctgcgcctggccaatcagctgcagccatgtgcgatgagagaaccagtttggaaaatttcgacatcatatcccggaaatgctgatataaaggcttgttcgcggagattatcgaggggtttccggaatggttatcagtagtatcagagccggccgctaatagcatgcgcaagtggtctgaaatgtcctcagccttcctcacaaactctgcacgatcgccgcttaataatgtctgccgataagcttccacagcttgggacatgttgtccacaagtaagggccaggtgataggagttgaggtatgatcgtcgaagaaatgctgagaaactcgagatgaaattgaaggccggtgcaattgctctgagatcgaggtgttgcttcctgcgcctgtagagccatagggtctatgagggcttcggccaagaggacttttcccctcattcatggatttcgtagcagatggggggtgaagcggaatccaaagaagtagcgggcgatacaccgtcgataaacgactggcgtcgccgagacattgagtcgtgcgaggcaagcatgagagattcaccctcagcctcagatgccgagccatcatagtcgtcttcatcacgctcaaacccccgagccatcagttcggggggcggtcgagtttggtcaggtacgaaaaagttattgcggtcatatgggccagtgtcgttggcagacggattttcaaaaggaagttccatggtgctgtagccagtaagtgtgttaaaatagaatagacggccatcgggagtcgcttgaggaatccagaatgcagcctcttcttgctgactgggagggtccattccctcaataggtagaattggctgagaatcacgggcatttgcaggagagtcagcatcatcgtcgtgttcctcttctacttcctcgccagcaccagactccgcgctgatatcagcttcgtcatgaacctgaacctgtgatacatgttcctcaagttcgcgcaggtcagtaatgacagcgcagtagttactgggaaaccagccccgaacgttgccattgataacaccgtcccaccagccagtttcgagctggttgagaacctgaatgacatctccttgtcggaaactcagacttgtgtgatcatcggcatcataatcatacatggcgcgcacaaacagtgcgggcgccggttccggactaggcgacttcatgggcggtatatgtcgtttcggtgagtggtctctcacgacgtctctctgagaaaatgacaagcttcctccacggctccggcttctcggggccagggtattagccatcggcttctcggggtaatcgtactcgaatttctcaaaagcggtcaccaaggcctttgttttgttcatccccgctgatccctggtcaacagccaatggatcgaggacgcgagttccgtacatcggatggccgcagcaattaacgaacgcgggcgaataataaaaaaagagtgatttgagcaatcaggggctgctgcatcccttgcggctgggactagacgattcaacgaagggcgttgctcatgtcgaggcaggcaaccgaccgcggtaggttttcaggaaagaggggcggtaagcggagtgcggaaggtgggctgctagggagcgacaggcgggtgaagcagacaaggtggtcgagcgtgagcggaaggtggcaggagcacgataaaaggttctcaactgaaagtggaagaagaacagtcgaggacgggagagtgagggcaaaggtgggaagggagaatcaggagggatttagggacgagttggcgggccctccactcaggaaggtaaggttggcagcagagagtgggcactggggacgagagacgagagtgggtggaggagcgcaaaggccagcagaaagtcagagacgacatgacaataccgttacgcttaccagtaatattacagccatcgaccaacgtccagccagtcagtcgatcattcgatcagcagctactttcagcttcacccagcacgcttctcatgcttagctgaaattctccatccagattcaggaatatctacggggcgccctgtattgtctcagtctccccaatggcaggcttctccaagtctcactcctggtcgaaggcgcatttccgatgcattaaccaggacttacgtactttgcggcctccgattgaacagtgctttccagccgggccagccccagcacgagccctacccacacagagtctcagatttaagatcgagggttccgtcgggtcttacgtacgtcctacggagag

SEQ ID NO: 4825 - DNA, 2986 bp, Emericella nidulans
cgcattacgaagacatggatgacatgtatgtacaatataacgtgatagatgatataggacgagtagtacatagcagtaccgctccaagttagagggatgaagtagccacagcctaccatttcagggcgaggttgattctataatgaacatagcacaccacttgtccggccaagggaaggacaactagtttaccatacgcatcacgtgatatggcattccactgtaagaatcaagtactagctgcgattcataagaatgctgcgtaacgattgacaagcagctcgattctgctatgtgtcgattgcatttcgcattgtaatcagtactcataatgtgtgacgaaaagaaaaaagaggtaggtcccagttactggatacctcatggagaaagagtggtggaacccaaagtcgtgttggaaggccagcagcaagggccaatggcgaacatctggaatcgggcaataatactggcgtaagagatgaagaaggtggccattgtgaggaggtagaagtcttacccattgccagagtacccagtaattaaagcaagcaaggaggcgtcagatccccctttcattgaacgcgcaatcatgtttgatgacaagcacaggctttaagctttgcacttgacctgcgcaatagcatcatattaagtaaatgctggtggcagctagcagcagatcctcaatccttgcatcccttttgtcgtatctcttccctcaagtgtgtcacggggccagcccgagcctcatcctgagacttgattctgccgccgctgaccgcccggttagctgagatttctggagctccgactctgatccaaatcggagcctcgagctacgtcttgtcttgtctatgcacctgtctgatagcctgactctgtagcctgcctgttgtatctactccgttatcctgttccgaatatactcctgagcctgcaccttgacaaagtgcttattactgaatgctcgtataatcaattgaaggtttgaggtattcaaatatagtattgtgtagtgaaatccacagttggtcagaggaagttggcatagaatagagagaactaagtgatcattgtctgagggagcgagctcatggacttagttacagaacagaaagatgggagatacacgtgtcatcttatatagccccttaatattggagtatcaactactccaactccaagcaactactccaactccaagcgctaagccatattcataacatattggattatgtttattaaaattaaaggaccacgcataccaatcatatatcctgaataaatcaaataaagaggctcagggcccgaaatgctcagagagccgcagccatcaacacgacggctccgccgaataaaatcgacccagcgccagttatttgagcggccgcacctgtgggagtcgcttctgctccagatccatcagccgtctcttcggcggcttcgctcgcagtgggtgaggcctgcgcagcagtacccgttccctcggccatcgacgttgcagtaagcgcagccgtggcatcagtgattgagcctgcagttatagtcacaggcacatattgggcgtaggtcttgtaagtttgcgacgcaggaagaccatcacccgacccggttgcactgcctgtacaggcagccgtcgtaccgtcgacggtgcactccccgctgaaggaactggcgggtgtcaggtataatgtccaagctgtggtgacaatgcaattggaaagcgtactacgcgtcaccttcatccatcatatacgtcatggccttaccggccttgaccacggtgagaccattgcccataccacattcctcctcgttgtcataagaagccgcacaggtcatgctgtaggtggttgcggtatcgtcctaaaaaccaaatcagctctgcaggtcgaagtaatccgtcacgcaatgattgaattaaacctacatttccagcgactgaggcaacgatgctttccttactaaacccaggcaggaacatggaagtgatcgtgctccccgcgcaagcgagagatgcgagagcaggaaggagaaacgacttcatgatcacttgaatgctgactgaggcttaggacgagtgtctttaaagcagtcaacaagaaagataacgtccaggccctatgatcaggggcaaatccttcttagatgcaagctgagctaaaacccggaaaaatacggtccgacccaacttggcggctagatccgactgtgtctgtgagagcctccgtggagtcggcggttagcgagcccgagacgtctgaacggctatggagacggctagaacagaaaatccaccatacgtcctgtctatcctttatcagcggctgatcatcttcaaaggcccgggtgtcgttggacccgctttagatgactaggatactgcaactggttcaaaataccgtctgccaatctatattttctgaaattcagctactgctaaattagattccagtgctatggtgctataatacggcaatgctgtgaagctggcagttgtggtcctatcccaagcatatatatgactagatgataataacgtatcatgcggcgcgactcgatataaaataccaaaatctgttgcttctgttatacctgtgaaggcattcagagataatctaaagccgctaaagaaggtaccttcagaaatgttgcacaataagatacatggtaacataggcagacttgcaggaagagttaccaagccatatacgttttttggtgatagggttgtcaacccgcaccgcaacccgcagcggtgcagtgagggttgcaaaactggcagtccgcgcgggttgcgggttctactgtaataagggaacgcgtgcgggtttgcgggccaccgcgcgggtagaaaaatacataaaaatatataataattcataaaaatacacagaattgcataaaaaacataaatatgtataatactgtgaaaattatgaaaatctatgtacttttatgtattgtgtaaacctgcgcggtggcc

SEQ ID NO: 4826 - DNA, 3928 bp, Emericella nidulans
ttcagttcctcctacaccagattaaccagtgttggacaccacggcaatgtttctgtttcccacgtgcactgacactcgtgcgcgaactctttccaaacccttcactatcatgcgtgactccctcaagtgaaagtggcagtgcaagtcctcctacagttcaacaagtcatcactaaaaatgagcagactttacgagatattactgagatcatagagtgctcctgctcggaagacggctacaccatcacaatcataactcttgctgccttcaaagtactagcctggtatacgccgtagcgcatatctcccctatatctgaagacagccaagcattagaagagatcgacaggacaccggctgttgtcaggggctacaatatcgatggtgaagatcaaggccgcatggccgcacagctagttctcagcgaactgcatcgcgttcaacgattagtgggcaatctctatcagcgactgaaagaccaagtctcaggcgggaagcctgctaggttgagtaccactggggtcaatgacagcaatcattactctctcccttttcatctgctggaaaggctggcggttgatctcggagctcaacttcggagcctgtcaagtgagattgtcgaccgattgcggaggggttgattgtcaaacattatcgtaccggaatccatataccctgttccattgcgtttcgtgcgcgcgttgtatttgcaacttagttgttacaataagacctagcatatgagtggtcggagtctttttcccgtgcttatcagtgccgtaatagtatccatattatgaccagcgtatagaggggtaatttggattaaggctattaagttcccaattggactgggcagtcccgttcaagaactaaatttatatccccgagcatatcagctctcctagttggaatccaaatgtgttatgtcagcgtctgtgactttcaatggctctatccgctgcgatcttctagtctagatattaactagttgtactagaaagtatcgagcacaatagccaagcttcagtgacagtttctatcatctagtgctccctcaatcaacacaggtagccctagaccaccggctcggtgcttcaatgaccctacccaacgcactacctactcggcccaggtccccaaacaccaccagcactgagagtcacaatgacccatttccccgtcaacatcgccagtgacaagcaggaatttgatccagagcgctgggcaaagacgcctactaccgaaagcagtgttaacggcgagaatggcactgctcctacctctggtcttccatctcggcacccctcgaccggaatctccgtcctcattgtcggtgctggaatgggtggactgatgacggcgttagaatgctggagaaagggccatgatgttgcgggaattctagaacggagtgagggacctgtgtattcaggtattttgttgatacgtctcgtgtattcccccagagcatgagaaaccgagtagttaactctatactttctcgagataggagatatcattgtcatgcagccttctgccgtatctataatccggcactggcccgacatgctccatgatatgaaagcggagcaagtccacgccgtcgttagctacgaaactcatgatggacggcacatttacggcccaaccgtcccctcgttcaatgaccccgagcacctggaaacacgcaaaggtccatttgttgcccccgctcaggttcgccggaaattctaccgcatgctcctgcgccaggtcgcaaggtgcgggctccgcgttgaatatggaaagacggtgaagagctattttgaagatgaaaaggatggcaagggcggcgttataatcgcaacaacaggagaagcagaggtcagagtggctgatatcgtcgttgcagcggacggcctcaaatctccttcagagatattgatagccggtcagcatgttcctccaagatcaagcgggctgagtatctatcgcactgcatttccgaaagatttagcaatgcagaatgagctcgtacggaagcgatggagcgatagtccacccatctgggaatactggcttggaccgggcatgtatcttggtgtcttcgtcggcgacgatattatctccttcggattcacgccccgtgatgacatcgttgaagcacagccactgaatcatgggagcctgatacagatcccgagactgtggcgcaggctatgctctccggtgcaggagactgggatcccgctgtgctagcgctcattcgaagcgcgccgaaaggcgcaattgttcattggcctctcctctggcgggaccttcgccgcgagtggacctcacctgccggacgggtagtgcaagtcggcgacagcgcgcacagcttcattcctacctcaggaaacggaggctcgcaggccttggaagacgcaatcacgcttgcaacatgcctccaattagccggaagctcgcagcgtgcatatcttgggaccaagatctacaatcttctccggtatgagcgggtctcttgtgcacaaaaaatgtcgttcgtgaattctcagctgaagacgggcacggactgggatgcgatctggaaggatccggcgaagatcaggacaaggtttcctaagtggatctttcagcatgatccggaggcgtatgcatatgaaaagttcggcgaggcgtttgcgcatttacttgatgggagagagtttgtgaatacgaactatcctccgggccatgagtttagggcttggacggtggaggaggtttggaggaatattgcagatgggaagagagtggaggatttgttggatggtgattggtcttagttaccttttctccaaagatttagaatatatattgatttggatatcatcagtcgcaatgtgattgagcttaaagctggcgctcaaggctagattcataaatggtttgatattcgtatttcccagaaaatctaagtagggcgacctagctagcagttcatccttgattaagagacaatgattctgatctactgatatcaaagtcattcttctcaaccatggatacttaacgagtgctactcagcaataatggtaactcttatattctcttggtcgggccaaattgatcacatattcacagctcgtgttgcaacacgctcatgcccatcctcaaggcacaggaagttgcttcaaggccagggaaaatatcgcggaaccgtctagtataaaccgtttcaggaatgcacttgcgccagggcattctctgcgaggaattcgtgtatatgaatgctattcagaccgtcaagccaagagggttgaacatcgtcccggtggctattgatgacgagggtatgctgccatacggcccgggcggattggccgaggttttgggaaactggaaccatcgcaaaggctgtcgtccacatctgatgtataccataacgtaagttaatgctcgaagaatattgtgcttccactaatggcccatcaagcatcggccagaacccaactggtggcacattgtctgtcgaacgtcgcaagcagatctacgctatttgccaaaagtacgatgtgatcattgtcgaggacgacccatactggaacctgcagtacccgtcagcccaggaactccaagcacgacatcggaactcgtcagtaaacccagctttgtcggagcgcaattacaacgctggaagaaagtcatctgggtacaagtttcttgattcccttgtgccgtcgtatctctccatcgacatggacggccgggttgtacgcctggacacgttttcgaagacaattgctccgggttgccgtctcggctggattacagcacaaccagctttcattgagaggctggcgcgaatcgcagaatcgtcaacccaagcacgctctggtttattacatagatacgttgccgaactgatcctgtgccaactactgtatgaaacaatttggtgatat

SEQ ID NO: 4827 - DNA, 3958 bp, Emericella nidulans
aaaaaacaccgttccctatcgtagttaagaactaacccatgttataagatcgaccccgaggttggtttccaagaaccaaggaatataagttttccctccgccagaagccgtaaactccgtcgtgccaattctatagggcgattggcattgttcgggcagctgagtcgtcccaatggatcgacaaagtcgaaggcatcaaggatgaatggcgtttttgcaaaccatcaggactcgaccaggagggtgttgtagatgcatggatggagttgatgtcgtcttaagtgtctctgtaagccacgatttgagtctctgtctccgctgcgaaatgccctggtctaaccgattcgagtttgatatcatactgccttcctgagatagtgaacgcccctgtaaaaagcggactcaatccatcccgaacaatgttgatccttgcccatccggccttctcccactggtacctggctgactgaacaaaagcagcgccccgaaagaccttgtgatgctctcttcgtataacctccgttcgttggacctcgccgccagcatggaagttgatatggggttcctggatgatgaggtcatggtttggctctagggctagctttactatccattcttcggaatcgagagtgaaactgaggttgaaaggcgtggtcgagctaatgcgttggccgaaggtgtagatggcaatgtcttggaggacagcgttggtgacattggtggatgacacggagcggaccgagtatgctgtcggggatatcccagtattagttcagatggcctgagtgaaggcgtattatggtaaagacgctcataagttgatcagaacatgaacttaccatgcactagcccggataagaatatacaagcgatgtataccagctgcacagagagggaaagcaccagaactttcatgactgcaacatcaagcacacgtcaaaatgccctctacatcgcgcacgatcgcagaccctacgccctatataacccgacccacgacatcaaaaatcccagagacttcagagacttgtggtccagtcagatgcagtacgtagcttacgaacgcccacctcacctcacctcacctcgccctgtctcaccgggttcaataacatgcagcaagaaccgctaagcccccacaagttcagcggcccttcaggatgagagcactcaatgccaagctttaggcatcacaataatcggtccccgctggattccgttggtgtcagacgctcggccaagagggactcgtcatcgggggcgcgccaatgctgacgcgctgtacttcgttctttaccgatgaatgaagccgaccttgtgtgactgagtcgttcagaccaataaatggtttaagcacagcctagatttggcccaattatggaactagacgcggacactgtcgcggctggcaagtggttacggcaaatgtactcgcgataaagagtgatctaattgctggccagttctgtaagatcggagctcactattattccctgcatgttcgctgcagatagacttgtcgtgagcttaccaaggtactttgttacattaatggtctttcagggaactcatataaaactccaccgggttccgtcgaaccctcaagcccgactccaccacatcggctcggatagcctgcgataccctacccgaagatcggcagctggcggggtagatctggactcaaccaggctgtcaagaggcgcagcactctttcttacctccgagcggtatccgtcggcttccgggctcgcttatttgctgagagatgacgcgtttcacaggctgggcacaagccacagctgactgacgaccaatggtgctatttgatagcgctaatgcaagtgtgttacgatagggatgtatatcttagtctcttcagagtgggcttcatttagcgtacgttcctagactgggagagcggagacccaaatcctgagtcccatattagtttaagttaacgacctttgctggattacactcaataataacctaatactccgttgccccggagattttcagtttttgaaaagttaatgtttttgtcacatttatatttgtttgctcatctcttcatatctcttggacagtatctgatgtgatgtaaacagggttctaagcacatattcacaacgaccttcgttcttgcctcccctctaatcctccaggtgataatatcgaagtgaaagatcggtttcaatatgcaaaggcaggttcggccaataacaaacacaacaattctcgcttgcagaacgatagctgttcgaatgggaagtgtcttggcctgcttatgtactaaactcagaatagatggcttcgactgttatcaaggcttctagtaacccatgtcgcggaattgtgccgcaatatctccatcatctggactatgttacgaattctggccgctagatatggtgttgtacgcgtaccaagctccttgctgagtagcattgttcctgttctagaacctgctattgggacgacaatagctctccgccctgagagaattaatgtagtcttatccctagtattgggttgattcattcccgactgcaagcggtaacaggagcgacgttcgcatttccgccagcgtatttttatacttcagggtacatactctgttgcacaggacaggactatgatggttagctcctaaagtaggtgcatgctctgtacatgaagcggtaacagcactcgccagcttggaattacccagatatcggagatggttcgtctgaacggatatcattccagccgctcaggtctagacattgtgagggattcatatattttctggcttgggatcccatttgcttctcaatcaatcgataatgctatcataacaggtattcaagttccgtgaaaaagaatgcacggccactttttcgcgaccttggactatacagagaaccttacgcctagagataaggcatcaacatgccatttaatgcaccaataggagactgctgggaggactatgatacgccttcatgtgggagattaatgtttaagaaaggtagcctgaccctgatctgaacgagagcctgttgctcctatcgataccatagctacgctctactgaagatatctcgtcgcatcttaccccgccagcagccaggattctcaacatcggcatagggatatatatgcatcagacaaatatattgacagaccagcatcttttgagaatctaccagtcaaaaccaacaagtttgacaagttggccaacgggctccacctcgactacaggaataggtccagtaaccgatgatctaggcatgatataaggaggattgggattttgtggtgcctacgatggctctcaacctctgaaataacgccagttgcaatgatggtcaaccagtgtgatcacaaactcatggaatctctagtgctttcatagcgttgcgacgggtagcgggctccaatactgcatatttatttaattaactggtgattattctatagccatgtcacagaaaatgtgttttgtgtctctgttggcattcatggaaatgcaacgaacatgagctggctccgtacatctcactgcaacacaaaaaatcattgggggatctaaagcaaaactcagatatctaagcttgcctctacttcgacaatagcatcggccagatttcctcctggacctgcgcgacgaaatgaatttcgtcctagatcgtctgatgtattaccattcatgggccttgcagcatcatttcagctcatgactacgacgcccaaggaggtttagatgatgacgaaagtcgcgaggtactgcaaccagtggggtgtctgatgtttcgcagcaacttactgcctgctaatggtagtcctgttctgctttggcgcggagcactcatcccagttcatctgtgacgcggcggccggaacccagtattccctcgcaccctcaccaaatagtggaaggggtgctagggctgcctagaaattgggaata

SEQ ID NO: 4828 - DNA, 5905 bp, Emericella nidulans
gacaccgtcagaccagtgaatctatagctctaataggaggagtctcgcagcaactgagagcgtgcgtttccctaaaacggaatcgtacacgcagacctcagcgtgatgaggtggacccagaataagttgggatcaatttccttggatcgaaacggcttcaacgtccatcgagatctatcgacgttggtggttggtctgtcgaccttgatggttcgtgtgacgctgaaaatcactctagactgctggtttcggatcgaacatagtgtcgagccttattataatatttttagccttagctctccggatttagaagggcaagtccctcgagtcaattggcgtaacttggctcagtataccccgtaacgaggatgttatacttcaaattttggatctggtgtatcggctccacagagctccagaaacacgcacgtcgtgcctaccctggtaagcaaggcgagattggaccgtacgtcaaagctgcggtcgtctgcagccgaccgtaattatcatctctcttcagattccgcaagacccagggttgatattggaaatagggggacggagatgaacccgttcattgaagaagtgtactcagtgtacactgtgtgcacagtgtgcaccgtgcaggcgctaaagcgcgatatttcaaatcagatcggatacgccagagaagaaacgaccaagatcggcagcggccattttatgcgacacgatttttgcatagcgagtggagatccgagcatttcgacgtttcgccggcgccgtgcatctgcgcagtgatgagaacaaacggtcagaatgagcttttctggcgatatcccaggtcagttggggtccaccagtggcgctgggaaggcgtccgttttcagctacagaggaagaatctgacggcatttgtccagaccccagagacgttgagatggctgtaacggcaggatcgaatctcagcagagcaaccgccggagccaccaactcgatctgggaccttttcctgaaccgtggggcagactcctgtgactagcagtagcgagtcctctagaggtgcgatggtcctttgtgcggccatacctctttgagtctccgccccttgtttcccaccctcagacaaagaatcatgacttgggcaatcctgcaggttcgtttgccggacagcttgacccggtcgagtcccgtctcgactctcgacatgactcgctattcccaactatctgtcccctggccgggtccgtgctcggactaggtctgaatccaccgtcacagtcttggggggagccctgcggagaagtccaagtgtccaggttccgactcgcgacaaggatacgactcctgagcccttgcaattctcagggagccagatcgagtggctctcaaggcgcggccacaacggcccatgatccatcgatcggcgctgatgcaagcggaacgaccatcgaatccaatgtgccagagatgtcctgtcccacgggtgctgagaagggtgcgccacccttcctttctgcctgccccccagaagcgctgtgctgactggtcgctcgactcgatctcgacctcgaacaaggctgttgaggaaattcccaccgtcaacaccagccgaagtccctttcttgctctgcaggcatgccctttttgtcgggtggggtcgtgacgcgaggcgaggccgttatcgaactgtcacaggaagtcttaacctagagaagggactaagacttcggcaggcgttactgtatacgttaggaggaacacaatacctcaatacgtctgccatagccttagccttacggtgtacggcgtacggcgtatagtatatggtgtacgtgttggtcatgaatcgtgacagccttgcaatctctctcgtttctttttccgttgatgaccgattcgtcggattctccaatcgacggccgtaaacacagagtctcaggctgtaactacctccttgacagataggatcaacggaaacgaggcggcacgaccgttcaatctgaatgacagaggaccaaagaccgtcagctgtcgatacaggatacaggcccaaacaccgtagacttgtccagagggaccgtcggaaccttactctgtccatagacaagacatgaagctagctctctgacagggatcctgccctcgcccctggtcacgctcgataagcaatctcaacgcagcgtccatggtggaccgacctacctgagtgcaaggaagctgctccccctctcgtctccgctccattcgacccgatcctgcatgaacgaccctccagtcgtagcgtgcctaggtagaactcaagtcaagacagggttagatgcagatagggccgttcgtctcatcggctaaattgcaaatggatctgtctattgagcagccgagaggggagccctgagctgcctccaggccccagccgtgcatcttgacaccgcaatactgtagtcaggagccattcatctatggctccggtccatgcatggccttttccttccgatcctagagcatcctcccctcgctttcctgtcggctgctacttagctgtatgtgcttcgtggtggcggccaggtccacactggcctccacatgccacgccccttgcgttgtccactgtcctcgtgtctgaatgcgcgaggtgagaggagaaggaacaagggcggggggccgtagctggctcagccagaaacggagagataacagccagccacgaaactagattttcttcgtatatgcactcaggcgttgtactaccatccaggatcttccactattcgtcctagtggatgatacaaatggctacagtgacaatactcttaagacagttacagttatagttcaataggcaacgatatgctcataagaataccattagagtattatgtctcctaaatcctggtaaaataaaaacaatagccatggggtatttgtaaatccaggacaaaacgctacaaccaagcaaacatcatccgctctccacctctatgagattcaaaaccaatcatgcttttgacaaccagtccaagaatgccagaatcaacctggagaacaaaaagcatagatgtacaaaggagattcaacaaaggaaaagcgagagactgagggtcagaccgagacatgtacaggagacgctgccagaacatcgtagagtaaaaatacagtattaaggtatagacgggaggaagagagtcgtgtgatcgttcagttcaagaggttgtcgaggcccatccgcgagtcacgccgaggctcgaccttttcctcggaagcccagcacggtcgttgctcaggagcccatcgtggctttggatctgaaaatagtcctgaagacttgccggggaagctggagaagtacacatcgtctgatgtttggggcctggatacctctccatatgggtagcgtgtatctaccaaaggagggagagagtgaagctgtggcgaaggaagagtgcgaggcgaggcagaagaaaccgagttatggtccgagaccatcgacggtgggtcgagggacggagcgttggaggtatctgagaaggcgggcgaggtcaagggcgcttcaacagggcggttgagagcaggaagtgtgtagatgggcgtgagttgtcgggagaacgtggaggcagttgagaaagactcgcgccgagaggatataggggatcgagaggtccatgaggtatagggtctgtcgtaggagacggaggggagccgagagcggaaaatgggactggtgcctccgatagaggcgcggtggtatggagcttcgatgcggccgtggggcgttctcgagtgtggagagctgttgatgctttgttggagacctctcttcttgcggttcatgttgccattccaccagttcttgacggcgttgtcgctgcgattccctagccggcgtgcgatctcagcccagcagcggcccatttcgttgaccatccgctcaattgccaggccctcttcggcagagatggggtcgcggtttagtgacggtttgagattctgatggtaacgttcccggcattgcttgggagagcgatagtgcatgtgttgagagatgcggacccagttattgtttgggccctgttcgcgcactagttggagaagcagctggtcctcctccgggacccatggtccacgacggtgtgttggagccatttgcgaaactgtgttggtgatggagggtgcaagtagaccgtgaggcgcggtcgaatatgaggcgggggggggggttgtccgttgaggtgaagaatgtggcgggcgtcctggcggggaatgccgttgaaccacagcaaaagcttgtgaagtattacacggccgccagtgagtttgaatgggatgctgaaacccaagactatatttaaccagtcgacttgggaaaaagagtgtagatgggagagtgttgtaggtaaatatacgagaggggcagagacgaaggtataagagcaaaagtaatcccgaccaggagagagacgagtcagagagcgatgaatgcagctccacccgtcgagcacgctatgagagaagatctgatccaagatcttggagctgacagttgtcggaggaataattaattaataaaataataaataaaaggccaaaagggacaatagccgccatactttgtagaaggataaccgatttggatttaatttattgattttccgcatttagattacgattcggtttctaggttgttacggtacggagtatacagtctatcggacccactcaggagacaccagacccgtcacaaccaaagtcatccaagtccagcaaccccagtcacatacaatgaccccccatgaaatcatgacgactgcatatgaagataaactccgtttgtgccaatattgagtgggccgatattcatactgacagacgtggagtcattctcagggccacatggcatcgtgatgagcgtgcagtgcctgctttgggcagtctggacgctggacccatagacaagccactgtcaaggaagcgcgtcccgtcgacagtccccgaggatggtgatgctgctgctagctcatgcaggaaaaagaaaagaggctcctgtctgtccttgaggcgctggcgtttccagatcgtggggagatttgccactcatcgcgaagcggtaagaccagaggatcatgttgcatcttgcattctgttccactcaagtgaaacaacaattagcatactgtcttatacgatatatacgatatttggccaggtacaatggagtcggcacttgttcgtttccagacctctctagttgcgtaataggtgcaaactacagacggcaggcggtcgagcatactggtagcacatagcacattggtacgcggcctcgccgacttcagtcccatcagtctggataggacgatcacgaaggatcagtggagacactctcaggggaggtcggcctgctgggagccattgtccaaggtaccgggcacgaagctgttagagcatcgaccatataattgggcaaagcagaaattaactgcgacgagagcgaacagcaccgagatgtcaaccatagtggcgcactggcgatgcagcgatcctcgaactaggcagggcactaccaggagagattggccaatgctttgcgggagacacgccctgacagaaaccgggcggcacaaacggtgtgggtaaacctgaaggggaatgtggtcatggagtcggtcatggagtcgggcccagtccacgggttgagttggagaatggagatgaagttggcggggggcatgggcctcaatggcaggggtcatcctgggtggggtccagcgctcggaatcagaaatccggtcatataaaatacaaaagagcggtttcgtcgaagaggataatgatggagggatggcccgacacccaagacggagtttttccccaggatcaatcacgaaagtgaatgaaatttagcagctgcagttactgaagctaagat

SEQ ID NO: 4829 - DNA, 4373 bp, Emericella nidulans
tctcgtccttctccgtctgctgctgcatcaggattgtggcgagcgacatggagcctggggtgtcggcataaaaggatgtttggtagggctcagggcggggaatgtgcctgactgatttgattgtaacttggtcggttgggggtgtagagggtgcgactgcgtctgctgggcgcggagctagaggaggtctggtagtggtagccgagacaacgtgacttctggagctgcttggtgttggtttcgcggcactttcgcgcttaggcgagggtgcgcctgcaactgtctggcggagggtcatgccgggcctttgggcggatttagatggcgtaggcgacgggatatcttgtccgttagtgattttgtctgttgaggggccaacaggtacagccgggcctgggctggggatcttccagggactttgcgcggcctcctttgctctttgttgagcgatggccatctcctggatctgttgctgctgcatcttcttgcgttctttctgagacagtttgggtgcgaatgagccgctgttttctcggcgcacggatgacattcccaaactgagattcgaaactcgagcttctgacgcttcgctcattatatccttcagcgttttcttagatcctgaaatagttgttgagttccagggaacctgtgagggatacggaggtgatgcggatccattttgtttttcctggggggttgtcggttgaagcctggcgggactcgtgccctgcggtgaggccatacgggtatctaggtaacttcgaccgacagaagatgctccatcctgtaaactagcgcccagtaccggtgtttcgttccaaggccgagtatcgttctcgttggctggtttgacacctcgatctattgcctttccttttcccaggtcgagagatgatagaggctcatcatccatctgaaacatcaaatcaccggttgagtgctttgatttaagcagaggactatcataaacaggacgatctttgtctaccccagttttgaaccttgatgctgccggtgagggtgctaatttctcgcttggcgctcgaggttttccttccggggagtcaatcttgctgacacgagacttaagccgtatcgaatcaatcaatcggcgcttgtcggcctcgataaatgagacgagttctgggtacttttcgtaaatatattccattgcgttgcggcccctagaaattggaaaggctgccatttgattgtcatgacagacattatctagagcacggagcagttgttcatcaagatcgcctaaaagcctattaaaccgttagctctcacgactgcctcgtcgtccgtggggaaacctacctgtttgagatcaggtcctctaaattcagacaaatgtattccaatgcgacatctttaaattcagttacgaagcagggcgcaagtgaattgagaaggtgacacacattgcgcgaagttactgcaatttgttagcggaaagtatggtgagagacattttcaaaactcaccaacctttcccagtgccctctggcagatctgcgatagcctgtcaatcatcaactcgtcggccacgaaggcaacatcggtgatgatatcaacaaaatcctgagtattttttgtccgaacgtcatcaaagagccgatcatctgtatccgcatacatataccgaagaacaaactcgaagatagatctgtcaatatgcttgaggtcgacgtggactttgtcttgaggcgatttacgtcgagactgtacccaaataccaccagagcgaccgacgaatagagcgtagaagaaggggcatctttgacggatgacttgactatgagcaaccatgcaatcgccatttagttcaatcacaacatcacagctctcaaaaaaagaaggatcattgaaggcggttgagaaatcagtcttcatgcttttggcaggtcggaccataagtgcggcagcccgctccagagctggaaggtccagatgcgaggcaatccgcatcacttctgttcggacctgacggtagcgggaagcattttctggagaagaccgagcatgctgccagacatcaagaagagcgtccgtgtagagatagaaagtaagattgagtacagacagaacgtccatgccttggagaagtatttgacaatctccattataatctttttctatagtcaggatttcaggcacagaagcgctatgttgatgccgatagtcgtgtagtgctcttcgaaggactgaactgcggcctgtcagaataaattcatgaacaggcacccgcatatctgaagcggttgtcataacccaaactgttccagcaggtagtccggcaaacgtgggtcgaaaatatagttcggggttagggccattcattaggacttgccgaagtgctgtaactgactctaaatcacgcacttcttcgtcggcaaagtagtccttctgttttgtagtggcgcggattgcgctgaagggagacaggggccaaatatctccccagaggctcgtaggattgacattgatttgctctttggtaacatcgcactcgcgttgaacgaccgcaaaggccccaaaagcattgctgcagacaccaacaacccgggaaaggcagggaacacgagcgaatttgtactctcccgaagaaccattctttgattttcgtcgcctttctttcctccatgctgagccggaagctgtgcagatgatgattgatccatcctggccgacgtcgacgtctttgactgccatatgcgccttcttcacggaccatacgcgcacaggtggagataaggagttacgaatttttgcgggattggtggttgaggttaaacttggcagattctccaatttgttgacctggacagtgaaaacatcccctgaactcgataaggcacaaatagtgtttccgccagatcgaatcttgacaatgcgattgatagaagtatcatagcgggtggccatgaagctatctcttatgaacctggagtttatctccaatggaaaagagagtctggaatagccataatgcgcaaacacccaaacttcatggttctggagcagaattgcggtacgctggtcggtagcagatacactttgtatcggagtactgaacaatgaggcccccacgcgccgtggtgtcgtctgaacctcaagtgaccgggcgtctgagtccacaagacccagttggccttcgttcttgccaaaggtgtacaggcagaagtactataaacaactgagtgaacacgtgacgccgctgccccgagaataacctccttcttgaaggggttgaatatttgccgtggagatagctgaaccggcacgtcatctttgttgttcgcccttggaaggccatatcccaactgaccaaacttgttgctcccccaactaaaaatatctccatgctcggtaatcgcaagggtatgatcctgaccaagcgcgacggacgcgaccttcttagttgcgaggccgccaccctcaatgcaaacgaaactaaatcgcgtactttcgtctccagtgcccaggcggccaccagggccaaagccacaaatgaaaaggttggattcggggtcatccgtgagtatagctgtatgaagcttggacattgctaatgtttgaatcttgagcggcctggctttgataaatgctggcaggtcttgatccgaagggtcaggcgatgacgccgttttgacatcgtcgtgtcgttcttgatgctcccggaagaaacggtgtaaaagatgtgttgggcgtgtgagtgttattctctcgggatactggcggtcgtcctgatctccaacaccgaggttcagattcttgttacttccaaacgtgaatacctcgtcgccaaacagattcgtacttggtttttccaacgcctcagcgacatcttcatcatccgaggaactgaccgaggaagcatcatcaagtccatgatctgggaccaagggtcccagactgcgagaagtaatcgtggacgcatagacatcgaacggactgtacccctcccggtccttaattttaatcagacctccactcggatggcctgaaaatcccggtttacttggatctgtcgcgtcccgaacgtcccgggccattaaggcctgcgcgattgtagcattaccagcatataaagcccggtgtagcgctgtccatccactctccaaatcctgcgcatatatatcaaggtatggcacttctagcaaagcgagagcaaaatcggcggccgtaggtttcggcgacgatgcgacgtgatgcaggagtgtccttccatgctggtcccgagcgttcaactcatcccgggatatgggtttggtcgaccgcgggccaccaccgcgttcaaacacagatgtcacaggagatgtcccggtagatttcttaccctttggcgaagcacccagagaagc

SEQ ID NO: 4830 - DNA, 5583 bp, Emericella nidulans
taaatcctaggaacctcaacccagtcccattcatcgtccaaggtcggtttcttctgatttaggcgtaggcttttttaaaatggatttcctcaggcgttcctggggcatactacaatggtcagctgggaactgtctgagactgcgcctcaagagcaggccttgaatcgaagctgtccattaccatgcgtccgaacaatatccactccttcaatttcgtccagtccaaaatagccctcagagttatcaagttggtcaggcagcgctacctccttccaattgagatcgtccacccggacaacagccgccggcttggactctctatcgtccgcattggttggcttcccagtcctctttcgctttctgacatgcagagttggacctttctggtcacgctgacgcttttgacccatattatatgagaaatttattgagtcaaagttgatcagtgcagtatgttattccttcggcgagttcgatttttggagcagaaaaaaaggcggcagaacaatcccaccgccttctatttcttagttccaatcttatcgccagccccacgcaccaaaagaaatcgcaattgtcccctcagacccctcctctattcctttttgtcgcccattgggaatcgaagatagacagtcgccatgggaaagtcctcgaaggacaagcgcgatgcgtactaccgtctcgcgaaggaacaaaattggcgcgcccgatccgcttttaaactcatccaaatcgacgaacaatttgatctattcgagcatgagaatccggagaaagtgacccgggtagtcgacctttgcgccgcgcccggtagttggagtcaggtgctcagccgagtactgatcaaaggcgagagctttggccgccggtcttgggtcgagaagagacgcaaggaacaggcggcattggagaacttagacggagatgcaccggcggcgaaccagggcgcagacattacagactcaactgcattgaagccgcggaagaacgtcaaaattgtttctatagacctgcagcctatggcacccctccaaggcattacaaccctccaagccgacatcactcacccctccacgatccctcttctcctacaagccctagatcccgaagcctacgactctacatcttccacgccgcatgcagtccgccagccacatccagtcgaccttgtcatctccgatggtgctcctgacgttactggtcttcacgatttagacatctacatccagtcccaactcctttattccgcactcaacctagccctaggtgtcctccgaccaggaggcaagttcgttgccaagatcttccgtgaccgcgacgtagatctcctctattcccagctccggactgtcttcgagcgtgtaagcgttgcgaagccaaggagtagtcgcgccagttctctggaagcctttatcgtctgcgagggtttcatcccaccagccattcacgataccttgcttggcatggacaccctgaaaaatcctctcttcggcggcgcagcaatcccgcagcccgtatcagcggatgggaacatcgctgtcaaagtgccagaagagaagccgagcataaagaagtccgctatcacgtcatcagactctgcaacgagagatgcgcaaactcggttattacacaatgactctggcgactcaacaacgccagaacctctctttaacaatccccagaagttcgctgcagagaacaggtggattccctcgttcattgcatgtggtgacctctccgcttgggattcggatgcgtcatacacgctgcctcctgattatgttaacttggatcctgtacaaccacccatggcaccgccatatcggcgtgcacttgagctgaggaaggagaaaggtggtgcgtatggcaagacgaaattggggactatgggacgggcgtgatcgtgttagccgttttggtcatgtacgtcgcattgagactttttcttattcatcttgaatctggtttctcaattatagaatattattggatggtatagttaaagcttacaagtaattacatagaaatagaggatacccgggtgtttgaaaccaacctcaacaaagtcgaaagccacttcacaaaggcgttgatgagaccaatttttgtagtaagtcgaagaagcagtcaagatgtaatggtattgattgaactcataacattttgtggttaataaacacgatctaaattagtcaaagaaacgcaaagatgcacggtatttacgtctatcaagtgagtcatgtcatcggggatgcgctaagaaaaacagtatagacaggtcatgatgcgtgtacaaagattgcaatcagcatttagcctaataaacctcaagcacatatctctcctcatccttcaacttctcaatctccttccgaggctcaatctttttgccagtgttcttggcttcaatggcaatagcctcctcaagcacagccgtaacatccggaacgggccaagtagggccgcagaggtagaaggatccctcctcgcggatgtaagcctgcacgatctctggtatggtctcgcgcatgcggtcctggatgtagatcttctgcggctggtcacgggagaaagcacaaccgagaagagtaataacgccagcttcctggtaagcctcccattcctcaccatagcagtattcctcacgctggtggcgcgagcccatgtagagcagaacggagccgatttccttgccctgcgccttctcgagagcgcggtgctgcacgaaagcgcggaagggagcaagaccggtacccagaccagccatgatgatgggctgggtggacttggggggaagcttcatgacgctggatttgacgctgacagtgaccggggtgccgggctggaggcggctaagatagcgggtggaaataccgaagcggtcgcgaccgcgggggtccacccagttgacgacgacaatcatgagggcgacgatattaggcgtgaccttttggcatgaggcaatggagtactcgcggcgcttcaatggggagacgatgcggacgaggtcgtggaagtcagggtgggcggaggggtactcgagcagaatgtcagcgtaggtgacggtgtcgacttcggcacgccgcttgaattcgaccgctccttcggggccaccaagggtgaggaggtccttcttctccttctcgtcggaggcaaactcagcgagcgcctcgtagaatcgcttaggaggacgaccgaagatgtcgacgttctgcataagagcctggtagacagtgcggttctcgagaacggtgggatcttcacggctaggaacctcgacgacatcgtcggcgttaagaccgtagaacttaatgaattccaaaacgtcctcggggtcgttctcgcagtgcacgcccagggcttcaccgatgtcgtaggtgaggccagagtcacccaggtcgaactcgatgtggaagatgttacgatcataagtaacaggggtgaggcggcggttctccttgacgtgaacagtaaaggtcttcgtaggtaagtcagggcgaagtgcattctgcgcaccataggcttccttgaacgccagaccctttgcaacagtttgccagtccttgaggaaagtagcaggctcactctcgtccttgtcgaaaggtacaaagctgttaggcttcaagtccttgacgagttgagctacctcagcaccctcctcaggggacttccatgactcggggatttcggcttgtaggagggtcttctccagatccttgctgaccttgtccagagaatcggcattgccggagatggcagcgagcttcttgacagcagactcctcaatggcagggagagccacgtgcaagaaagcgacctgcaaagccaggggctcaagagcaggttcctcgataacagacgcatcaaagcggtgaagaccaattccgcgctccgcaatggcctgcttgaaggcggcagggagcttcttctccagctcgtcacccttaataccggcaacgttcaaaaggaccttgccgttgttcttgactgaagagagaatatcgagttcgctaagcaacttaacgttaccgatgtatgcagtgtcagctgcattgaccgggtatggagcatccaaagtctttgagctcttgcgaatgtccacacgaacaacacctccctgaatcaggttgtcaaacgccttgctggtggtgatgttgctcgccgaatcagcggctaaggtctgtgagataatggtggcgacgtcgacagcggcggaagtgtcaacatcccagaatgtgaactcctggacagtcgcagggtccaagagctgaagaggctcaacagtgctgtccacctgcacaataggcttgtctgacacaagctggaaggaagcggcaatgttgatcaagtcccagcgctgagaacgagcgtacttgatgtcgatgcaagaaggcgcctgctcgcggtcggtggcaaatgtaacggccgcaagaacgtcctcgtaaagagtggaacggacgcctggctcttgcacagcctgttcgttggcgacctggccgaggacgccaacagtcttcacagacttaggaaggaccctcaagaactcctcctcgacgaagggacggtaaacgcgaacattaacaacaccgacacggacaccgtccttggccaaagaacgagcaacctgtacaccaagacactatcgaatggtaactactacaaccaaccgagccacagcaatctgtacggtgctcaccctgtgtactacgcccatcgtgggagtgctggaacccacggtgtcttcttagcaaattcgaatggtatggacatcaaaatcaataagacactggatggcaagcagtatcttgagtacaatatactgggaggcgtacttgatttctatttcttcaccggttcgactcccaaggaagctagtacccagtacgcgaaagttgttgggcttccagccatgcagagctactggacctttggtgtatgttttcctctccgacgcgcatccgggcatctttatagctgggatgaattttgccgctgaccagacatagtttcatcaatgcaagtacggttatagagatgtttatgaagtggctgaagtggtgtataattatagccaagctggaatcccactagagaccatgtggaccgacattgactatatggagctgagaagagtgttcaccctcgacccggaaagattcccacttggcaaaatgcgggagcttgtggattaccttcatgaccataatcagcattatattgtcatggttgatcccgccgtaagcacgagtggtaagcctccatgaggattacccggaaaccatcattgacatgtgttagacaacccgggctatcggaggggagttgagcaggatatattcctcaagacgcagaacggtagtctgtacaaaggtacacaagccaatctatggcggtcagtgtttattgacataaagagagagctaactcatgtccaggtgctgtgtggcctggtgtaactgtctaccctgattggttccatccagccattcaagactattggaacggggagttcaataagttcttcgatcctgaagccggtatcgacattgacggcctgtggatcgacatgaacgaggccgc

SEQ ID NO: 4831 - DNA, 2365 bp, Emericella nidulans
catgcgacggttaacgcagaacgccgactctgttgtcagcctatggtgcttggctcactgtcgtcctttatgctctctcatcgcccatcttgtcctagataacgccgcattgtcgagaattgtcgcggacagattacacgtgcaagacccttccttccagcagacgaaccgcctcgcatgtctcttatataacggtgctgaaggtcctttgctgacgatctgtaggtgtctactgtcatgtctgcctccatcaccacgctccgatacctcggtcatatgcataatgacctcgtcgggcatatcgcatccctcattcccacgccgcgcagccatttcctactcacctcatacacgccttttacgggagataatatcgatcaggccaagacggtccgaaaaacaaccgttctggatgtcatgcgccgtctgctgcagcccaagaaccggatggtctcgatcaaccccagcaagtccagctgctacattagtatcctcaacataattcagggtgaggcggacccaacggacgtgcacaaatcgctgctccgtattcgcgaacgacgcctagcgtcgtttataccttggggtcctgctagtattcaggtggccttaacgaaaaaatctccatacattcaaaacacacaccgagtcagtggcttgatgctggcaaaccacacctctgttgccacattatttaagcgaatcgttcaacaatacgaccgtctgcgaaaacgaaatgctttcctagaacaatacaagaaggaagctccattccaagacggcctcgatgaatttgatgaagctcgcgcagtggtaatggatcttgttggggagtatgaggcggcagaacgagaaaactacctcgacccagatgcgggaaaggatgaagttggagtataaaggattctcacagttcattttcctttgtttcttaaaaactcatgactctaagaatgacccggtgtattctgagaaggaaacggcgttttctttatattctaatgtcaacgtcctctttgtgtttaaccccatacttagcaccagagtaatatatcaggaaaaatggaaaaaattttcaaactctaaatggggatgttcttgtgccggtcgcgatgacgtctctagccttggctggagagaatattaagcttgcaagatgcctggaccgccgccattccaaccggtgctgcatatgtctgctgtccatacattggtctgggttctgatatcttcggttgtcagatggcccacctccgcgttttggggtagagtctaacgacgatcatctcggccacagtccgctcaatgcgccgaaatgactgttacaatagccgctacaatgacatataattcagcctagatataatgtacctaagcgcttgtcatctctctaaagaacttgaagcggaccgatcagttgctggtgagtcattgacagccgtagagaagtggacacattcgtttccgtcgacgcgcagaaacttggacattcgtgcatgcagaatacgtagctatgtactccgtagagtgtggagaatatcttcagaacgagtcgaggacacgagttgaggattggcgcagctcaggttgatgccagatggtgcagtgaagtgaggtgagtaagatgaggtgcagtccgcagttaccgggcccagtcaaaaaatcaagattcactgattgagtcttagcgccatatccgagcagataacctctgaacgtctgaagaatatccacctccaacagctgcatgctccctttggcagccgggttggggaggatccgattagttgactctagacaaaggatgcccaacttttacccagaattctaatttcaactaccccggagtacaaagtacatgaagccggccgctcgaacccggcctgaccctgcggactgcatagctgtactccgtgggtggcctataggatcgaaaatcacacttagacctccttaaatgatgctcattactgaaagctggaccgttctaaaccgaccgagcctgcatctcttatagcctaactgagcacagctcagacagcagatggtgccgctcttgatatcaccctgtgcgttggtggtgtgcgaagtctgtttatccatgatcggatagtcctacttttcgtatttcctgcttttcgataagacggacccctcctttgtaggcttcaatgaatacaaattgtcaactctttctaagtcgatcgatacctttttaatttcccatgcttctcaaggatgcagtgtaaccttttagtccccctttcagtatttccaggcctttcagacgtagtaccttttccgctgaacctcttcttcttgtttcctatttttttcttctttttcttagctttgtatctttacc

SEQ ID NO: 4832 - DNA, 1658 bp, Emericella nidulans
tttttatgtttgttcgggataggctgcactccagcaggctatatatgcagagtagcaggtcttttctaataagttacccggagatacatctctgggagcacatctagctgctgacaggctgagctgtccaaggcagagccttacacagataccccagatgatgccataacaggcactgaggccggatatagggggataggcctgatatatggtggatcggccagatatgggcggatttgggcagtagtctggtcgagacaggccagatctagcgcctctgaattggtaggcatggcccgatctgtctttgaccggggtcagattattgcctgcccaggactaatccaacaatatgtaagatcatggcaggttatagccaattagagcaaggcagatcagtacagcatagtaggagcacagccaataattatcagtaccagggccagctagatacagagggcagcagagtatatagcaagtctactaataggcaggcagggcagccagcacagaggcagggcagcaggagcagaggcagattagaggcaggcaaggccaggtcagcagcagagcagaggtaggcaacaagaaccaggccagggtacagcaggcagagccagcagagtacatagcaaaggcagtagttggcaggcaataggcaggcaaggtcatagtcagggttagggtcatacagtagttggcaggcaaggccaggcaaggcatagtcagggttagggtcatgcagtggttggcaggcaatagcaaggcaaggtcatggtcagggttaggattattaggttataggccaagtaggcaggatatatatatatagagcagcaggcaagcacataccaaggcaggcaggcagaccccaagccagttcccagccagatacagggcccaatgcaggcaatcaaggcaggtcatgtcatggtcaggttttagttattacagttcatggccacagcaggcatgggcagcccataccaagccaggtaatatgatgccaggtaatatgatgccaggtaatatcatgccaggtaatatcatgccaggtaatatcatgccaggtaatatcattcccggtttatatcatggtcagggtttacattgttgtggtttatagccagcccggcccatacacagccatccagaggaggaagaggcaacagagccaggccagccaagcccagcagagcccccaagccaaccagacccagagcccgatgcagggaaccagagccagcatcaccagtaagaatcaggggcatcatgccgggtcatgtcatggtcagggttttgattgttgcagtttataacctgagcagggaggattttgcatggcagcaggccccaggccagcaaagacagcagagcagcagagccgcaaaaccagcacggccagcacagccaatgccgaccatacagagcagaaccaacctggaggcagcactggccaggatccagtatccatcctattcagagccagccagagccaagcagagccaagcagagccaagcagagccaagcagagctgagcagagcccatgcagcgccaggactgaattaggatcctcaataattatatatatatccagccaccccaaggacaaattcataaatcaagtagcttacaggccggggccatatatatatt

SEQ ID NO: 4833 - DNA, 2953 bp, Emericella nidulans
ctttccccttttagaggccagtcctcgttcacattaagtaggtcgctctgtgtgtcgtggataaccgaggcttttctcgtatagacgaatgccttgcacttgcctccccaatctccccgggcaccacccgcaacttcgagcaaggtctttgtcccttcgacgttgagctggtacagcaaatttttatctgtcaacattgcactcgcggtatgaatgaccacgtccggtttgaccttgcgaaagacggacagcatcgattcagcggacgtcaggtcgccctcgtagtagtccgccccaggtaaccggttgtttgtagtccgcaggtcagccacagcgactttggcaatgcatactgggtaacggtctccgagtttggggtagtcgaatcttttatccccctggggtttggggagggaagcgctggggtcggtctcagttgggaaattcaatagctgatcgacgatgtgagagcctagaaagccgcaccctccaactaccaggacagtgcccagggtcatggtaggtcgctttgtagtcattatgacaaaaggggggaggcgaagcggctagttctaggagaaagacggcgtaggagggagcgacgaggcaggtcacggtcggaggaattagctgggcactgctggcagtgaaatctgtcttaatctcagagaaatcagtttatggatagatgggtctggggccgaacgactggggctagctccagacagtgcacgtgatttgatccacttcctacgtagatagagacatgcagacagcgtagtacaccagaggcaacccatttgccacggactgtacataaactacatagcctatgattgaggaacagagagcaccaccatattgagatcacatggatgctttgggttaactgttgagatcagaggaagacaaccagaacctgcaatggaacccccgacacttccagcggactcaatgacatcaagtaagacgccgcttcaagagaagagataagagatgggaatggggagaggaagataagagtcagataaagaagtgcagtacgtagagagagggtggaaaagaaacaagactcgccattgttaggtatctttgccgtcttattatcgactggcgggaaagaaatgagaaagaaacaaaagccaactttaacaggagtcagtggtcaaataagtaaaggctctcgcagattgatgagagatgtgaagcgatgagggatgagaagtcagggagtatggaggagagaaatggaatgacgaagacagactagagcattgctggactagagggcaatgctcatatgacatactaattgccaaatgcgatgcaataaacaagcacaatgaacgacagaaatgacaccccaagtccagaaatgtgaatggaaagccatgcctgaaccgaagtaaagttcctcaagtttctgacggcggctgaccaatgaacaagataagaaagatgagacggaactttgcgaccggtttgcaatgcaataatttttaaaagacgagagaggcgagcagatggcgcttcaatagcccaaactaggagatccgaacacgttgcgttgagactgaacttggataagaaaactgaccgcaagcaggtgtggcagttaaggtgaagaaaatgctccatggccgaaaatacgcatatagcatctctctggaagctcaaacagtgaaacgacacgcggcccaagagtggaataagcaaccctgatcatcatatgtagaccgaaaacatggttaaccagcaacgcccataggtcctgggtttggacgagctctgtaaggtacctgctggggctggccttcggattgactgcctgtgctagtgctgcgggtgcgtttatcgagatctttgttgggtgcgatggcaccacttggatgcgagtttccacccggtccaggcacatgtcgaaccgaactttgcatctgagatgccgtatcctggtacgggtctgtctcaatccgggcagaagtagggacgttggctccacggctttgattagttatagtgaatgtttcaccgccattgcttgctttctgagagaagccaccccttgcaatgtcaccatatcttttcaggatatctttggtcgtgacttccgagttctccttgaagaggtggctgtcgctgagaacagattgaaggtcttccggaatctgtacgttcggtttagcgaacagctcagcaatcagattggcgaatacatacctcacacatggtgtcattgtacgtaatgagcgcgttgacagcttcgattgcgaggaagctttcatccacagcgcttgtcttcgtattgggatagagaatgttaggagtcataacggttgcgagattatggatgtccatcttgctgccagtctcttcatcgacatgggagaaggatgatgtccaattgagaaaagcgaacaagacttccattgtgtcacgatgagctttaggaagcaagcaacatgtgagatgaagcacccgcttctgtttttccaaatcagggatttctagatatgaggttagcacaagtcaatatgtcacggcaattgcgacatactttgagatgcaacaaacaaacggtgcaacttaaatgttagaagtggatcgggcatttcgcggaggaatttcttgagaagagcagcaatctgaactgggttctcctttgtcaaatccacttgctcgtacttggtgtcgatcatctccgagatgtctttcagtcgtctaatgttgccgtttttccggaagacaccttcaacagacatgtccatttggcgcatggcagacacagaatcatcaacaagagccggaatacgaagagcccccgggccgacgccatgggtagactcggtgccttccttttcaacaaggtagtcaaggctaacgccatagacgcccttgggcgaaccgcccattttggcataaaatgaccccgcgttggtgaaggggcgggtgg

SEQ ID NO: 4834 - DNA, 5989 bp, Emericella nidulans
gcttgacctctgcgtccgggatgcagccgacctgagagatgctagcttttacatcaacattagcaggccttaccctctattaccgacactggtgtgatggatatcttccttggaggccacggactctccttcaagattgccgcttctactgcccagaagcaggatcgccagaattttgtcaagctcgacaaggattctgtcaagctcgatgacattgacatcaaactcaagaagtctaagcataaggttctattcactctcttcaagcccttgctcttccgcactgtgcgtcccgcacttcaaaaggcccttgaaaagcaggttcgtgatgtttttgaaaaggccgatgcctttgcatatgacgtgcaccaagaggcccaacgagtgaaggaacatgtcaaggagaatcctcaagacgcaccaaacatttacaaccgctacttgaactctttccgtgccaaattggaggagggcagacgcaaggcccaggaggcttcccagcaagctgcccagcgcgacaccaaggcgcagaccacgactactctgaagggctcgctgttcccggacatcaaacttcctggaggcattaccaccaaggctaccgaatacgaagaacttgcgcgtaagggcgagcgctgggagtcgcccatcttcagcattggctccgcctcggagtcgagcgacatcccgaagccggaacagatcactcgtaagcctcacaacactgccgaaagcaagctccgggaccgtcaatccaacggcgctgcaactggtggcgcagctggcggtctcgctgctgctcctcgtggccccgtcaccaacggcggcgcattggctaccggacgagccacggacggtggcccagcaaccgctgccccaaccctaaccaacggcagcaccgcggtgaccaacggtcatgcgaagcactatgattctctcttaagcaatggtgctgatggcaaactggctcaggacatttcccaaatctcaggaactggattcaaccctcaaaccgcatagatctttgaaatgcgacggtgacaaggacgaattctgtttcctattgttcttttgtagcatgacaaacctaatcctccaaattgaattctcacccacattcttttgtatcatacgtgtcacgcaatcatgtctttgatttttttttactaccccatcctaggtagctaggtagttcttatcaagtacgagttgtactgttaattatctcttttctcgtgaaattggatttgacaaatgcttttgtctacgctgaatcatctataaaatctagccaatatcttttctccgtgattaaatgaagactctttacatctgattgaagtacttctcccaccccaaatcctgcatctttacatttttcatatccatgttctccttccgagcatcctcggcgtactccgtcaaccttccgctggacatccgggtcaaacgcgccaatgatccgcgctgccaggagcgcagcgttgatgctattgttgataccgaccgttgcaacggggacacctatgatgaccacatcagtatactttgtcttcgacggacagaaaacgagaaatgaaactcggccatgggtgatagcaaatacatacctctaggcatctgcacaatactgtacaagctatccactccatccaacgatgagcccttaactgggacaccgatgacagggagtgccgtatgcgctgcagccataccaggtagatgcgcggcgccgccagcggcagcaatgatgactttgataccccgggccgcagcggaggcagagtattctgccatgaaggtaggcgtgcggtgggcggatgtgatatcaacggcaggttcaatgccgaatttatcccggagcaacttcagaccaggcacaagggttttgaggtcactgtccgagcccatcatcactgcgacctgcgggggaggcttagtaacgcccgagggagcgggattcgttttgatgtcttggcgctgggagcggatttcgtcgacgacgtcaatgagcggttgaatatattcctcggccttgtgcattgtccatgcggtgacggtgacgtggcccatcttgcggcccggtttggcatcgcccttgctgtagaggtgaattgaagcgttgggtatagagaggtcggcctcggcagctttgaggtgcgtatccggcgcgcagccaccgattatgttgagcatgatcaagggttggcgcagttgcaggctctctgggaggatgggcaggtcgaggatcgcgcggagatgggcatcaaattgggaaagggcggtgccctcgatggtgtagtaacctgagttgtgtacgcgggaagcgagttcgcagaggagcaggctgttatcgttcatgaggaacatttcgacgccaaaggcgcccttgccttcgaaggttgcgacggccttgcgcgcgagcttctgcgcggcttggttgatgtgttccggaacgttacgtgcgggcgcatagacgagcttgcagatagagtcttcttggacagtttcgacggtggggtaggagagaacggcgtctttggttttgataaccattacagcgagttcctgcgatctatgttagggtacatgaaatgatgcgcatggaggatgcgaccttctggtagtatgcccacttctctgcgtacaatgggcggcctttgaggaactccagcgcatcggggatatcgtctttcgagttgacacggtaattaccttgatggtagtgttagcaactgctttttttggctcaaagtgaggactcaccgcgtccatcgtaagccatggtctttgacttcaacatcaacgggtatcccaactcttcaccagccttagccaattgctccggggtgttttccacaagctcacgatgctccgccatgggaattccatgttttgcaaggtgctccttctggttgaacttgttttgaatcgtgcgaatagcctgccaactcggctcaatttggacctgcgacgcaatctcctcgagggcataggtgtcaacgtgctcgatttccgccgtgatgacgtcgcactttttagccaattcccgaacggcctcgcgttccttgaatgagccggtgacatggtcgtcgtgggcactgatctgcttggctggggagttctccgcatcgaggatgttgcattgaatgttgagtctgttggcagattcgacgaacatgcggccgagctggccgccgccaaggacgccgactttgcgtgagttccacatcctcaatagcggaggtctatgttaaatgagagacggggaggagcaatcaagtagagaactagagatgaatcaccgatcacgaacttctgcccctccgtggctccgcaatcggccaaatgaggaaaaattggcaaatcgtctatcatcacgtgatacgctgataaggttaccgatgtacaccaatcagcagccataatttgacgggaaagcagtcagtgccccactatagataacaccagggcgtatttggtacgtacacattcattacaagtacacgccgcgatcgagcgaagcatcgcttcctgaagctcaagttgacttctgatcatctcggcctggctctgtgcccaacagctctgagcgataatgtctttaggtctgtctaccttcttctagctttttgtccaagtataaggcgcttcttctccctcctcgtccctggcacaattggctcgcggactaacatcatccttcggcagatgaagagactttggaaatagtcgccaacggcggctcgatggatctgtatgctattcaatgactcaatatggagctcatatctcctatgcactgctaacatacttactcagtgataaatggccaagcatagtagagcctctgctcacgcgactggaatacgtatgccgcctaagacctcccttggagcatcaccacgtggtagctaatatatgttagatcatctacaatctcttcccaatgccagagatgcctgccgagtcttcatccaatcttccgtatcagcagcaatacctgaatctgacaacctcctccgcttatgacccgaaccccgtcccctccagcagcaacaaagagaacgcagctccctcagacctccggacaaactcccaacctcctccgtcagaccccggcacgcaattgccttcgtcgacggagcgcattccagactcgctctcagcgtcacaggctgcctccacatctacaactctccccgcaccgctcctcctcatcctccaatccatccagtcaactcttagatctctattctcgtctaaaccaccacacacgattcagcgactagcggaactcattcttcgtccaaatgcacattaccggacactcccagcttacatgcgagcccttgaccgcgttgtatctgtcaccagcaccgccgacgtgtttccgttcccaatgcaaagtggtgcagctacagcacagcctaatgggacactaaatggcgcgcaggccacatttagcctgtctgacgacgcactaggcagtgacgaggctctgggcggtgctcttctcaccccgataccttggctgaataatgcttcctcgccggagcctgaagggacgggtattagtgaaggtacaataagccgttgtatctccaagttcagtccactaaccataagcctctcttgtgcagtatccatagtaacgacttctcctaccctccaaaaccaactcctttcacagcccgccgacctaaccccgcaagaacacgttggtattgggggtaacgtactcgagggggaaacaccagctgagcccactgaggaagttcctcacgctcgaggtccctcggttcttggagtcgaagatatgggcttacaggacggtaaaggagtcgaaatgacccttcagggtaaagagaccaaggcagatgctcattcgtccactgcagaatcatctaccctttcgggatttactcaggaatcagttgctggcgccggaaccacggagtcagccattcaaggtcagaaggatgaagacgccaaacctgaaattacactgccactgcagatggggacggcgatatcactctatccgatgagcctcatatatcgcagaaaggccaggacgagaagacataatggcaacccatgcgcaccaagcggaccttggtatgtcccggagcccaatagcacgtcttcggccgcattgaggcggagatgggcggagttgacaataaactgctctccgtagtcggatctgctactactcgactttgatgaatgaatgatgatctgaactttattatcctatgtctaactgatatctagcatggtctttaactcttgtactttccgaaccggctttgccatcattatatgatgcatcctttaccgccctgatgccaacgttttagcgtgagcagtgtacgagccgcagaaacgtaatgagggcacttttttctttttctttttttttttttttttctttcccggtacagagcgcagatcgacgtaaatctactcggtccagttgctcttaaggtggatcacacatggatagacacaaaataaagatcttggataagcttatttctggaccagctatcgtctaattgttcgttgatgcaatcgaaatactacctgatgcgtacaatgagtaattatatattccctctaagccaagagaaataaagcagaggttaagatttcgaactaaacttggaaaccgggacaaagacttatgatatttatctatcatttttttttcgtaggataggtacattggtcttgcagtaaaaaacaacggggaagaggtatcttaggcagaaatgcaaataatcataaatgagacagaaccgaggagtaaaagtcatgaagcatcataactagctaatagaccgaccatccaataaactatttaacctaggatgcacaacccaataggcctagacggcgggttctaccgtctgcagaggcacatagctaggctctatactcgccgactgactagggcgtccagtaaagacgaacgagatcc

SEQ ID NO: 4835 - DNA, 1832 bp, Emericella nidulans
aggctcacagtcagatcaaaactctgaatagtacacttagtcaattgcctcatgcatcactaggtgagaagggcgaccagaaaggcatcagaagcagccagagctaccagctgggtttgagatagatagaacataatattaataaccaatatgatcagaaataagaataagagtatgaaataatcagcataatagagtatgtactaaagcatcataaataattgcttacttaaagccctaaattaccaatctgcaccacagtacatacatccttgtatacaaataattacacaaaaaacagcataatctatgcattctcataatcttggcaggtttatattgtttatactagtaaggttaaccacagtgaccgcggttataacctagctataaccataacctcaccgcagagcaaggttatcagaatctcatgaccatcacctcaccgcgcggttatggtgatggttaaccgcggctaaccgcggttatgccgcagcctaggtataagtactatagcagctttaagtcggcggtacattataatagcacccatgattaagaactctttagtgaaaacatccttcgaatcctgtgtataaagaagtctatataattttacatcatagttttctctctaattgatctttatagctagatagccaaaggagttccatgctcttcctctctcaccctacagtatactataagtatactgtaaatttttacttggtaagagtatacttactccctctaccttgttgttatatactgctatattactattaagagctagacttgttaaaccacgggtcggggcgggttttcaggcctacctgatccgcccatgcgggttttggggtgggttaccttcacagtaaaccgcccatggatttagcaaataattctaacccaacccaaataacccaaaataacccaattatgcatatcattactttgataggcagtgatctacatagctaaataaaatactgtatttaaatacagtattataaactatctaagtaagcaaatgtaatctaaatacagtaatatacctatttagatatcttggcaacccagcgggttgctccgccgggctttggggcagccataaatatccaaaacccaatggattattagaagctcgaacccaacccaagtcttggcgggtcggggcgggttggggcgggtttcgcgggttgggtttaacaagtctattaagagctggtcctgcttatttaacagcctcaaatagtatatcagaccagtgtgtgtaattgaagcaatcttggtaatctttaaatactgaaggagttgcttttggcctgaacgccttagaagttctatcaagaacctaaagtaatcaataaaggaaagaagtttatatataaactaattccctacctccttgtagactacagcatccttccagattttgtccaagtctactatatcccatatcttctatattaaggagcaagcaacttcaaggttatcagtatttttattaaacccatgtttgcctccttctgttagcgcagattggtgaaggatgatatcttggataatagtatcctattgaaagctctggtgctctttggcagccttctctagaaagacctaattagtattaaactatataagcatgtggctgataatgctagttataatagttatattattttgtaatgcgccctaacccactggtccctgggaacggcagaatggttccgttagggtctagcggcgtattatggcagaatttttggccgatgcgaatggctccattgatgatcaggcgaagagttctattggaaccagacggccgatca

SEQ ID NO: 4836 - DNA, 3622 bp, Emericella nidulans
agtgggaggaggggggtaagaagcgcgcagtcactgcttgagtgataaagaatgactggataaaaacgcgagggggaggggaaatgaaagtgagggaaagaatggcaggactggcttgctgagcagaatggaaatatcagggcaagaggtcttctttttatacccgggctaggtataatcggcgatacgacagacagccccgtatccgactcgtccagcaaagagtcgagtcagtggctatgccagaccatacagaagaaacttctaagcgatcaaaccgccagaataacagatgaatcagttcctcgacccgaatgcttgagattgcttgactcgagaacggaactgctattggtggaagacggagacacaagcctttgccaatctaggtgttcattttgatagattgggcttattccacaggggtctatctgaaactgatctagccctaattcaagtggacccctcactctcagttgagggggagtcgccagcctctcactatatccaaaggtagaggaagtaacaattcgtcatgcatacagtatccggcttatcaagaaagggaacaaaaccaaaagaaaaaaaaaaaagaacggccggtctgatgaagaacaggatactcgcaacgactttacaagatgaaaccataccccgagtcggcttgtatcttgagaccgtaaacaccaagaagtgggaccgagacaatctatccatgacaggctattctggtctcgcccgtgctcaaatgcagggagaagctcagcgactgtcaagtgtctagcgattctcacctccgttcgttatgccatgaagtggaccgcatttatcggagagggagtgcgtaggccatatcaagatcggtgttgagagttgtggcagttgttgatcgcatcagggcatgaaaatgacagcctgatgtgggggcattattccgttcatgtaccgatttaacaccacatatttttcaagagttagtcagtgtggccgagtggttaaggcggtagattcgaatgcctgttcagcattattatctactgggttcgcccgcgccagttcgaatctggtcgctgacggtttttttttttggcagccaagtacaactgcgcactgaccgggcattatcaaaatatgtaatttatgcaatccgactcagccaaccagagcattcagttatagagtatcgtggcagtgccaggcccacggataatctcataccccagagactcctgagtaccgttccacggttaacagcacgcccagggcattgcctcggatcgtgacgtcggggatggggagacttgctgtacccaaatcatgcgatcagctgatggtctgacctccattcatcctttttaaacactctcgttctttgtcctctctaccaaaacaccacaagactattcactgataagaactacatcaattctaccgtcttactaccatgcaccctgaattctccgcacatcccccgcaacgcccgactctcaagcgcccggccgctattccgtcggtccggatcagacgctggtatgctccctaaccatccatcgctttaactctaacgttaatcacatcttaggtccatccccctcctcgccattgcagccggcgcctacggaatcgcccagtacggggcgatgcagtctaactcgccgtaccgggtctccagccaactagccgaggaggagcgtctccgcaagaaccagcagctcatggacgcctacgggtacaaagacaacgtggaggatctgcagaaggccctggaggcatacgaggtccaatgatgcgggctcatcgcgtcgacgaaagcgctttttgatattatgtggcgttggcatcgggttggagttatgtttggttgctgattgaattgaatcgctcggcgtccggagtatttactgtcgtcatcggtttctgcatcgcttcaacagaatgtcggtactatttgatgccttttgttctctttacgactcatgatgaatatatatatatttatatatatatatctatgtatatctatatatattgaaatttatatgttaatttacgttatctactctgttcaggacaagatcagctgctggggtccgcaggagatcaccgaagccaaccgagtcgagccttcttcttttgtctttgtctgtttcatccttcgctctgctatcgtatgatcttggacgcttgtcctttattgagtattcccacatttcccatatctctaactattgccgcgtccagtatcagtccaaaatgggagtgcaacgggcagccgctattttgttgctttttctattcaaatgccgttgtgtatagattcggaatgtccatgcggccactgcatcacaaagaatgctcaccattcgtggccccgtccaactgtctctgcgctgtgacgccatcgactggacctgcctgatgtgctcgactaaacctgcgatagcttcatttcgattggaagcaacgatcctccttgcggttgctttctgtcacaaaacatcccgccaagtgatcactgatcacacgccacaaggcagccttatcttgagcatgctgatcaggaatctggacgactcactgattgggtatattaagaatgtcgcctgctgttcatcttcggttcagtcaagccctccatgcatctcgcaacgctcgctactcttgctccccttctcttttctacctgcgccggccatgtaacacagtcgcgattacatgacgctagttgcaccaggaccaccgtagccgttctgtaggttatctccctgtgtatcctagatacggtgcagagctaatcgggtgcgggcagaggcggcgggatggccggtgttactgctgcggttcgttatccccttgtcatgagccggctccgctaattctcgcagcaagctttagcaaatgcctcgcttcatgattttatcattgttgagtatcgggatacccttggaggtcgggtctggcataccgaattcgggcagggtccggatgggcaaccgtgggtgatcgaatacggcgccaactgggtaagtcatcgttgatggccggatacggagagcagaataggagagctgacagagagcagatccaaggattggggtcagaaaacgccgcaaacccggtctggactctggccaaaaagtacggtctcaaaaatacatactccgattacggttcgatcctgacgtacaatgaaaccggatataccgactacagccatcttctcgatgaatacagcgcggcctcagaaagggcatcagagcgcgccgggagtattctcaacgataacatccaggacatgactgcgcggtctggcctggcgctggcaggttggagaccgcgcagagacgaacattgcagcacaggctgtggaatggtggaactggggtatgaaagagcggcgtcccggcggttggttacactgaatcagactttgcaagttgcagcagtaacgccccatagattgggagggcgcctacacccccgaaaccagctcgtttgtgtttgcgtcgcctcggagaacttgaccttcaaccagttcggtgaccagaacaacctcgtccttgacaggcgagggtatagcgccatcattcaggcgaagccagcaccttcctccaccacaacg

SEQ ID NO: 4837 - DNA, 4051 bp, Emericella nidulans
ttcatgcacgagtatactcacgactgcgtaatgtttgataggaaccagccactccgtgtgcaatgagcgctaattcaagaccgtctagcaactatagcggataagatacaggaatgcattcgatcaatcggtggcctgaagctacaaatggaaaaggacttatatcaaaacgagctagtggagaagtaaaccacgacactatacgcttccgtcaagctgcatctctggccagaagacgcgctttcttgaccgcagggctccatcgcttggagaagcaacttaaccagagcaaaagtaccgagacgtaccagagtgaaagcactcgggcggatgctgactcggattcggcaagtgatgggaaagaagctgactttgatgggctatactcttccccacatgacgacctgaacagcgacttcaacaaccggttcatgatccacagcgtccaactaaagtggaataactcactgagaaatattatacttcgatatatccaccaggtcagccagcggcgagggtttgtgtactacatgtctcggcgagctgtcaaatttatcctcgatatcgtcgaagagcagagcaagaaccaagccacgtattcgaagttgttcaggggctcatcaagacggccttctgatgttcacgatgatgatgacagtgttgaagaccgaattgagcagttgcttcacgatgccaagcgcttcgtcagcgcggaggaacaggatccacctgaacagaaagatccgccgactgtcaggtctgattcaagcgagacatatcccctgagtttactgctcagaacagttaccacctgcggctgatcgcgcctcagatccagcttcaaagtgagaagaaccacaagtctgttattctggtcgctgcaaagggcatgcaactgcaggtcgtctctataatggacaaagaacgtgtcttcgacgacgtgagcggtctcgtccaacgccggttcaccctcaacatggacggcgctcaattctttgttgcaacgcagaagaacctgatgacgcatctgcagttctacgccggtaacaagtacggcaatgcgccggggtctgcttggccgccgtggttgacgcttgaagccatgtttgattttgagctcaatccgttcggtttctcaaggatcattcagaagacttccgctagtttgcgttatgacaagtacaataacctccgcttgaagtataacgatgaggtagccaaggggcagccggatgagctaggacatcctgacggacaagaaactcgaatggacagtatcagcgtcgattttcctcaatttcgcgctatttgtgattctgctgagtattacacgctgtatatcatcgttctcgatctgctgctttacagtgaacctcttgagaaagttcggaacgaacgtcttgaacgaatcatgtttacgtcggacttcagtgacttaaggggcgctccagagatggtttacaaactgcagtcacgcattcgacaattggaggagatcaaggaacatttccaaatccatgctaagtacctcgataagcgtggttgggaggatcggttgattttggagaaggatattgcccggtgcgaggatgagctattcttcttgatgaaggcaatcactacctcacaaaggaaagttgagccaactgtgacaggagcaacgggtctcttgcgttggaatatctccgccagtgagatcgtttggcacttgatgaaggacgagtcagagccactagtagaatttcagctgaggaacgctgaatacgaccgcactgataatactgatggttcgaaccacaaccaagtgtccgttgagcgactttacggcctgaatctccttccggatgcagtgtatccgcggatcatcgtgccgtatcttgaccaggcgcgacgtcttgaaggccctgatgactatatgatcaagatcaaatggcatatgctggaggcccgtgctggaattcctggtgtggatgactaaaaagtgtcattgttccccgtggaagatccaattgtaacatgagcttgggcagagagtattcgagtacatgttcccgaatgttgggtcgaccgcattcgaaaatggtggcttttcgccttttatgataaaaaacgtcaagccattggagagtcttgattccgactacaaggagtctggtcaaacctgtccctgcagcctacaacatcatagcgacacatctggagacgatcccgcaatgggccctagtccacttgagctgagacttcaacccacgttgtctttatccgagaacccccggcttgaacgccggcccacgcatcttaaggcctttgcgatgacaccaattcacaaggagagcggccggcagcaagcacgaccagccagcgcattggtcaagaagaaatccgctgacagtcttcgggttctgtcgcggcaagctacgtccctttcggcgaacggcgtcaacgacgaaaaggggaagaaattcggcttgggaatcatgggcggcaagggtaaaggcaagaagggcatcgacgattttgcccaaatgatggcgcgcgcatctaactacatgacccttgcccatgtccgggtccacgatgtcgtcctttgcgttagctataagggcaaaggagagcacaacattgaagatctgcatgacttcgttttccgcctacctatcctcgaataccggaacaaaacatggtcaaacctcgatttagccctgcggctcaagaaagatgtcatcaaggcgctcatctcccacgcacctgccattcttggtaacaagttctcccatcaccggccttcaaaacagcaattgagacgctatcgagagctggcgacttcatctcagcttctgaataaccaagacacgggcacatcgccgcccgagaacggtacaagccccagcatggctagcgcagactcaagcagtggatacctgtcggagtcgcagtctcatcgttcgtctcctctggctcggtcgaattctctggggtcgagcatgtacagtggcaaggaccaaagtgggttatttgactcgcgctctgcgagtgaagtcgacgtggatgcgcgctgggaggtgagtttatccaacgtcgcttcaatgcgtgcatgcgaactaactgaattatagcaatctcgtcgaatcgtcaatccccctgcacggcccgtgacctccggcagtgcgataacacgctctgatacagcccggaagatagactggtctgaagatgggtaagcatttgcgcgcttcgctttcattccagtggtggtcaaagcactaacacctaatctgcaacaattcagctcaaagtcaactatccgcaaccttggccgcaaactactccctggtcggaagtaacctaccacaaaacggccttcacacctcacatctctttagacaccatccaccatcgatggactctctcgccctcacctcgcaaaaatttccttcgcattctacactcataatattccatctttatcaagataccccagacggagaaaaaccggagatacggtacggaacggtatatacaggcaccggcgtcaggactgttcattatcggatcacgatccggtcctttacttctgttctaccttattagcgctgcttcacatccttgtttgttgtgctctttgctatatactttgttgctcctctatttagccattgccagggtgttttttttttttttgcattcggtttgatttggtgttccaacgtacgtgctctattgttcagcgtgtggcttcaacagtcaagaagagtggctgggtcgtttttgatttggatagcctgggatggaacaggactggacatggttttcaagggatatattgctacaggattaccggatagctttaaatagtcatgtatatagaatttagcgatttgcgtctctgatcaggtgtgcttgtctcgtcgtggctgtgtggatggcacgtggcatccatctcgcttgaattctcgctgcagggcacccgactggactgaactgaagtggatcaaattgtacatgggcttgtgagtataactacgctagcgtacgctcacttggacaggaa

SEQ ID NO: 4838 - DNA, 2441 bp, Emericella nidulans
agcgagaatatgctaaagaaccatgcccggttaaaaacaaattccttgatgaattctggccggtgctagaggacgacattaacgggtccttccactgtgaatataacgactcgaatgctagagtcacaccagcaggtttcctcttcgctttccgcgctgacggcttgatctaacgtcctattagttacctggtcgtgtttcaaaatcaaagaagtcaaaacagcgggagagtacaaatggaagcagcctgccatacacgtggattggaatgcagacaccggacgacacgttgtgcacgtcatcgaaccgccgttgcagaggcccagcgaattccttcccaggattccgcccgccgaagaacgacgatgtaatccattctcctggcatgcagcgtttgcgcggatggtgctcgagcagtatgatagggcgttttggctgttgagagacttggtgcgaaagcaggagaaggtgtgtagctgtccagtcgccaagtacagtacctgactgatcagctaggaacgatcagagtcagcacataagccgaacgattttccccatctgcatgacatcctgcggcatcttttccactatgaagaaacgatcgaggtggccaacatacgttgcggatgatggcggctgaaaaagatcgttggcgtaacgaagacgaggaagacattcggcaaaacctaggaatatggattaagacccgtcagcgtatcctgcacgaggaaaagagagcacattcgttaaaaactcggtcgaagtcgttgaatgaccggcatcgaaatgagattaacctggtaacacatctagctcaacaaggtcattttcagacagaaagatgctaacaaggcaggcattcaacctggtatctcagagcttcggtagcgacgcccgaacagacagtaacatgatgaagacagttgctatagtgagtatggtgtatttgccagggacgtttgtatctgtaagtctgctcacgtgcattgatccgctcaaacactttggacatgtctgactggagacaaagggcctcttcggcaccaatttcttcagctttcaagctgacccgggcaatacatggctcatggctgacgagttctggctctactgggcagtgacgctgcccttaaccttcgccacggtggtcatcttgggcgatctggcactggcaggacaaattcgtcttcttgcggaataaagcgcagggtcaaaggtcgaatacatctgctggtttcaccaattccaggggcaatcttgagtccaatgatagaccgaacattacttttttgagaaggatgaccaccgcacttggatggggagggggtgtgcagcgagtaagaacggtgtgatctaatgatgactattacgagcagatatgactatgaatttataagacattacccgaggctatattcatgaactcagccagacagcaatcccgtaaacaattaacatccaaaaaaggcatgggtatcatcaatagtgcatcgtccacaaatattcaggagtccgaattcaagaaaaaaggacctgtttcggctggaagcgatatctttcgttctagcgccatgttctgtagggtgcgcatatatccttttgtaacgggcgatcgttgcgaaaaggcaccggtggctaccacgagtgagataaatgcatcacgattgataggatcgtctataacttctagcagattgaagagtgctgttataatgtaaggaacgttgattgcaggcatccggtcggctccccacctagaacgatggacaagggttaactgcgcgactttgcaggcagacgacagacagccgtcgaaagcgtaagcaggagaccttagagcttcacggatattcgggctcagtgggtgagtggagggatcgacagactggaatcgaaataggccgtagactgccgacatgatggtgtggtagtgcatactagagtggtcagctggaagcactggcacaacctgaaaggagctggcatgactgttaagagctggcaacaacttactgtagagagagaacatgaggaatatcaacattgcgttcattcagacatatcggtagctggtccagccattcaccgagatactggagtgcgtcgagtttcttgctactcaagtctaaatggagcaggggtgtgaagagagcttgccccagattgtacgcagttcggttcaatttgcaaacggcgttaaaaaggcagaacgtgtgtgcgtcagactgcgagcaccaagtgtggttcttgcactggttgctaggtggcggctgggagggtggtggaatagctgggaattttcggactagtaaagcatgagccctggagagtcagcaagtccaacggaaaatctagtgagtgtaacgtacaaggaaagattgaatataccccagttcgtgtggttaacataatcaggtggagagttgcaggaagccaacggt

SEQ ID NO: 4839 - DNA, 4768 bp, Emericella nidulans
agggagagcacgcagagtaatacgtgccggtgatgccatcccggtgctcgaggtctaggagctggattgcttcgttcgtcatggcgaagtccttccaaggccggtaccgcgccgagtatagcgtagtatgtacagaccaagaggagccgaatgattacgaaaaagcaagaacgacaaacagtgaaaaaaagagatcacgatcttccaacatgaccagcattgaggctttccgcaatcaagggatattctctataagcgcattgtcagtgaagtcccagaggaacactgtattagaggggagacccggccaccaaaagcgcaagggaggtgaataagtagtgtactgtaggggtttgggggccagacaatgatcaaagagagcagatcctagttctattcaatgaggagtctcatctcaacaaaatgaatggctgagttgtcatagctatatctaagataaagatacaaaatcggtgttccctttgaaaccatcacgataggcttcggataataattattgcgtctctgatcttaattgtcggggcatactgcccttcagtaccgcctgccctggggttcgacctcgattagtctttatttagtaagctagttgtttagataggcaggccattccggcgtatacataagcagccacaactcaacggaccaaatttgcgacctcaggtcacctgcaaccaccattccggccacccaatgtgagaactatccatctcttccacagtaattgcctgtcagtactgtaggggcttggggtcccaaacaataatcaaagagagcgaatcctagttcaatttaatgaagagtttcttatcaacggaatgaatggctgagttgtcctagttatatctaagatgagatacagaatcggtgttgcctttgaaaccatcaagataggcctcggataataattattgcgtctccgatcgtgattgcctgtcagtactgaggaagcttctggagcttgagcacgaagtcacgggttccacggattcgcagcagacgtcaaaaaagcccatcttgaacttttcgtagacgcgagattcaaggcatacttcttcagactctgagaaggagggatctgcgtcctgagagtcataacaggcgtagcggccaggcagataatctcggtctggggtgtctggcagttgaccatgatctggcagaggattggcttgctgcggtctcgagaagagaaatgcggccattgagaatgtagctcaaggtaattgtttggctatgtggttctgaatatgtttgttttctgtcctcttttaaagtatagtctcgtggtgagattttacgaagagggatccacgtttggcattaaatcctccagcgaatatgatatataatccttatattgctgtcttccaaagattgaacaccatatcccgacggcaattaactcctcgcacatggttaacaagaaagtgccatcaaagctgaagtagccgcagccctaccatggcagtctatcccaacgattacggggctttgatctgcataggaaaacgcactaatccagtgggcttgttacaactaccaatcacatatggattagtgccgtagccggatccttttctagggttatccgtgattctgtctcgtccaggattcagggtcttgtggtcatgtaattggtcttaattctgtatatgggtgcctgagaatatcgccgccgctgccccctgcatcattaatcagtgcggtctttagtaatcgtcgaaagaactattatatatcgtgcgagaagcatcgaaggactcttagtgcccttggacgcgtgttggggggtatcggatcgtggcgtgctggggttgatggtttattatttcacccaaacctcccacatctgagcctaagtgaagcgatgcccatcaattagttacaggggctatatacatcttctgctgttttggcactggggctccaatagagcgcgctgagctatcagaaatgatgctgcaagtatatgttaaggtacgctaggatagtccgccccatctcaaaattaattgcgcaagcatagagatattcttcaggtcaaagtaatgtctactaaagcgatctcgctcacagacccagcgcatcctagttgtttaccactgactagtcgaggccgcaaagaaaagggttcttgggaagggaaaacactactacatctttgctcttggtactgagagaaaccatcaaggaagccatcacatttcagtatcatgtcctatcatcgatacaaggattgttgtaccagtattcactttaggactggcgcgctctttagtatagtcactgcaaaagacggcgcggagccaggaggttctgatctggctggacgcaacagcagagcactctcgcaccgctacatgtcacttggttttcgagtagtcagctagattacaaacagccaagtgatggcaagcagagaccggtcatgccgaagagggcaaggatgactttgtgggcggccgcatgccgcaagcgctgatagtgaggtgtcatgatcgtctactcaattgcgactgtaaattgcgttggctatcgactagagacatttgtatacatcagtattgctggttagtctgtctaagatttctaaaggctcatccctatttctcactgtagaaacttccagcatagatcggatctgttagtgcccccatgagccaccaaatcaagatgggccatagtttgcaccctggtactctctatagaatgcatacttcctgatcttactagaaaatcggtggaaacgataaaaagatgttagtagcacaataactggccgcccgggtttagtaatgtaccctacacagacattcagcattctcgtccatactcacttcgattaagctagctacgccttaacgcgcgattcaacgatagttaacaggaagaagtgcataatatgatcccagccactatctaggtgaccccgaaagccgcggagggaccgagtcccccaacttgggaagcgtgatcagtcggttctatcattcaataccagatacaaaaagtgaccgtctaaattactcagcttagaaaaaagatggagacctcggatgccgcgggataaggatataggtctattaattctgcgcacctgatgtacgatgcgcagaagccagaactgatagccgcgcaatattcgttgtgatcgtcgaattactcaagatcctgtctatcaagctgtatacagctcggcggtcgtctaatccgtcactggaacggttggctacggtccttgggggatacggtcctactcgggcacagaaactgcatcggccgtaagagctgttgatcttttcccgcatcctgcaagcccttcgtcgagatatctcaggaatgcacatgtattgctaatagattcttacacattaggtataataaagttgacttacgtcgcggtcctggtgcccagggccggctaagatgaaaggatagtactctagccgccatgttacttgctatctctgaaacccccgcctggaaataataaatctagcccggtatacgaaccctagctcattgtttgtttgcagatcaatttaagtgtaaaccgcacacctatcacggatagtgtcggagtagtagacgacgtagggcacttgatcggcaccgggggaagataagcgactcacatcccggtgagaggagccaaagttatcgcgctcgtaccgcgaatggaggtgacttgatgcagtatggttccaggttcttcctgtgtctctttattagcagtatgtcaatagccctcgatgtttttagtcgcctgcaggtatatatgatctccggtcagaaggcctggcagggttatcgggaacctccgacattactgggattatattatttctgaaatctggccctcttgcaccatccgctcgagagtggtgactagactaagtctaggcacatccgcgaagatctgcaaagctccgcagccactgagcgcccaatctcagggccgggcgaatcacacgatcactccgggggatgttgctggcgctagagcagattcaactcgcttcaagcgtcttgggttgcatttctaagagcatcaaccctgacgccacctgctggtcctttgattaaatgtcggggtaaagacaggtaagcattgtggctgcttaggcgtcagtgtccgttgacaaaggcaatgcttggtggtgatagcttgcagaagtgacatggcttcctacaaaaggtggatctagggcaactgatgaagttgcttaggtatctggtgggctggtagttggcgaatctcttgagcctcttgtggacgccttcatattacctccaacggcgacgatctgcagacgataagcccaatccttcttccgggccaatgctacacccctctgccgacaaggttctagtgtgttcttagtgcaatgatgtccacgcgaagtctcactatcgcagattttccaggccaatcggcggcccacgctgccaccactttgtctctgataacgtttgaaaggtcccgtgcattgcctgtgcagggacgccctgatccttcaccgatcctgccagtgctgaagggttgcaaagatgaacgcggttcagaccgagccgtgtcaatttgccctgatcggcgtggctatgacacctcgcctagggcttgcgactggacaggaaccgaaaagctacctatattgtcacaacaacaatgcgcttagcgatgcgaaaccacggcagaatactaccttctgcttcggtatccgccgaggcttcacgttcatcc

SEQ ID NO: 4840 - DNA, 5288 bp, Emericella nidulans
cacgatatatgaccccgagagcggcgcatacgaccagatgctagattacacgactagtgctggcgaatataggcatcatcgggaacgaatgacagaagatggagtcttccagacgcgcgatatgacgaagcgtcaagatgggacgagacatgttcatcgggagtatgagaatcctctaaccgggacaataagggttaccgactatgagcaatagcccttctagatcatgtttggtgaaaaaaaaaaaaaaaaagtccatgcagtgaatctattacttgaactcctccataatttggggcttgaagccctttataatatccgtcaattccttccagagccttttctggatcattctcccctcttcgttatagatccgctccgatagcgcctcgtccgcgacgattccgttaaccatatacttcccgtgcgactcaaccccggcactcgcagcagtaaccgtcgtgcgcgctccgacctcttctttgcgcgcaaataatctcttgaagaggttgaatacaagtgcgtcgacgccctgattctcgcgcgagagctgcgagtgacagaagcccgtgtcaagcatgttgattaccacagatggctcgccgtcttttccgtcactgtcgctgtagagttgctcgacaagttccctcgtcaagtatacattcagcaactttgtaaccggataccgctcatccattttcgccgtagctttgtcgctcagcgcaacaaatatgccccgagggtctgtggattgtggaaattccggccaggcgtggacctggctcgtcaaaaccgtgagatgcggtggagccaatcgatttgtgaaattggtccctgtttcttgcagttttgggagtagggcaatggcgagtaggaagtgatttatcgtgttcacggtaatagaatgctcatatcccccatcagccagttgaaatatctttgtagcaacagccgcatttaaaaccaggacatcgatcctccctaattccttcttcgccttctccgcaaatgccagtaccgagtgcctgctcgccaggtcaagcggccatacctcgcaggttcccggtttacagatcgtggattcctcgatatctttggcggcattctcaccggcagcggtattccgcacagcgagaatcaccttatcagcaccgagtcgcgcaatgtgccgagctgtttctagaccaagcccggtgttggacccagtgattatggcggtttggccggtgaacgggttggttgggattgctggggtgatgaggagttggttgtagaggaaggtcgggagacccattctgtttctccttcttttctgaatgatgggtttaatgtttgatcacgatatggacgaagggagttatataggtgtcggcagtgaggttcagtattccttagcctggggtcagcggctaggctgcatggcttgcgttgcaccagctctagcccttgcatttgttccttagtgtcgacgttaggctgaggctgtggatacttacattattggcagctgtgtcttctggctgcttctgggtgctggtgtaagagaatctcagtccatctcagtccaatctctcgcccaaggggagcccaaggggagcttacaagcgagcgtcacacggagaaatatttataacatacatatatgcacatttagattgacgcacgaacttgactgctgacagcgggacaacaacatcataatatgcacaattacaccgtcaaccacggactgctaggatacctttaaaagctaaagtgctgaagattgatgcatacacgttggctacttctgctaaccgtatcaatatttgtctcttgtaggccgaagttgctggaaggcaatatttgtctatatattacaaagagataaccggaatcacaacaaaaagggttccataactcagttggttagagtgtggtgctaataaacagtcgcctgaccgtttgtgacgccaaagtcgagggttcgaccccctctgggaccattttttctctacttgagagtagtactcttttttgcctggtggcatggggcgtggatgtggggtggtggggtgcggatatattttgtagtaacattaccatgggtgtacggacgggcgagttagggcaagggtgatggaatcattgttgaccgatgctattggaacttgacagaggaagtggcataggatgagacagtcgttacgctaggatatgatgaaatctccaccatatgcgtatacaaggacgcggacggtcccgcaggatttgatgaaggtagcgtcaagtagtaatttccctagcaacatgcaatcctcacagttcaccggtcaggccaggaaaaaaaccatatattatttctatactctccttatccagttgaggattgccagtcatctgccaggctgcgttcattctcgtagccactgccacatttttcatagagcgatagtaggtaacagcgtcaaaggattgtgaattggtataaaggaggggggagttagcgcgtagatttccaatgcccaggtctccgtccacttgactggtgctgattcgagaccgttgatggacaggctacgacgtacactgcgcggactaaaccagggttcgtctttatgcttgtaaaatgcgtgctcaaccttagcctgaaatccacaaagaaaggatgacagtaaaacatggaattgcgaacatgtgactggaaaatctacccaatttctcttaggaagcatggtatcgtattgtccctagcgcagtaccacaaaatagaaaccgtaaatctaacaaaagaaagtcatactagatcttaaccaaagccaaaccaaccaacaactccagctgcagctctaattcccggtagcaatgctatgcctcacgcccaacgacccatttgtcaagaacgacctcgagtcttgcggctttacgaagactgtctcctttaccccctcaccatccttaactggagcgccgtatccaccaccgcccggcgttagaatgatgatccgatccccagctccaaacatggaagtcttcctaggtcccagcgagaccatccgtgtggcgcccgtaacaggatccttgcggacccagatattctgaccccgttcaccatcactgccaccctcgagcccatacggtgccgtgacacgtcgatcagaaagcactgagacctgcaaaggcatcctgaactcaatctcacggatacagccatctccaccgcgccacggccgttaccgccgcttccatgtcgaattgagaactggtgcaggatgacagggtatcgcttttcgaagatctctggatctgtaatgcgagtgtttgtcatgtgaacttgcgtgcaagaagcaccttgccagcctagtccggcacccgcaccaccgcagatggtctcgtagtacccgaagcccttcttaacttcgccggtgacaggatcagtgcctccgcagccgaaggagagattgttcattgtgccctgagacgcggcggcggcgttgaaagcgcgcaggacgaggtccgcaactttctgggaggtttcggttgtgcagccaactgttgcggcagtgggggagggggagaggatggtgttgtcggggcagacgactttaatgggtttgaggcagccttggttaagcggaatgtcggtcgagatcatgcagcgaagacagtactgaacattgtgttagtaaggcaagtcaaaaggagtggggtgcttaccataatgacggagtatgagcaggttggaggggcgttcaggttgccagagtgctcaggtccggtgccggtaaagtcaaagacggcatcaccagtgtccttatcaatggtcaccttgagcttgaacgggattccgtcgtcattatactcggtagcctcaagaacaccaccttcgtacttggcggcgaattgcttcaggagatcacgcacggcctgcgcagcgttttcttgaattgcgtacatgtacagctgcaccactggccaggtgaactctttgaccagagcccggatcagctcgatacctttttggttggacgcaacggcggccttcaagtcggcaatgttttcagccaaagttcgggtaccactgcagccggggaatgacgctggttcctcgtagagatgcttgataagaccagcctcgtcgaagacaccctctttgatcatcttgaaagactcgatggctgcaccctcctgccaaagctcggtactgttaggaggcatggagcccggtacgataccaccaatgtctgcatgatgaccgcggtttgcgacaaagaagatgatctctttgtcttcgtcgtcgaaaactggggtgatagtggtgatatcaggcagatgggtgcctccagcccggggatggttgctgatgaggacatcgcctggcttcaagtcagccttgtatttctgagcctggtatgcgattgcagtgctcatggagccaagatggctaggaatatgaggcgcgtttgcgacgagacctccgtcagccgagaaaatggcgcacgagtagtcaaggcgttccttgatgttgaccgaaatggaggtcttctccattgtgtgtcccatttgctcggccaccgtcatgaagcgatgaccaaagacactgagctgcacagggtcgacagtctgtgtgtcaacagtttgctgttctgcgcgttcaacttcgaggatgacgtgttcaggaaggatgatggccttactcaggtgatcgacgacgatagtctgagtcttgtcgatgaccatggccgggcctgtgatgtgtacaccagcgctcaatgacttaagctcatacacaggggtctgtgtccagccgtacttttcgaagaagatctgccgcgagaaaacaggagtagggcacggagtcaagccgtcagagctgtacttcttgagttcctcgaacgggctggaaatgttcagtacacgggactttcccacacttctgacacgaacgtcatcaactaagatatcacgtgtctgcgagaaaccgaactcctgagtgtgtctggcagtgaaagcgttgccagcgtctgccacatccccagtcaatgcgatcataagggatgtatcgcttccttggtatctcatgttgaggaagtattcgtgctcagttactgaagcatcaaagccctgagccttgagtcctttagctcctcgggatgacagcgactcaaagcgagccctgatctccggcacggctgcttcagagaatgttaaagcagcgggctcttggttctcaacaaccacatcagccaaagccattccgtaggcggacaaaatacttgagtaacaggggatgatggcccgcttgatgc

SEQ ID NO: 4841 - DNA, 4297 bp, Emericella nidulans
  unsure (1)..(4297): unsure at all n locations
tgtcgggttatcagagaaaaccgcgcagcttagtcaatttagaccggctctccctgtgagattagactattctttcctttctataatctctggatataattgagagaaataaaagtagaaccagagtgcggagacgaaaaagcaattaagagcctcgaattcccagtgggccaaagcttggaaatgagccccattcgcaatagcactatacagtctctcagaaatcattcggtcagaccatggaacgcaaggtcggtatccatgctatctactgctagcattttctgggctgcctcggtccgtctgggtcgatccgagatcatcgctggtgaaagccgtacttaacccgctagtatcagagggcggaccggttggatacaatgtatcttgcgtgagatatataatattatcagcaagtatatgcaggtaaaaagcgtgcaaagttatactcctcgcagacgtagaccaaggtccattgtcatcgggagtgcctatctacatactgatgatctaagccttcctccggtcattaaacgtttcatcctttgaggtaggacgcggtattgagttagttagccaaagtgaccagcttcttggccgagattccttttttaaggatattcaaggcctcttggatcccctccaaccctttggtgggcacgatctgtggggttggtgccacctggtagagacccttcgccagtgcttctggcaaatacccagcaaaagtagctgagctcgtttcgtagtaaatggccgtcccacccgcgaagatcatctttacctcaatatctgccggggccatgccctctgggacagggtttgacgcagcgagacgcagcttgtgctttgacttcgtcgctacctcacaggaaggggtcgtatcaccggcagcttgtaaaacgcctatgcattccccattgtcaagttccgcaacgatcttgtcaatcacgaacgggtctttataatcgaagaccttgtccgcgccgagacgcttcacataatcgaagttatgtgcagagcatgtggtgatcacctcgaaaccggccgccttgctcagctgaatcgcattgctaccgactccagagcttcctccccagataagaatggactttccagtactggtggggttgatcttaggcaacggcaggccaagataatccttcgagaataggccgtatgcggcagtggcgatgcatagggggaaaacagacgcctcggcgaaagagagggagtctgggattttgcatgccagggtatagtccagaatcacgtactcctggaaggcgccttgctcggtcttgaacacagcagctccaagggcaaggcctaagacgcgatcgccaactttgagcttgcccgtggcttcggagccaactttctcaacagtgccagcaacgtcttccccaggatgagtggatacttaacggcgggaagagccgcgtcctgaagtatagcatccgccgggttcattgcccatgcgttcaccttgaccaggatttcgttgtcggcaacagtcgtagggaccgcattttcccggataacacctgcaatgccagcttcatcctgccagagagctcgattgacagcagccatggcggttagagaagtggtatatttatagatatcggattgcaaagcagctcaactgatgataaaccgtttaatattgcgtcactgacccagctcgtctagggtgtctctgcttttataccggggccttagtgtactccatttcctgcgaaggaattcctggcgcaagaaggctctctggaccgggattcaaatcctgtctctggttgacgttatggctcatactgcgttggggaagacatttgcatgatttcatgttgatctcgagcgtaactccgacggctcgtattagccggatctacgcggacttaaggcgtcttaccaccgctggtacagctctctttgctttttttggctcgttggtatgttatccgtcatttctattgagccgtcattctatactgtcctattggtagggttggcgtgaagaatttcgggatcatcacgccaggagcagtcagagtggacgggtgactcagcgctcggccagaacagccctaattgcgatatcgccgcccatgactcgggtggcatgaagaatcgctccgtagcagggctttgggcgccatcccaaagtaagatcaaaaatattcggacagcaggtggcagccagttacagtcctgttagcaccttgatacttaccggtcatttgaactccaaagctctcagtcgcagtacggggccgcgatcctcgtgtcattcacattaccggtgttagaagatggaggagaattttgtctacttgtcatcatgtgagataagcggagttgctggtgatctctgaggagaggtaaaaaacacctgtagattatcgtaggctggcccaatccagaagaggctgagaggagatgacaatatgattgctactcagtataatacggatgaaatctttataacagatggattcagcttttctgaaatatgccttctaccagggcctctcttcacaggccaggatctagaagacaaggctttgaaaacgggtcgttagaaaggcatgtaagcctgagcattttatgatatcaacaccagtaattgggatccggtagctattgagtaagaatgtctcgctggccagctatataatttcttaccagaaataactttcctgtgcatatttctggccttgcctagagctcgcgttgttgactgacaggcggtatttaactgggagagtctcagttgaaatcggccttagtaaacaccactttaatcgttcaggcctttcagggtcttcttttgtgtacactaacctgtcgcatctgtgccagaattacgagggtgtatacaatagttttcggaccccagaagtaattgcactcctctcactgttgtagtcttttatgtaacaatagcactaactacctctgaatctaaactaacaccatgttctatgtcaatggtaaaggccaagtatcttgtagttttaacctcagacttgcgcttctcaatcgttgcacccaccctgtcctaaggttgtcagggcttgctttacgtactctcggtcttctcttaagctattggtcaaacaggcatatcctcgagataagcgaatgtcaactcgaccaggacgtctctgtaatatcaagattctacatctttaaaagtggtaggtgcataaccaagccgcaacgataaccagccattcgtacagcccgcatctggtgcggaaggctggcattcaatcgtaacctccataatgataataatgattatcttgctctggtgattatcaagctgagatggggtaatacagcggtttatggtatttaaatcaattatcgtacactaatttttcactatctccttgaaatcatctgcgaggtaacaaagactggtcttgcggacacggtgtaactagtactcgagggcatattgcgatagtaatagaaattaaaggcganatatcaacaggcgattgttgacttcattgggatagattgaaagtcttaacgagtaagcattgcgtggctctcaaacaccaccccgcgacttacctcgcctatccaggtcgcgacctcatagcagcactgctcacataataaaatgcaacggcaacttctagcgtcgtattccttcgctccttaggattatgactttaggaacgatcggtctgcctggcccgctcgaactcagttgtgtttaactgtacatgttgagtacttcaatagctcttttggtattttctaaaggccttgtagcgccttgtagcgccttttagcctatttttaaatcctagttcatttataaaagccgatagcaaatcaatttcaggccaccaatagctgcatgtcagaagcgccccttttcacattcgctaaaccccgctggtcgcgaacgaggctcagacttcccctcctctcagctcaggatccctagatctgagccactgagccgcagccactccaatggttcgatgtattctaatcgaacccgtgcagcgcaccaaaagtccgttcagtgagcaagatggccgccgatgaatatacgatcgggtggatctgtgcgctgccgattgaaaaggccgccgcccgtgccatgctggacgagatccataatacaccaccagctatactacggtccgcctcggacaaaaacagctacaccctcggccgcattggtcctcacagcatagtcgtcgccagcctcccgtctggtgtttatggcgagacaccggctgcaactgtcgctgcccagatgttg

SEQ ID NO: 4842 - DNA, 1421 bp, Emericella nidulans
aaaccaccccgaaatcaatccgatctacgaggaagactggaagaacgtttatattacctactcaaagcctgaaccccggggggacgagcctcctctgctaaactgcgacggacgcaatgggtatgccaaaatcgacaaaatcaacgacggcatcagctaccttcgcaagttcaagctgccaccaggcctcgaaggaaatacttgccagatggtcagctgctcgtatgattcggccatcagctggtgcaacgctgtaagtaaccgcaatttcttatgctcaatgatatcgactctaacgttagacaagcttcccaccctgagggttctcccctccttcgacaatatcgctgacggtgcacaggtgattctgaactggtgccaggtggactgggataatgtcgggggcgtgctgggccaccccgatagttggcgtgtttctgtggacaaagaaaagtgctagggctgtgggctctcgatctctctgtctactattatcatgcgtcttggcttgaaatctgcatttctttatgtatgatacctggtcagcagtaatgaatgccttatttagtttatccttactcatacacaccagtcgcagcagtaatgcctctgtcgactaaaattccctttatcaaggctttctcctagccttatagcagcaggagtataaagagaggctggctatccttgaaactcccttcttacttgtatgctgagcacgggtctaatagccacaaatgtgccatgtaagaactcggaacactcactaagtgcaaacaaacgtcttcaagcttcaaagtgacgaagagcaggatagtcatagctatggactaactaatggtcattgagacttatcattctcggataactcttttctacttcacggcagggagcacaacaccagacgcacccacaatcatgtctcagaaatttctgacaaagcgcccggttgctctcccctctcagtgtattttataagcatgccggcgattattcagttgaatctctggtcacttctaattaaatgctggcagattaggcctcaaaactgcctgaacatgaggagcacgctgaacaactgctgtcctataatagaatcaaataattatgaagtcaccatgcttgtttcgtttgagattgtcgaatgcacaaagcactttagatattagagaagattaccgtacagttaaatgggctaacaatgaatcctacgttactctagcaccgctctgcgacccactaatatcaagtcacggtcttcacagctcaggagtggttccaaattcgtagttttctggaaacctggatactgttagcttatgccatttgatgctaatttatcctttgctcacccagctggatatctggctcctactaaattggttgcatttgcggcttcggtgatacgccggttctcgtca

SEQ ID NO: 4843 - DNA, 2306 bp, Emericella nidulans
catcactgcactaccgaagtccagatctcccatgctcatcgccaccacaaagatcgaaacagacgcgtcacgaaaactacaatcaagaatcacaagtaagaatcaccatgatggacagaggctgttttcacccctagttcctcgttgcctttactactggaaatagtctcatcgagccgcgctactatcgctcaggatcctcgctgcctcgctgtgtgcctttcccaaccgattcgtgccccgccaattcccctcgtccagaatctcgtcgctctcccagttcaagccaaccgcccagacccgatcactcgcactcccttcaacgaagactcgcttttcgctcgagaagtacagctgaatgtgcccaatccaaatcgatctacggatcccaatatgagcctctatgaagggaagttaatttacgatacgaaatacggacctactattcatatgaaccaagattacagcattaagattggtgattggatcgtgattctcctggaacccccttctcctgataccagcaaccaggcgaaccggcatactccagcgtatagcgagcccccagggttgacgcggtccagaaatgagcttcatgcgcgggtgaaagatatctccgctcagcccattatatacctttcagacttaatattccgcggacatttgacgcaactgaggtctcaagaattttacgcaggaaaggtacagtttgtcacttacgatacggatatcagctcgctgtcgccgagcaaaagagccagtgtggcattggatcttctggataccctccctagtgtactagatatgaaattatatatcgatcaaaaacgtggtggtcaactcagacctctttcagaatggcaggataggatcaatctctcggcactctacatactccaatggattgtcggatctaaccgatcagtcatcatctatgacaataacccgcagcaccagataccagagatggaatcgtatatccagttccgcttcgcgcagggcgctccggacaaggaacagcggtttgtggcggctgtcaacaagacggctaagcggcttaacccccagtacccgacgctatttgcctggcacggaagccccttgcacaattggcacagcatcctcagagaaggccttcactacaaggaagttgtcaatggcagaagttgtgggatcggtttttatatggattcacaatttaacacttcgatcggatacagtagtcgacatcacaactataacgcaaactcttactggccgcacagtgtgttgaagagtacaatggctatagctttgaacgaggtagtaaatgctccaggagagtttgtttgctcagagtcctgctatgtggtgcagcacctggactgggtccagccgagatatcttttcgtcgactcgaggtttccatcagtgggccttccgttacggccaaaggcagcaaattgacgcacgtctatgctcaggatccgaaccgtcctgtttatgggagtactcaggcagtactaacgatccctatctccgcaacaaacagtcatcgatccagagacgcagcagagccgccacagagccaaccgagtcagcctaagccaaatccagtgaaggggaagcgcaaactatcttccattacaaaggatgtatcacaccatgacggcgatgacgatgtcagcgttgaaacgcatccggaggaccggctgatgttgctgtcggacgacgaaggcaccgaccgcagaaagcagcgaaaagacgaatgtctcacaaatttttcccccggtacgctcgaccgctcgtctatccagcttcttagcgaaccaagatacgcaacacctcgagcaacacgcactctccagagactactgcgccaagccctggaaactcaagagaaacaggccctgcacgaactaggttggtacatcaacggcaaccttatcgacaatgtctaccaatggatcgtcgagctgcacagctttgataagagcttgtccattgcgaaagacctcgaaaaagctagtatgacaagcatcattttagagatgcgctttccggctgactttccgctcgttccaccgttcttacgaatcattcggccgcgattcgttaggttcgcgctgggaggcggcggccatatcaccgctggcggtgcgatgtgcctggagctcctgacgaacacgggctggttgccgtcgttttcgatcgagagtgtgctgctccaggtgcggatggcgattacgaataaattcccgcggcccgcgagattggatttccatgcgaaggagacggaatacaggatcgacgaggcgatcgattgc

SEQ ID NO: 4844 - DNA, 3209 bp, Emericella nidulans
agcttacccatccggtattgagagtttcgacgaaattctcaacccgctctggactggagctcgaaagcaacgtggtaagggtcttgctgccttcctcaaagctgttggttatatcattcctctcatggacgaggaatatgcaaactactacaccagtcagatcatggaaattcttctccgagaattttcatctcctgatgaggagatgaagaaggtcgttcttaaagtggtttcgcaatgcgcgagcactgatggtgtgacagctagttacctgaaggaacatgtgctggtagattttttcaagagtttttgggttagacgtatggccctggatcgaaggaactaccggcaagtggttgataccaccgttgacctgggacagaaggttggcgctggtgaaatcttggagcggatcatcaacaacttgaaggacgagagcgagccttatcggaagatgaccgtggagactgtggagaagacgatcgcgtcccttggagctgcagatatctcggaaaggctagaagagcgacttatcgatggtgttctgtatgccttccaagaacagagcattgaagacatcatcatcctgaacggctttggaactgtagtgaatgcgcttggcactcgatgcaagccgtacctccctcaaattgtcagtacgattctttggaggttgaacaacaagtctgccaccgtccgtcagcaagcagccgacctcatctcgcggattgcgttggtcatgaagcaatgcggagaggatgcgctgatgggtaagctgggcattgtgctgtatgaatatctcggtgaagagtatccagaagtgctgggatccatccttggtgctcttcggtcgatcgtcacggttgttggtatcaaccagatgcaacctccaatcagggacctactccctcgtcttactccgattctgcgaaaccgccacgagaaggtgcaagagaacaccattgaccttgtcggtcgtattgccgaccgagggcccgaatccgtcaacgcccgcgaatggatgcgtatctgttttgagctgcttgacatgctaaaagcccacaagaagggcatccgccgagccgcaaacaacacgttcggcttcatcgccaaggccatcggtccccaggatgtactggcgaccctactcaacaaccttcgcgtccaggagcgtcagtcgcgcgtgtgtacagcagtcgccatcggtatcgttgccgaaacttgagcgccattcactgtcctccccgccctgatgaacgaataccgggtccccgaattgaacgtacagaacggtgtcctgaaagcaatgaccttcctcttcgaatacattggggaaatggcaaaggactacgtttaccccgtcacccctctcttgaggacgccttcatggaccgcgaccaagtccaccgccagggggcagcaacagtcgtctagcacattgccctgtgggttgttgggctcggatgcaagaatgccatggtccacctcctcaagctggtcttccccaacatttttgaaactagccctcacgtcatcgacatagtcatttaagccattgacgcgatccgcatggctgtcggcacgggcactgtgatgaactacgtctgggccggtctcttccactctgcgcgaaaggtgcgcacaccctactggcgtctatacaacgatgcgtacgtgcagagcgcggacgcgatcattccttactaccctgagctagaggaggacggactgaaacggaccgaattgctaatcatgatctcctctgatttggagcacaaaaaggcggtcattattattcgatcactgtcttctatatgcatgtattgacattcttggcgtgttgtgttcttgatccctcggcaggctggcgcttctttacatatatcaacaggagttgaacaatttcatgacctttgtttgcacatcgcatcccatttctttccaaaaagctgtctctagggttgacgtcgcgtctgcttacgatggtctcacgtactacggactagtcagaatcggtgcactatagcatagacgggcgtcattgagcaattaatatattgtagacaagctcaaggtgaaacatcgactacttctacctagtgaggttacttctacctagtcaggtctcagtctcccagactcagccatgatcccttcatctatctcaggcaaatagattgcaaacagcactatccgaactccagcgcatagagcgaagtcccccgtagtacctaacaaagtatatagagacaagtagcggacgacctgctacgtcatatcctcgcaagtatgaagtaccgaaacaactcttaactctagcacataaacggaaagggcaggtaggtagacagggtaccgaaagccgatacagatacaattagcagtaagggtcagtcgagcaactgtatgggaagtgtgggagaagaacaagaatagaagtcgccactggggccgtaccaaaccaaaccaaccaaacccaacagatccaatctcgtaaattaccctgttgtagtcatcatcacctttcgagtgcaacagagctcttgccaagcattcgtgcagggttgttgaatgtgccgcgtcagcctttgttccccatcgccattcgcccctgtcatgtgcggccttggcaagcgtgggtggggaaccagcattcttgatgatgaatcagcggctgtagattcctagtgtccttactccatacagactacagagtacgaagcacgtactaacagccgccaatgccacagcccacgggtatccctagaacgcagacgcaaatagtgtatgtgggggcccaggcaacaggcaggtatagtcagggtcttgtcgacctcgtcctgggattggtagggctgcatactccgtgatccgtacagaattagcgtacggtatgtattccatgcccgatatctgttgtctgcggaaactgacaggagtatgcagtcctgaggagaccgtattgagggcgaagttatacgctttttaccttctccaaatccgagtttcccactaatcctttcctaagtataaaattaaaggttcctcataaaccctttttatacggaacctggttgtttttttctgttcgctacccccttaataaatggtaccaaaagggcgcttttctttttattcaaagggtctagatgggtggccctaaaaacccccgtttcttgtcctcttcttcattaaaaaaaataataggc

SEQ ID NO: 4845 - DNA, 3930 bp, Emericella nidulans
agatcatgatagcaccgatccgtcgtaccctgttctcccctatactttcgatcagagcgtgaagtgatacgccagcacgtgtcggcgaaacacgaggtcacgtgctcaatttagctgcaaaaggggaagaaccaatccaattcgatcgtgtatgctgaaagaaaaactggcatataagcacagcatctcacaaagaatctggatcttttcgatgatagtgacaggtttttggtcattgatgccatatggtcaacagctatgactgacaacccaacagtaagtccatactactacggtccacctctctccgccgtcctctccgcccgcccaatgtcaaatactgcccaacaattcctctagcttttaaattcctcgaataacccacctcctctcattaacttccaattgatttgattcttataacttctcgccagtcaaatactacactaatcgcgcattctccaactttcaatcccaactccaactctggtttcacgccaaccactacttcaacaacgcacccgccagcgcaaccacagccaacattcgcacaaccacaagacttttccccaacagcaactccaaagccgaatccaaatacaaacttaatggtcaacgaaaccagccagttgtcctcagccgggactggatccgcgcacaccgcagccgctgacccgatcgcttcaacagtccgccctggcggcgctccagcgcgcgtctacatgaacgagaagatcgtgccgtatttgctggaagggatgaaaacggtcacaaaggagcagtatgagcccatagtagttctataaatacctgagggttggcttcttaagtttctgcgtctggctaacctatgtaacagacctgcgaaccccctgcgcgtgctgggggagttcctcatacagaagagtaatgaggtcgagggtcctcagtcggggaacgcgccggagtaatcggctagaacttagccttgagtttggttactacgtatttgtatattgcaccattgtgtaaggcgaatgggctttgcggctggtcaaggtgagagagataggctattgtttgttgcatgaagagcaaacgcagcgcttcctgtttctacctttaccatggagcccgcactccgttcttgcgccccaccttattacttggtactcatttattcgatgccaaaaacggcctggtgctacagggtgcccatttcgcgcaggtgaagaacttgtataaggagacgcaaaacgagactgtcatatggccggctgatgccgcctacgagccgcggaaagagctagaccttgatggtgtcaaatcaataatggacacggaaaatctggcaaataagtggcgtttctatctctagctctagtcaagacaaatatattaacccgatccctggaggtattgacgaaagagaatccagtgctggaaacttataaggatatgcgtctcctggggcattggttagtgcaacgcagagatgagacataaacaggagcgatgccgtgggagactacaacggaggtagaacatcaagacgtgtgccgtagtgtgtgcgtaaaaactagtaaccttagcaacctcgtcaataggaatattattccaataacatcccacataaagagctttcaaggatgtagcgcaaagggttgcacccagagctcaaatcacaatacgacgacggcaacagcggtgtgcctggtgggtttgtattagcagttgccgtcataacttacctttcgagagaccagtcctcattaaggcaagacagaattgagaaatatgatatggtcctcggttacgttgggcctgtcttggaagtcgacatctagggcgagagctgctgtgctcctcgcgctggctgtactacaggcacaaacggtatggcggactggcgagtgacggccgaactccatgtcgtctgcttgtttgatgagggcgaatgagagtgcatgcatggcagatttaatgtgctcctggccgaatacaatcgagtcgttacgtagaaaatgttgtataagacgaaacaaaggcgaacagctgactagcgtgataacgaccaattttccggtgaagctgaaaatgtagaagtgctgacccatctgacaatcgaggaattacaacgttgataagaaaccctgcacttccctgccgccatagattccggtgtatcgagcgaaataacatagaaacatcagcctgcgtccgatgggtatcgatcagatcttcgagcctttatccaggtcccgactgcaggactggaacagtcgaatgggccgcttgctgacgacgttccgagttcgcccaacaggatttgtgaattcgatgacttttctccgtaaaaaaaaaaaaaaaaaacataaatgacgcccaagcgttgacttgttgagtcggtcccaacgaatcgtgccatccgagaaaacagaaaaagatcataccgaggaacataagaagtgggggtgaaaggaatacagcattaaagacaagggggaaagggaaagggtaggatgccgagaaagacacataggaaaaagcctcgagtcgtgtgccaccctgcccaagcggaaaggcatttattgaacaccggcgaatatcgacctaccttccggcgtaccgatcttccccaccacgaggttcataagaacggccggggtaagggtcgcgtgaaggagcaccatgtccgtaactaggagggttagcatcacggtcatagtaaccacggcgttcgtcacgacgatcatcgcggcgttcatcacgaccgtaccgttcctcacggccaccggaggcgtagcggtcagctccaccgcggtatccaccactgccactgccaccagggccgcctgcatagtcgtcacggtagtcgcgacggccataatcacggtaatcgcggccgccgtagtcgcgacggtcgctgtaggagtcgtagcggccgtagccgcggtagtcatcaccaccacggcgccagtttccgcctccgtagccgccacgtcggtcatcgtagcggtcgccacggccacctcggcgtccaccaaactctgttatacatattagccgagacacgtcggcggtctaaagggtgacttaccacgcttgggaggtccaaagtatttaccgggagtcggggttctaggacggctacgacgagccttttcaatgcttagagtgcggccttcaataacctcaccttgcaagccctccttggctgcatctgcctgctcagcagtcaccatgttgacgaagccaaagcctcgggactccttagtatgagggtcgaccatgatcgagcagctctcaacatctccgtatttttcgaacagacgtgagatgtcggactcagtcagacgtgggtggattccggtgacgaagaggttagagccagtgttgacagcaccctcgtcatcatcaagctgcttgcggggatcaatgggaccactgatatttgagcgtcagcatatatgctcgcgtattgtctccagccgatgctaaaggacgacataccgctcgtcaaggcgaccgtttggagaacggctacgggcacgatcggctcgcggctcatcacggggagaggcgctgcggtcgcgagcgaagcgtggctcgtctaagaactgaagttagacccatgccatcgagatcgcttccatggcgacagtagtttacgtaccatcataacggccgttttcgtgctcgtattcggcagacatgacgatggattttgagatgattgactaagccgtcgtgaagagttaggacatgaattatatgtgatgagggcgcgtaacacaaagcgcggtcatgtttgggcaagcgcagaaaattccggcataaacactgcgagagaataccttgaaggggcgatccgttgagcaactagaacaaagctgcgatattgttgccggattgaagcctggcaaacaaaagagaaaggagaaataaaga

SEQ ID NO: 4846 - DNA, 1730 bp, Emericella nidulans
tccgcggcacgcaattaatccctcactaaagggatcgaacgccgccgggcattcaaatcgtggactatttcttagctattctttcctgtagcgcttcacctcgttcctcgagacgcaaaatgcctcagaggcgccatcggatcgatttctcgctgctaagaaggcgtcagaacttttcgtcggcctcctcctcagacctttctcctggcattccggtcctccagtcgccaatgtcgtttcatgcgatggcgtcaccagaagtccccgaggcaacgcttaagcggaataagctggacagagctccagtcaagccgtccatgtttttcgaagatatggatgaagaggacgatggaccagtcaccaagtcaacggcccatgaccacaaggacgttccagcgccacgcacggcacagaaagttatcagtggcgagagtccaccaaagacccaattctttgaagattcattcagctccggtgtctcctttgtaccgccggttgcacgaatagggcaggattctcttgtcgtgattgaagtcttggtaaacgtcagcgtaagtcggccaagtcaactatgacggctccaagctgattcagtctgcaggtcaaagatgaggaggctgttatctcgagaataactacacgaatggcgcaaatctaccagagatccgagtctttcatgttcgtcagcatgcaagtgatcccgtcgctgcgattcggcaactcgacagtgccagcatactccatgaaagtcttcgcgctgccgtatctcattgccccgatcacgaacctccgcagcaccatactcattcaagcggcgcttcacgacattctacatatccaaccctcccggggaatcatcctgtatattccagttgcagaagagaacatggcgaccaacaatactactatgatgggtgaggtagcccgtttacaaagcgatactcatggctggggccgggagtctggaatctttcagtctctttctcgatccctggttggaggaagaagtccagcagcggtgcgagtgttcctctgtctgtcgccacaacatcttcatgggccgctcgaagcgatgtgcatgaagcaaaaccagccgcgatttcagagtctgaaggtaccaatacatccgccgatgaaggctctgtgagacctagacaatctaggacgctgcggcttttcggttcccgccggttgactgagccctcggagcattccaacgcgggctcgggaataggatgttgatccctgggacagccaaatcttgcagcccaggttggaacaaacctcttggaaagactcgaggctcgattggaatgaactcagcgtattagccatgatccgaagggctcgtcctcggatttggagttggtaaatgcaagttgtttggccaatttccggtgctggaggcaactatcctgcctactgtatacattgtatagttatctcaattattacggactttggtctcctttgatatagccatcggtattggagctgctaaagaatgatagacctacaagtgctagatatgctgaactagcatcgaagacagactagatgtagacgaagcagtaggtcaagcaggccaggaacaacatacgtgcataggcggaattccgccggatttaataggaaggagctctgaggattggagtccccccccgttccttaaaacacctatgcaacaaacacaggagaatatatctcgtcataccaggcaaatggcccac

SEQ ID NO: 4847 - DNA, 5080 bp, Emericella nidulans
taatcagtctgatctgtgtcgcttctttatttcttctcccttgtttccttttatactcccgtccccgtcccttctatccctgtcccatatttatatatttcttattcctcccctcagaatttcaaaggccttgcatactttctttatttccgtcacattataccccagataatgatccttcactggcgtctttcacgatgacagctgctcatgtgcctcaggatttaccaggatcagacaccgccgcaaatctagtcgccggtcaattcccctgcgagacgtctgaacccgtccctctgctttcgagcctgctgcattccaggcttcaccatcgccggtcaactactgtgaccgcgacagtcgaaaataccgatttcgcgacccaacaatttcccaagcaagccggtctcgctcgtcgcgggtctatcttcagaaagctggcgggtccccgggaaaacgcgaagcgctttctccgcctaggaaccgcccaatctccagcgccgccgtcgcaggatcgcccgatggctcggccacgtcgtcatcgccctgtctctgagatcattctttccccagacgatgtcaacatgcttgccgccccatctcttcatccgggcagaatgcgctcgcattcttcctcgaactcgtcggtagtagcctctcgtgggccgtcgccgggctgcgttcctgacaacgcgtcgtttccatcgttgccgaacgaaaagatcgttgcgacgggaagtgggattgctgttggaatcgcccttacggagcctgtgctcttccttcagggctacgaccagaatgaccctactacaaagaagtctgccatcttgcgcgggcagttgcatttaaagatatcaaaaagtgtcaagatcaagaaaatctcgatttgtttcagaggacaggcgcagaccgattggccagatggtatgttttgttggtttcagcttgtctttgcatttattgaccttacgctataggaattccgcccaagaagatccactttcacgataagaaagacctagttacccatggagtcgtatacttcaatcacggcgatacagctcttatgcaaaatgactacggcgcccacatttataagcacgccaaacctctaagtgtagtaacggggaacaaggatagcacgactacgatcacccgagaggtttttagtaacagcaactcctcaacatcgctcaatggtctgaccagcagagaggcaaaacgcctctcattacagtccagcaactcgcgcagttttggtaagggcgatccgccgccggccggtccgccccaaactcagcgcaactatcgattgtttccagtcggcgattatctgtacagttttgagttcccaatcgacggttcccttccagagacgatcaagacggaactcggctttgtgaggtatgatctggaagccatcgtggagcgttccggcgctttccggccaaacctgctgggcaccctggaagtgcccgtcatccgcacaccggcagaaggcttgctagagcaagtcgaaccgattgccatttcgtggaactgggaggaccagctgcactatgatattgtgatttcggggaaatccttttcgcttgggtctcagattccgatagctttcaagcttactcctctagcaaaggttgagtgccaccggatcaaggtctttgtgacggaaaacattcagcactggactgccgacaagagtgtacacagatttcaacctgcaaagaaggtactgcttttcgagaaacgggccgaccaggcaagcaccagcacgtatcccggtagctcaatgcgcgttacggctggtggaggcatcgaatgggatcaacgcgcagctgctgcgcgaggggaggaaattgtcgaacggggtcgaaccaacctacttggaaacctgaacagtgaatccggggtaggaccgactgaaatggaattcagtgttcaacttccgagctgccacgaaatgaagaatcgagatgagtcccagcgtttgcattttgacacaacgtatgacaacatccagatcaaccattggatcaaggtatgtctgcattctatatgaccatttatacggtactaactggattcagatcgtccttcgtctgtctaagcaagatgaacgtgatcccgggaaacgacgacactttgaaatctcgattgattcgcccttccatcttctctcatgtaaagccacgcaagcaaacatatacctaccggcgtatacaaaccctggatcggagcctgcaagtccagcaccacagtttgaatgtggatgtgcgggcgctccgcaaatccgccggaatggatctcgcactccgtccagctctgaccgtgatgatccaccggctcacgttactaggagctttactagtggttctggcggtttggcccgacctccagcggcgcatctagcttccgagtcagacggacaagtgaccgaacaggtgcctcggccgatgcacctgctccgcgccccatcttttgcaccgcccgcatttgacgaggtgcctcctccgccacccctcatcacacctccgccagagtatactagtatagtcggagacaacgaccgcgaagcagtgctgcaagactacttctcgcgtctctccacctacgaagaacatgtcgacgatgagcgaggctcaggacgagtcgacgtgcccttaacacctggggcgcgcgtcaaccgcagtatggacgttccgagagaatggatccgtctagatcagacggcgtgattccgaaggagtatatacacttgactacgaccttaaaccgccacgaagtcacgaattcacgatttctgtttccgtcaaagcgcacggagagttgccatacactattgttatgctacactttatgctacacttgttatgccacacgtttctttttgtgattccctgggttgcataggtttcattgattaaggttcgaaaattaggcgcaggggggaggcggtttgttactcagcattatatataaatctatctcatcgaagtatcaaccaatctataactgtccagctcgatccagccctctagcattaaacattctttatggtcaaaatgtagtgaaatgagcctgtcctcaatttttcaactgccccaacccttcctccggcgagatgaatctcgtcctgtacccaatcgatatcctattaccccccaaactcatcagcacacttttgccttgaaatataggaaagaaggactaacccagacttgctctcgtccgcaaagttcacatgatccggcttaacagttttccggaactcctcgtcctcccagagtcttgtaaactgcctaatatcatccataacaaactgcacgatgtagtcacaatccgctagcttctcggtcatatgcatctgctcgacgtggggtgtgaaggtggagaattggtcgatctgcacatatccagtcaataatccacttcccttaaagagttttgggaggatatatgaagtagaagtaccaggctatactccttaacaccgtatttcagcaggaagggtagcgcaaggggtgcatggtggtttgttaaatactcgtgcaaggaggactcatcgagaccaggcttgcggaagccagttattgttaagaccacttcggtgggcattctgtacaggtcagggtaggtctgctattccttgaggcggaagtgggcgattgaattgaagttactgcacttgaagggaaggtgcagtagtaagggttgaatattggcagttcaagtctctatatatctcgaagtgatctttggctagaatgccggatgctacataggtcaagctaatgttgcagtatacttaatccggacagagtattgctttttcgacggaaacgtctgactagtctactttgaaacttagacaaataagctgtataatgagagttcatgttgtacagcgcagttctcgatcctaatttaaggttcaaggttgcatcccttgactgcccagtccattctcactaccacctgggcaaccacttccacatcacctacctcacgatcgatccatggttcaattactgactgattccacaatgttcacgcacacagccatctttaccctctcttttctacttacagtctctttccttctgtttatatatctcatccacccgctcttcctctcccgcctctcaaagctcaacatacccaatgcgcacttcacctccccgctgtccagctactggattaactccatccggcatgccggactagaaacagtcacgattcaaggctttgcatgcaaaacaatgggcctgtcgttcgattatcaccgaacgaactgagtgtcaactctctccatggactacgggtgatctatactggagcgttcgagaaacacgctctgtacagagacctgtttctcaacttccatacggagaatctggttgggatgctgggtaataaagagcatgcgcggcagaagagaatgcttagtcgggtttattcaaagtcgtatttacaggaaagcgaggatatgagagtgatctcggcggtgattctatcgactcgactcctaccaatcctgcagcggatcgcggaaaatggagagactgtgaatgtcctgccgctgttccaggctgttggcatggatttcacttcggcttacttgctcggcgtgcagaatgggacgagctttttgtttgatctgccgggttggcagaggtggctagaagagtatgaaaagttcaagcatttgagcctcaacgagcgggctgatgggtttattgaacgatggtgtctggatttatgtcgacaaacgcaaactgagtcgagtagtagtgacgctatatccaccaaaccggtcgtatacaatgccctccggcatggtctggagaagtccccagattcccgtcccagcgacctcgctattgcgtcggagcttctcgaccaccttatagccggtcatgaaacgtcggggatcacattcacgtatatgatgtgggagtctcgcattgtccaaacctgcaagatgagctccgagcagaactgctcctactgcaaccttcactaaagtacccctttccctcaggcggtggaaatggtagtttcccacatccatcat

SEQ ID NO: 4848 - DNA, 2485 bp, Emericella nidulans
ttgccgtagatactgcagcatgtaccagcgggacatcgggttcccttcgccagcccgcaagtcatgtcggttgacaccttcagatcggagggctgcgcggccatgttctgcggctcgaatgtcatagctcccgacttgccattgtcgcttccatcggccgcctccatggccaccgtcggacatccaatagggtaagtaccgcagtctacgtcggattgggtggtgaaccatttcgcatagtacgcaaagccaaggttgatcttttccggcggtgcaccgatctcgagatatgctttgatggtgtcgtgcgaatccgcgatgccggtgtggtgcttggtctcgttgttgcgccggttcatcaggtcataggacatgatattgatcatatccacagacggccagatcttaggaccttgctctgtcgtgtacgcaatcatgtcctcgcgtttgccgggtgtcgcaatagagatgatcttcttgtcaccgacagccgtccttaaagcctgaaggagcaacgggaacgtctcgatctcatcaaccttctgatcgtttggcactttcttgtagtcttcgccgtttccgccggggtactcccaatcgatatccacgccatcaaaaccagtactctccagcatggccgccacgttcttcgcgtaccgttcccgagaagcctcgtcctttgcgcccgcagagaaacctgcagaatcaccccatccgccgatcgcaatcatgacctttgtatcgggtgagaagcggttgcggaaagttgagaccggctcaaaaggctggaatgccgcaggcgcgtcaccggtgaaatccgtagatttggcgaatcccataatggcatgcgtgatcccctgtgtctgatcgctgcccggtagaccgttgacgtgccatctgtctccattagctcttgtcactcgctcttgctaggttgagggtagaagcaaaactaactcgtcaatatacattgcaaagcggagacccgcaacgcactggagggccgccagggccaaagcagcgtgtttaaggatcatgataatcaagttatatcgtaatttgaaagaaagtaaagaataaaacagagaagattgacaagaacaagatatttaaatcttctcgtactgcagactggcccagctcaaaggggccttcaaggactgaaagattgcttcagttgcagacaatgacgcaggagcacaaataagtaacacggagccaaatacaagtcacaagatttttgacttgtttgtcttgtcttactttattcatcatcattaaagagaagtggtatgctgatacattcctggggtctatgttgtgggaggaaaagaaaacatggattctgggattcatgtctggcatgccggacaaagacacattccaccaacggcatgctcctgaaggctacggagtacaggctaaacattctcttgggtctgtggtagaagcctagaacaataagttatgcccctgtcgagcctccttagcaatgtaaccatgtaggcccagagtagcgaaaccctatttcaggatgctggaacagctcagcaggcttcagtcgtcaactacagaagacaacgtagagtaaggcgttgatagtaataatatctattgcaagagtaataatgacaaagtaaggggtatctctaatgctgctcattaatcccaatgccgtcttataatcggccgagcagggtcccatggccctgagacaacatttttatacttttgaaggctaataagccaccaactacacccgcccattgccagtgctgttaggatgcttcccaagatagaccctattatcgcacccatccacccaccccgcaatgtgatgcccactgctccaccggcgagcataaccagtgtcagggtaagaaatatgtgtcctgtccacgaaatatgacgtaattgccgccgaaagatagggaagagcccaaacacctcgatggagaacagcatcaagctgaaaacgtgggttgtggacggaaggcgagacgcgagcactgtggacgccatgacggccgcgtttgtggacaaggatgcaggaaacttggtggcgccagcgccctctccgctcccgtagtcaaaggagaatatgttcatgattagtagccagcagctcaacgcccagatagagtcgctggcggtcgattttgtgagggactttaggatgggactcagtccgagaagcgagaagtatatgaggaaagccgacttcactgtagacagcctctgccgattccgagaaaggaaggactggggttgccagctctgaggctgcgcggcggcgcctcccgtacagccagtggagggtgagcccgggtcctgcgcggtgagggagtcgacgctgagcccggtactctggcgtctgagagggcccggctcgttttgcgccatgctcaagccaagaccatggacttgattttccttctgtccattcgccctctggttcgtagaatgaacaaagcttgctgctgag

SEQ ID NO: 4849 - DNA, 9416 bp, Emericella nidulans
aagacctcatggaatgctgtatagtataatcaacctcctctaatcccaactccgaggctatactgaagcaaaatggatcatctaaagctttgccttagtcctcccgtcaaacccagcgacaaaacctgcccttttgatctcaggcgcctgggctaaccatccaccaattgcttttgaaaactgcttgaacgccgccgtggacgcatgctccttgaggttctgggagtcagtgtatctataatggaaaatattagcacgaactctgatccagactccatgtcctcgaagagcaggcgactggacataggaagagtttctcacttctcaacaagaacaaactcctcagttccctgcggctgaagcgcaaagtagatttgggttttgggttcgttctcctcgacgtatttcgaaagcgtcctgaatgcttctgcgacctaataacctgtttagtggtcttcacatagtctcatagttcgttatatacctcgttgaatttgcctggtttagggacgagtctgacgacgttataaagctccttggaggacattgtcagttgttcttgagttcaggtatgattaggtagcaatagaaatgttatgacctgaaaactgggtttataaggacggcgttgagagaagaaaagtagatactcctatatggtctggacttcggttgttgtagaagtggagaaaggaaagatgccgaggatgtacatgcatgcgacaaggttaacacgattgtaattgagagtttcctactcgcattatggacagacatcctttagatatcctacttatggtaaggcttgtggtcaatttagaacgcctgtggtattgaagctgcatactcgacgaagccggagaatcagctgtatacctcgatgcagccatagctacaggaagagcttcagactagtttacaccttccgggaatatcacgacctttcattttcctcctcgtacgtatatgttcagaatgtaaattcagaataattatccatacgagcagatactaacgatacaccagaaactgaaaacgatcacgtgcacgtgcactgtgttctgtgacgtagccaaagctcatgtggggaccgggctggaacttctgcagtgtgctgctactttatgaccaacgataacataaaatatctcatccagtaatcagtccatctatataagatgaaaaagactctgttgctggtgtttgttcatggtttcaaggtaagctagcgcctcgcttcttggtggtttctatgcaaagcacaaggtggaggctccgtcttccccgcatagaggtggtccagtgctccgcatgagaggaattttaccacgaagagtcgctaagaaatacctcctgcaaccagggcggcgatgacacatttggtgaatttccgcaacatataaaggttctccttagccgcaagctcccctccataaccgtggcgacactcgtttaccccaagtatgagactcgagggagcttgcaggactcagtgagtgcgtttcgggaatggtatgtgttgataatccatcgctcagctgatgaaaagctgcgctgacgcactgcaggctgcagaatcaggtaatcgatctagaagtctccaaccgaacaccttcgccgaccgttgatccttccgtgcacgtctttctcgttggtcactcgatgggcggaatcgtcgctgccgacacactgttgctcctggcttctgaacagcccataccggcgaggactccagctcagtcgtcacgatatgaattcgatgagggctcaaaagatacgacagccgcagagagcactaatctggcggactcgggcttattcatgtttcctcatattcagggcgtgttcgcgttcgataccccatatcttggagtcgcaccaggtgtagtgtcttacggcgccgaaggtcattacaagacaatcacgtcaacatataacgcattctccgaggttgctggactatttgggctcggggcaaacaatgcttcaagcaaaggggcggcgccaccttcagacgaagctaaaaagttaccgcctgcgtcagatagtgacgctgcagcgacaccgtcctggcagcgatggggacggtatgcgatgtttgctggcgctgcaggagctgtcgctgcgggaggagcggcagccatgtattcccagcggcagcggttgaccgatagctggggatgggtttcgtcgcatcttgcattcgtgggctgcctagcacgaccagcagagctccatcaacgtattgcgcaactgtcgcaagtgcgcaaagaccgaggaatcagatgcgtgaacttttacacctgcctagggaagggcgccccatccctggtagaaaacaccggcaacgtcaacgagacgggcaagggtcaaacggcacccttcagctccaggattatccgctcgaagcaccgtactttttgcactatcccggatggcgaggaaggcaaagcccaagaaaagccgaaacgcacggggccgggagtcgaatggactaaggctgtaaatgataaggccaccgatgagatcaaggcccatacctgcatgtttctcccgaagcagaatccggctttttacgaactagttaatcatgcatgcacggcgatggtcagatcggtggacaggggatggtacagtaccgcaggaggacaggctatttacagcgaagcaccagcggacaagatgccgcggcccgagcaggaccgagccaacactcaagccgaaagcgggatggatgaggacgttgtaatcattgattgatcatgcagaatctttcggtgcggttcctttgcgccgtcaaccgtctcctgtcagcccgccgatcttgcttgacagcgattcttcacggatcagcgtcgttaccggctcactggagccggctgacagacttcattggtgtctttgcactacatacttcaggccattagcaccgaacttcaagtacagagtacaaagtacaagtacggatgttcagcgtcctgcgccaaaatagcggattaatgttagctgcgagtcacaaccacaagccttccgcgcaactcatagccttgcaggggtcccgtgcgcgaccatcgcccaccaaagcagtccaggaacaggatgtgcttccagccgggtccaggctgctagtcaatttccgtccctccgagctaggtgcacctagtcaatgtggtgttatccaataacggaaaactcaccggtctcttcgcggccaattagcctatcagcgactagtaatcgacgtctatcaaggtacaataatcacgaaatcgcacggcagtcggcatggcccgtcagccaccgtatatggtatccgtcgaatcaattatagtcatgaggtccttcaaatgcattcgcagatgggtcatcctttctgtcacatgccggcaatattcacttagggcttattaaacacgaaacatcagtactaatctcaagcctgggggaatcagccctagcttttgattttagtgcaacccgctaaattattcgattctttctgtcaagagattaattgagaagattaataatgtaacgggatgagacaacaataaaccttaactgcatactgcgaaatgccgggtggaaggtgtaaataaatgttccatgcgctatactcctacccaaaagagcagtgtgcatacatatgagtcggataaacccgcaggctagcgcgatgttaagttcgacagggatctttagtcgtggatatttcctactttatcaatagttggtatcagtgtgtagccgtccggttttggtccgaaacactgaactttgacggataaagaaccaaaatattttgtgatcgctaaatcctaccctttgtgagaatgtacatggataggaaattaagagaaatccccaaacgaggatgtgtatgacggatggatattcgctggattaataatagaaaacaaacacccgacgctgatctcgctatatatacagactgatgaccaaaattttggacgattcaaagtgatgtcgtaaatagattagtgtactcgcttcgaagaaagaccgcatcgtaaaatatgtaaggtttaaagtatatcttgtgaagaaacttggctggtgcgtctgaatggggtatatgtcgacagtagactaatagccgtgaccgttataggtagacgcacgatgatggtacatgctcccggcatactccgaattcgtatcttggtagaccgtcgtccgacggtcctcgtccgggagaagttccttgatctcccagttgttcggcttgattccgacggagaactcaaggtcctcttttgtgatgtagtcccagaactagagagcaaatgatgtcaataaaatgcaaagagaagcttggaagatttaacgttgaagctaactgtaccttatagaccatcatgacggcgagaagattgcagaatgtagcaaagaacagaccatccaggtaatgctggacattgtcgcaaatgacatctccgaaagcgtacatgatcacctgacctgcaatgaagacaagcaggccgaatgcaatatggccgagcggccaacgatcctcaagagtgttcagcacaagtagaagttgcatcactaggtatactgcgatgcagatcgcatttatgatatataagacgatgaacatggcaagagtgtttgtcggacttagaccgccccacgacttgaacgtcaggatagagatcagaaaggaaacggcgaacatgaccgttgacgtgagccgaagaagccatactgacaaggctgttccgtcttcgtatagttggaatccgacaaacccgtttacgagtagacttgtgcaaagtgcggaagtcaaaccattctgtactgcgacgaaccaggggaaagggccgcttcgaggaggtactacgccggcgtcgatgacgagcgaacatacggtgagggccatgtaaatgtaaaagaaggtgataatctcctttcggcccaggcagggaacaatcgttagtgctggcttgccggaaaagaagatatggcgcgacaaacttaccgacagccgtgaatttcgacctgatgtgcaggatcatgatcacggtcatacccaacgcgataatatggagaaacgacgcagcaccttcgaagataatcgtgttggccagctcgatatttcgcgcatagcagttcggtataatcccagtagagcctgagattgctgacgaggggccgaccaaagaacagagcggcagcgctgccttcttgcagatctcgtcaaagtcgccaaagcccatcttaaaagttatttgtgcgtttttcgtccgttctcgactcgatcaatgaactctggtcatgcagttccccgaagtaagaggcgagcttgataggggctccgctcctggattcaggaacgaggccgcagcgagcgactttttgacgttagccaggcgcaaaggttaaccgcagcaggaacttgagcgagtgacggcccgggtagggtgcaggatcgggcgcagaaagtttccgactgcgaaggatgatacaagttgccacaacaaggctgggaggggagtcctggctgttgtctgaaattagatcacgagatccactagtgccgatcgaggctgggctaggctgagccgatactttactatctttggactagtgtgttttaaaaccactaaccaaacttggaactatgcttaccccacccgccggagttctaccgcagctgcgcagtgcgatccggcggagttctctgctgattttgaggccatcggcagctttgtgtgggatcggtacctgcattctgactcctataacccagatgatgagggtttgggaagaactctcaaggctgggtttgtctccatcttgtgctggatggccagattgtgtgcattcgagtccttggtacggggtgatgccttccagaatccttccggaaactgccagccacacgagtattacgcctctagtttcagccttctacaaactcacaggatcgcgatggctggcgtctccactgaacaaactttgtcttcaagtgagtcgagtctcgaagctgcggctgttcgtgtctgagagctaagcgctcgcacttcgcagtctggaccggtgcagctcgtcgcaggcacagctggcggccactttggcttggttaggcttccttggtatagactaacatggctcattactttcacagcgcaaagcttgccctattctctcctgacagctgcattcgggcaagcacattctcaaactccacactttgcggttccgaggaaagcacagaaggttgagctgagacatggagatcctgacccgatgtggtgccatagcatgcccatcgcccgcggcctaccatagaacgagcgaggaatactaatttgtgggttgagccttgtctcaaggtccgcagggatccggcagttgctcggaagatcccgctagacgatttcggacaacaaagcacgaaacacgaacacgggtaccaataaacatactttctattacgaggcggaaggacaatgacgaggacgtttcttcttggatccgccttcgttgagttgtcaccgacgcgcagttttgacctggccgaaagccgggtatccgcgactgagaacacgtcacaggattgaagagtttatctgttacaggccgggccaagtcagttcaagctcctctttgagtgaaatccatgcgggctggaaccagggtgttatgcagatatatcgtgggggccggctttcgtacggtggacgggcggaggctcggagcacgtacagagttaatgcaagaatccacagctatagaagccggaactaaaatcgccgcagccaatgagtgttcttccgaagcatcaatacgctactgatatcatatcaccgacctggagcgtaccttatacagttatactccgtgcccagccagcctagttccacacgtaaaaaccctggcctctcccggagtttatgcagcggtgggggctgcaggctccatcatccatggaggttagaactgccgaatcttggaaactaccggtggcctactctgtacagagtttccccatagattaacctaacgcagctctgcactctcgatgagacttactttcgctacaattccgagttcggctcgttgcccagcgccagcgcggacacgatctgtcagtaaacccatcgcttcgaattggaatccaactgactattgatctctgcatgagatcccagctagcgccacgtgccgttaaaggcttagactacatcaggtttcaacggctttggggggacggcgtcgatcactgataaattctcgcaacccgatcgagccgaaacgggcggatccatgaggacgaatttgaagctatccatgtgggcccctaagttccacccttctctttcacggccacaacttgcagcgcagccgcggtaccgttctacttcggggccgatggctcggaaaatggcaatacctttcatgatgctaaactggatgggcgccttgcgtcgctgtggttggctcaggatgaagtccccatcaatccctgatatttaacatgggactactctggtataccccggtaagaatgttagtccggtgggccttacaaggatatgactcctctgaagcggtgaggccttcaaagcaccgctttcttaattcagcctagttttgaagctagtaaaacctccaatatcgccatcctcctgagatccatggtggtgagcattgctaatatggctatccccagacctagtacccctccagaggcgcctttggaggtgactgagatatctgaaaggagccaaagttctagatggctaagtcgcgatgattggattcgcattttgactctacaagatgctggttttacctatcaacagatctcttctcagcttggatttacctatcgtcaggtgcaatatacctgccagaatgagcaatctactcctcaaaagcctcctggccagcgcccgaagctatcagaagaggatatggacaatatcattacctttatctcttcatcacaacgtacgcgccgactatcttataaacgagttattgaagaactaaatcttccctgtggagaaactgcacttgctcgagcacttaaaaaacgaggctattcccgatgcaaagctcttcgaaagccacctttattggacaatacaaagcgtgtacgtcttgcctgggcccttgagcatgtgaattggataattgagcaatggaattaaatactttggtctgatgagacttgggttactccaggcttctataccagaatctgggttaccagaagagcaggagaagagctagataagacctgtatttgttcgtctacccccaaaaagcatggttggatgttttggggatcattttatggagatactaaaggcccttgccttttctgggagaaagaatggggctctatcaatgcagagagttactgtgagcaaattgtgcctattattgacggctatctttgcctgaaccgacagcaaggtaactatctttgtcttatgcatgatggagcacctggccatgccagcaaagatactatagcagagcttcatgagcatagtatctatcctattagttggcctgccttctcccctgatctgaaccctattgagatagtatggaactggatgaaagactggatccaagagagatatccagatgaccgccagctatcttatgatgccctatgagaaattatacaagcttcataggatgcagtccctacagactttttggaaggccttattgggtctatgcaagccagatgtcaggcagtaatcgaggcagagggtggccatacaaaatattagtaagatattagcattaatacgaacggcagaatccaaaggagtcatatccttgtaaggcccaccggactaacattcttaccggggtataccagagtaaatggtttaaatcggcctcagaataataatggatagtcccgaataataacactccgtgacaaaaaaaaaaggccaatcacattttggctcttggccatttttttcccaactcccctgtcgagtaaccctggcagactgcgcctggcttgtgacggccccggaccctactataatccttgataatggcagttacaagttggaccacttctctccatggttctatgagcaagaatccctgagtatatattgttctctgcttctggtacattcgcgcgctcacctcgaccatcctttttcttcaatccggacttctgtctgcttgccagcgatccactgcacccaacgccaagtcgctaccactgaacacactctatattccgcctccatagagacgcgcaccactagctcagccttcaacctaacacttctcattccggctggcccgtccatttgcaaacaataatgtgcaatcattacaagaactactacatatacagcgcatgcaaccaacccagctctcatgtcattcgcacctccatc

SEQ ID NO: 4850 - DNA, 4307 bp, Emericella nidulans
tgaatccgaccccgtttgccactggcaacgccgcatcttcgcattctgccttgctcttatccttttcaggagcttctccggctccctgatcccgtgtccccgctcaacggagtatattgaggggcacttccccaaaggtctgagctagagagtagggtacgccggcaggtgcgttattacaacgctgactttctttgcttatagaattttcctagagcgggatagaaaaccttgattctcggtaaaacggagcagaagccgttggccaagatggacaagcaaatcctaatgtccttggcgatggcgacgtgcgatgttcgtgtgagcgttgactgcagatctgatctagctggagatggtctgtgacaggcggagtcccggaaccatggttgaggggtctagtgagggtgatgattttatgactcgcaaggcgatggctaattttttgcaaggttcgttgctatcaccgtaaaggtatgctttgcgggaaactatagctaattctaatctccagatatgcagcatatgcagcaccacgcaagctcagatctcgtccattggtccttgcggggctccgatttcaataaactttgacagtcagcattcagtcagggataagattcttccgattatcggtccgaggtctacggtccgagagggtcgctgcgctctggcagccaggctcctatcgtggcttagggcacgagtagggcagtgcgcaatcagctgtggcgaggggctcagcgaggggctcagcgaaggacgggtcctgtatacatcgtctggtctgcatttactcagagcagtaaacctgcatttagtccgctagtttagtctgcttatttagccactgtatttagcccaattccgcctgactcgtagtatgcaactaatggccaggctggctaaccggactgtataggtagggctacaagtaggttaggggcatcctactacaacccaactgggctactaagctcactaagctccgccatagtcagaccgtccgtcgccttatccagtagcttctcctttcgtctagcgccttgtctttccgaccggacgaaagcttcctcatagtgcctagctctaattatggagcacatcaatacttcgtatctactctgagtagtcggtgctctaggttaagctcccggcatttcccctgaaccggatcttcgaggcttggtgaggactgacctgcttgtataggcctagtggcgcggaggtatgtccaaaagtgagaagtagtacgaagcaagtacgcctgttcgttggctggtccctcgtattctgatcagcttctatccagaactagtgtcgatacaatcgcaccactgatagaggaactccgcggaggactatagaaagactcctatttgcaagtcaaagcgatcgtgggtaaatctcggtactggggccacatagcattagagggaaaacatctcgtgctgggcccactgagtggtctgttcggttttaggagtcgctctattccgactactaaaccagatctggtagttttctcttcacgagtcagtcatattaacgacaatcagcgttcttgtcctggacaatgccattcttgcttttactgaggcgggtcctctacgttgagagtacttatgggtacttatggttctccagactcgacgagcgatactctggtgattcgagattacgtgtcgggataccgtcaactaagccaatgacgagcggtctgttaccactaccttgaaactagtctggggaacgggtggagtagacgcagcctggcgaaagctgatcttgccatgcccagagttcgatgtcgagctcgactcgagctcgacatcgagatatcacgggccagttaccagatgcagagggcaagacgcccatcttccccccgaccggggcgcagccactggacgttattttgaagaataaccatggatatggtaccaactatacacgatcacggacacacagcctccataccaacagtaccagcagctcgcccccccttgccccttgcttttggccgtccttctcacactcttgcgtccactgcctgtctccatatattcgctcgttcatctgtccatagctcagtccgcaccggacgatgtccgtctggtcttcctggcacagtctagatccggatggtggagagtcgttggggttcctaatgagggagggattgtgatcggcgggtcgccacgcgattggtatcgtatcagcagccatcgaatttgtgggccctgactattgtgtgacactatcgccggactaatgcaaggaggagtgtcactgacagggtcttggacgatattaagctttcgccaatgccccacgatggcggcgaaaagcgtgcaaagtggccacgccgtacccggttccagaatgcaggcttgccggtgatcaggtgtattttcttttttaagtactgagaatacgccatgcactggccgtttcaccagggacgggattgacttgccgccgtgagttgaagactgccaccgtctaaactctacaacgccgcatcccgcaaccatggctgctctctacagagccattctgctgctccggagcgaccatggcctggatggcgagcaccacctcgtcccccgacaatcccataccgtcgagaccctcgacggctcgaccaaggccggtttcatcgctatgggcatctgcggcctcgtctcgttcattgcaacactcagtctcctgttgttcttgacctaccgctttatcttctggaaacgctactactaaacgacctctcgcgcacaaccagtatgtcgttctcatctaccagctcctgctcgtcgatcttcaacaggcgaccgcggttctgctctgcctgcactgggtgaccaagggcgccgtctactatccaagcgccgcatgtatcctgcaaggttggtggatccagacggccgatccgggaagcgggttgtttgttatcgcgattgctatgcataccggtgccgtcgtcctgcgaggccgccagttatcgttcagggcgttcgtggcctgtgtgattggactgtgggcattcatcctagtactaggtttcatcactgttggactttacgggtccaagacgtttgtcatttccgaggctgcctgggtaggttcacccgccccgcccgcccttgcttctactcccccgctcgctgctaccgttgcaaatccgttacaaatactaaccagcatatcccggttagtgttggctgagtcctgagcatgaaaatgagcgtctttggggccactacctctggattttcctcgccgagttcggcactgtggtgctctacggtataatgttcttctacctgcgccgccggatggtgcacgctgcaaagctgcggcccaaccatcaggacagcctgaaacggctcaaccgcgtcgttatctacatggtcatctaccccttcgcctacatcctgctctcgctcccgctggctgccggccgaatgtccagcgcgcgtcatgtcattccgagccgccaatacttcgccgctgctggttcacttatggccttgtctggtctggcggacgcggccgtctacacgctcacgaggcggcagttgctactcgatacggacctcagccagtcggacggcccgtataatcgttatgcctactcgggctcacatacgtaccatacgcaagttacgtctacgactggagggcgtgaaaggaaacgaggtcggttccgaaagggaatgcaaacgttgaatgaaactatccaagatgatcgtgatgattctaccgaggagattgtaaagggcggtcgaaatgacagtggggatgtcgagatggtcaattatacgggtcacggagtgtatcaagagacgacgatcgagatcacgcacgaggtagcggatccccgagagtttccccagcgggaacggcatagtgggtgaaggggtcttcatacatatatcctttatatattttcttcactacgaccggtcgacctcagtcattttcttttgtttatattataccatatatagtacactcaatgttaatgctaattctttcaactccatgctcatttggttactctttagattactcagttagttgctcatttgattgatataattgctcgtctccagccttttgcggcctctcaacagcttgacctcatggaatgccctgtctggtctgtgcttgtgttaagaaaccgcactccttccaactgcggacaacccgcctcacgtgttcatcccctccccctcccccatctctctcaacgttttggaatgtcttcttgccacccttgtgtctagcggtccctgacacgacat

SEQ ID NO: 4851 - DNA, 5583 bp, Emericella nidulans
gacccccaatatatgctcgaggttacgacggagagaccagcgcgtgtgcttttgctctgcccgtggccattcccagctgacagattccaccggcaactctcgaagacatctgtttacttcagcacctgcaatgacaaaatccttccatgcaaaggtcccatcgtgactctgattctgtatcttgaagacggccacatattctattgacgctcgatatttcatgtcgtgtttaatagacaatacagaagcgtctttcagctcctgggaaaccccatctttccaaaggccgacgatcacagacaattgtttgccacggctagtcgacgacagccgttccatcttaatcaggctgcggccgtgcgggcctcgatagcaatcactgggcacgtcgtccttgcaatcacaggtctcttccttggaatcactgggcacgtgcttgggggttgtgtaatccagatctcgcaaaaggaaacacgggtcaaactccagatatagcgtctccttgatcgcgctttcgttcgtgatgcacatccgctgcagtaccatatggccatggcacaccagatcgaccctgacgttgattccatagccgatgctatatcgaatgcgcggccagcgatctcccagatatgtcattacgggtgccgtctggtcctcggtgacattgtcgccgccaacctgcgagattcgcaagccgaacccgtttcgatgggattgcgcctggctcatcaagtcatcggcgcgagcaacgatgcagaagggaggcggcgcatgcggatagtctaatacaagcattctcgagatcaaatctggtcgatcaaggtactggctgacgcggagaatggacccgaatgcgccgctcgttgccgttacagttccatcgccgaacgaaacatacggcgcatgccgctgctggtcgtctgtatgatctcgagacgcatagtcggtgccgtcgctcgatctaggaggctcaactacagactttagtcagcgcgagcttcgggctccttctctggctgcatttacaattcacaacactctgaaaccccggatcgagcccgtctggaagcccttcaaactggagtgccgtggccattgagaatcgcgaggccagcaccgtgcggcatgagatcctggagctggggggggcataactcgtatttatgcagctgattgttgctcagcctcaccggatcccatttgccgatccccgtatccgtgctacatttcgacttgtgaaagtggccaggggaagagctggccttaaagtctcacggtctggagaccaaatgagcacctatgctagctctgtagtttgcagcccctatgagaatgaacaccggggaggaagcagccaagctcgttctcaggttcggattaacatgcttagcgaggcgtggcatcaattacaccgttgtcaagcgccgtcagccgccagacgaactggggcagatccggaccgtgacaaattgacgaactgatagtgaaattagggcaacactggatttgccatgcgaggatcccataacgggtcaataccgttattgccctgtcgagtatctgggtctggcgaaccagagctcagcatgttcagggaaagatgaccgctgttaaggttgcagcgtcgggcgctatatcccatactctacactcacatgattgggtgatattaccgagcttggaggcagaagaagggtaatctgaaggctaggacacttgtcgaagaaaccgctggtgtgatagatttcaacgcatgcattagcgcatgccagagcagcaatccttcacgaccgcttaactgataattattttatttatatagcgctgtcagcattcgcagctggaaaagatattttatttcgcatttattgcttactgaaccaccgaggcttctggcgagcgcatttgggttagaacaaaacccttgatctattttggtcctcacagatgttagctagcaagaggtccgctgtgtcagtcgttttacggggatctttgctatatcaaagccgcacagatctgtcgcggcacgcctgcagaactagactgctgaggctctttgccgacagataaacacagtggcgtttgaaggatgtgtcgcttgtgagcgttcatcttgactctgggtttggcatgcatatcgcttgttggcaaattcctgaaccaaaatgaactgtgaaccttgcaccaccattgtctgaattgggcttcccactcagccaaagggctaacccttcttgaggagaaaataggcctgacccaacggggaatattatgtgactgttccctttgagctggtaagggacgagatttcccgtctatagtgaaacttctgaggcagcgtaggagttcgtaataaatatagccaccctaggcacagataagacttagaacgcgcaaagggaccaaatctacggagatattctcctctcgtgcgacactaatgcactcattctctcaacccgtacgagttgtaaatacattctccaagcctcacatacgcgtccgcaggcattatttaattgacacaatctggcttctgattgattgaaatcgaatgtatggtccggttgactaccgtgagatgtaattagattggaatcaaaaaatataaacattagataaaaataaagagataagaataaaatagaatgatataagaatagaagtaagaacaggggtaagggtaacggagttatcagcattggtgaatattattactacttgacagcgagccatccctttctgcagcgtggatgaggaacttgatgacggtaataggcacgacagtgttcaccaaaggttgtctttcgaagctggaagcactggtgataattatcggaaatttgacaatgcgccctatatattaagaccagcacatttgtctgggtaacattcccgacgacacgtttttatcgagaaggcttgattgggtattgcttaagacaacggacaattttacacccggaccaaaccagatatatactcctggcggtggcttgattccttggaggatgcccatttcatccccaaagtgtccactgtgggcagccactgggacacacggagccgtcgagattcgatcttcaccatgtatatctggcacttgcttgggaaatcaggagatagtggatgttcggagcttggacatggtgttgtgtaagctatcccacaagaccattgtagagatcgcaagctgactaaacaagatcctagtgactcaggttcctgggctgtcgatcctgctgacttctcaatagttgcaattattgtggctagatttgatgatcttggcgtaacctacgcgctgccagcggccgatgtctttggggacattatacggaatataggtcttaagacagagtttatgttgggggacaaaagaacccttctatcaaaagcattgaaacaaggaaggaacgaacttgtttgcgaacttttgttatccccagccatgaatatcaacttgcttcataacgaagttttgcgggtggaatctgaagggggccatgagaaagtcgccaagctactgctggagaagagggctgatgtcaatgcttccaatggagttgctctgcggagtgctgcagcacatggccatgcgaagatcgtccagctcttgttggagcatggagcggatgttaatgtatttcatggatattctctgcggttgctgcagcacggggccatgaaaggattgtccagctcttgctagaacatggagccaatgcaaacgcttctgatggagacgcgctgagatgtgctactgaaacggccttgagaagattgttaagctactcttgtagaagggagctcacgttaatgcctccgctggagaagctgtacatagtactccagattgggttcaggatacagaaaggtcgcgaaataaatagcgggttgcgttggttgataccagagacaagctacagcgctggacgcggcgcgctgcatagggcttgtgagcggccggatcagttgcagtcgtaggagctataataagaaagaagaaaaggtgaaagaagactgttcagtgctgaagcttctgctgttggtggatgggatcatgcaggtaacatagggaactgatgttaatcgtatgtgacagcttgtcatatatggaacttcccaattttcgcttcgtcaatgcaagttcccgcttgccgatgcttacttatgcagagaattctgctatttccaccagaagctatttctcttccaactgtcatattatactaggatgcttcttattttttatttcttatgtatctaaaccgctgtatagagctaggttggaagaatcagactttcattcttttatattattaacggctgatgctggtgattaggtctagcctgacgctccataaatatagagcagaatatcagacaaaagtcagagaaactcttgctatttttcttaatcctggagggattatagcagtgctctaaactttagtcacacactacccacccgccattcgctcaagtgggtgattcaccaccttgctcatactaactcacctgcactcaccctagatttgtgccgcccacttctaaaagcagcagcacactcagggcttgttgcacttttattcgcgttgataatgatggcttaacttcatctgagcggacgggaagccatgctttccacaccttatggttgtatgtacttggaatgcatggatcctgtatgttatgctatacgtgaggctcgtgctcatattttccaacttcgctatggaccaccactacgcatgcaagtggtatgccgttgtcctttgcgaaacaacagcatcaccctccaatgttcaagtggtaccagccatccaatatgactgactcaagagtgatcaaattcaatatcgccggcaaagcgatcgatgtcatccactgatattcgtctatgagcgtttccgcacatattagtagtttgtggcgtagcccaatagtcgcgagacggtatatgatgagagtggttggctatcgtattcggacaaatgagcgaatatagaacaatgaatcaatatggattgacccgatataatggactggcaactgccaccttcatattattatgctgacatgctattccctggcgggcgatactatcgaccgcacgcgaattattcagtaggagtcgatttctttgaccacaggggtatctcgatttaaagtgcgaagcgggggattgggcagagaccttgagttggaatagtatggagcgatagatggctagacataaccgtaagggctcaaactcaaccattagcattccgcaatctctctcgcaggcatatgcttctcggaaaaggtcatactgtgaccgaagagcttacaatctaatattccgggagtgaccgaaggcaggcaggttccgccttagagcatgccaacgtctcggagccgcgtaataaactgtgctaattctcatagattcaagaatgttcagaagagaaggctttgagtaatggctgggacgaggttgttaaaacgtaaatcgtctatcatgacaagaataagctataaccaaacaccagagccggaatatccttttaaagctccgaggtcatgctgcatatc

SEQ ID NO: 4852 - DNA, 11457 bp, Emericella nidulans
gtccggtaactgctcactcaaggcactaggcgagtatgacggcgataatggcggcgggggactcgacgttgttgaggatgtaggaaaattggggtggtaggcatcttggataaaagtccccatcggagccgccgttgttctgttaagattcgaggccgcgttcttgcgcctcagcgtctttctttcctggcagccagcccagctggggtcgctggaaagcgacttgcgatagttgtgcagcgagagaacaccggcgacgggctcgataggaagcgccggagagctcttggagggcgagttcttgtaaaggatctcagacgatggatgctctaaagaatagctttcgccagacgagaaaggaacgtctttcacgggctctaggcgcggcgacttcggtggaaagagaggtggacgatcatattggagttcggcgggccagtccatggtctaagtgacacagcacaaagttcaggggcgctctgatacataaaaatgtttgattactattggcagaagcagcggcccgttagactaatagaccgcattcgtattgcggtccagtagatagatatcgcagatgcggagaataaagaaggcctgagcaaccagcaggcgttggggcggagtagggacccagtagaagtagtatagctaagagaaggcagttcccgcggggaatactgataaaagtggaatacgagaaggtaaagagcgacaatagcgacaatagcgacaatagcgacaatagcgagaaagggaatgacaatgggagacctgaagaagagatgaagatagagacaaaagagacgaaagggagaaaaccagaggggagacttgagcaagtggaagagatcaagagagatcaagagagagatcacgcagagatacagagagcaagtgcgacgtcgcattcaggcctggcaggtccactcctactttccaccctcaccctccaactcgaagcccacattttcctggtgatcaccagattccaaaccccttgtaaaattccagttcgatttgggcacccaaacgtggctccagacctcccttgctgaccgcaatatctgtttcagcatgctcactcccactacaaacccgcccctcccattcgtccacgcccgcctccagcctgcagccaatggggccagcagggccgaccttcctctgctcagtggcgaacggtgttcagctggaaatcgggctactgaggctaggtacgtgtcatgcattaacctgcagagttcctgagtttaacttctagccctgtcgtatccgtccgttccatcgtccatcataccctcgcaattacctctctttacgaggtcatctacagatccaagatgaattgagcctcaatatcacgcgtaataaatccaactccaaccaatgctggacatcaaagtaacttgataatgatagtcatctgacggtcgtctcatcataatagccagaaataacaaaataggagagaaaggaaagagacgatgagccttcgcagttaaattctccagaatatccaaattatccaatttcagaccaggcccaggagataaaagccaatgtatgcagtaaattcgcagaagggggaatctttcagtaatatgaacagatgatgcgtgcgtcaaatcaaatctaatgccgtttgtatttctggaaatcaaacgtcagctggaaatgccacaataacggttaggtgagggggcgcagtcgagccttacatcttcgattttgcggcgattgctggggtccatcgagttccctgcccctagcaacgtctgtccgacggccttggatactccaatcgctggtcgcagaataacggtcggcgctcgtttcaggacggcctttgcagcagctttagcgctaccgctctcttgtacttctccaggcacggcaatgatcgcgtcccgtgtgagaagcagatcgcgctccaatcccctaaagcctcctcgaagaccttgtacgaccccaaccggctgatcggcatagagcgatattttcttgggtgcttcatcttcgtcgatctcgtcttcctcacctgtcgtggcctgacccgtaggaggacttaggagctcttctgcaccctggagcacggtttgggttccaattgcaagcttggcgcccagtttcacaagctcattggaggtggttttggcgaatgcgaaggctcctttttggatgctgcggacgatgcggccgtcttttcggtactctcgcacaggaactgcgacgagatccttcacaccgctgcccacattgaccagtgatctgatgggggctagaccagcaagaacaccggggagttggttgttcttaatgtctggcatccaaacatcgttgagcgcttggccgagtttgtcgaaccctttcgctccatatacgataacatgtttcaacaccatatctgcctcatctagaatgaagaaattcatgaattctgtcgtgcggccggagcgaaggcctgcatagtcaactcgcttgggcttgaagtcgagcttcacgggaatggcattaatctccgatctctgcagatacggtggctcctgagaaggcccggaaggagccgttgagtcatccctaaattcgaaaaaccgactcatgaaatcgagcgcgtcttgatcgacgtgtagacggagcggaagtacggtggcctgaaagcgtgtcagctatgccaggcgaagatgtgtacatccccctcaacttaccttgagtatgagttcagatgcggcaagatatgatacgggccgcaccgtcaggatttcgagatgcaccatactcgtcccgagttccttctcaccggcctcattcatgtaagtagcgaatttcctccacgttgatgtcggtatgtggtcgaagatctccaattccttgacccgaacgtccaatgagctcatggtttcttgggagcccggtggaaacacaaccaggtccgcacagatgcccttgagctcaaacgtcattttatggtctttgcttcgggacaaccgcaacttcttccctcgaaagccgggtgacatgtttcgccgtgcagtggtaaccgtactggtagtcgcatagctgccagtctcactgatgagatcgtcgatgtttcgattaatgtcatttcgcaattcagccgggtctctgttggcagggataccgatgtagactgagttgaacaagcagtcgccgatgatggcttcctcgtcgtcttcaaatgccgcagttgctctgccgctggtacggcggtcggtagctttcttttccacatctttgacagcctttgatatagtgtcccttgttcgctgccagtcgtacccatcgaaaagattccagatcacatgcgcgtcacgaacccttaccctcaaaggactgttttgcagctttgaatcatctgagaggtcataagtattatgcgtagagtcccacctgtgggctgtgcctcccactgaagactgctgcatgaaatggtcctcacgaaaatcaagttcagacatgctggatgaaacatggcattgcgagtggaaactgtcgcgaacctgagatgacggtccagacgccagttcttcctctgatgcggtcatggagtggaagtcggttacgtagtcgatatcacgttcggggatgtgatcctgtatttcggcctgatcagcggcccctataggcaagttgtctgcagcaaatgcatctccgctgagagaatccagcatatcccgaattggtacaacttcagttcgatacttcttgagctggctaggcgggctaggaggctggagtccactcaatatgctgatgagagtctgagttgaatcggcacaggtttcaaggattagcaaatcatctctaacttccacatccaaagatttcgccccgttttctgtcaggcgcattattctcactacagctgttgccgaagatatagatgaaaccgagacgtagcccatgtccgtgaacgcttgtatttggtcactctgcggagaagctgctcttcttcgaggtagattccctctggcatcggtgttgcgtacatcgtcaatgatcatgacaaatgcttttcgtaagtcaagggcgatttccgaggatgaaatgtcgtgaatagctccattgaaagtagagttagccagaacgatgagcccttttgcggctgttccacggggattgagaccaaggacgcagtcccgcatagagactttcagcttcataggcttcactggtgttgtagagccctcctcaagatcttgtagtggcgggtgcaactctgcaatatttgctaacgatgaggccatattggccgcaacatctcctggtgtcatctcgtcactcacaccaagaaatgccatggcagccgaaactgtatactcaacgcgcaggttatgtagtttgactctgatcgtaggttccatctcatcggcaatgaagcggaccatcaggaccggaagtggagcaaagcctggctttggaggcagcgcttccccaattagttcctcatcgccatttctggtaactcttattgagccgagctggccggccacgagggacgggatactgatatgggctgcttcggcgttctcaagatttgcagcgatggtcccaatttgcccaccgatatgcacgcgagcctccacgtctcgaattaacactagcgtcagaatcccaggccggtcatcttcaggtaggtatttggcgacgctcgacagcctccccagttcttcgcctaattgctggagtggacctagctcaggacgggacacaacaaccttcgctcctgaaacagtcacacgaagaacagatccctgcttccgttgtcgaaagagagtatctatcataatatcatcatcgtcgtcatatttgtctttggacggggtaatgagtgataagagccggtcgagatcaggttctttcggggtgtagaggaattccacacgaatattgttaaggctaacttttgctggcgcatctttaccactgtgaatagaaagcggcccactgagtttcgccttatcaatttgaactgccatcatttcatatctgctgattatcttagcagcggtagtcctcagcgtgagataatggttctctcctgatacgtccaacacaatgccaccaatccgtgcattcaccttccaaggaacactgggagtcggggatctaactggagattgtggggaacctgcgaagcggacgccgcgagttcgcctcggcacgtcgtttttcggccctttgctgccagacatagatgatatcgagctaccaagttccatgatcgtacttaatcctccgaaccgccctagtaagtcctccagccgctgtatgtttagactaacgcacagtggaagggtgtccgtcttgaaagtcgctgaatcctgggatttgctcaacgaaaggacaatatcattgccggttggtaataggccatctttagttgattcccgcatcttcatgtcttcgctaaaagatattaggtcttcagtagcaaatttgatggtgaatttggacactgccgcagagaagtctgttacattgttagcatttgaataatgcgcctgcactcctgatactgtagactggagaaggacactgtcatgcaaaaggtcgaagaaagtcgtagaagggtcctgttgctcctcgagtgggaaagattttcccggtacaagttcgacgaacttgatacaaagtgtacccagagtgaaatctatgtcttgggggctttgaacatccctttccgtagactttttgctcgtctttggttgcccaatatcaccaaacccctgtagcactctttgaccgatcttaatcatgagccacccgatggatatatcaaattgtacctcaatacaggaaatctcaactgagatgtttgtactgttaagagacccgagaccgtacttagtatatgacttagtgtcagtgccagccaatgctagttcggtcgaatcacgacgagtgcgtaaagaggaaggaggcttggagaatgacacagatctttctctaacctgggaagcctctaggtgggtggtcgagtctttgaaactaccacccgcggatcgagcgtctaacggctctgaaatatcttgatggtcttttgtgggcttcgtagaaggtatccatatagtgaccttgtcaatgtggaggaagctctttgaaaccttcgtggtctcgttcacgtcaggtgaaggttgaatagagtgcttgtcagtcgattcggagtaagattcttgttgctgacccaacgtatgtcccgagtgatactttgtttcacgatccgtaggtttaggtgttgatacaggtgttctatcctggtcttccaaggcttctgttgtctcgtcggtatgacccaaagaaccatgatgttgaatagcctctcgacgcaaggtagcttctggcgaatcccacgcacccgggatatctggtataaagcttcttgagtcagacctatggctcatggcgctcatgtacatgctttgtgcctcttcaggggagaataacctggactccgagaggtcattattgaagtaagcagagaccgatcctgaactgctagtctcggatggggacggtggagcaggctgcgattcctgcgaattattaccggtgatatcctgtgttagtggtcgtgataagacaggcatggacgattgagggccatattgatcaagcggcctttcaatatttcgtatattgggcatcgaggccaccgccactgaatgatcaccagatctcgagtgcgggtcaaccaacgccggggcttgaaaacccaagcttggttggctcggtgtgcttctatcagtataagattggttggagtcgccaggtttgatatcacctggttgaatatcacctaagccctccgagtcgtcatcctgaagatgggaatcaatgacagaatccaaatacgcaggatcatcgagtaacttctccgacaaatcctgcgactcttcgaggtatccgtggcttctgttctcatccgtatccgcgtcggaaaatctgccgtcataggtatatatcgacccttcaagcttcgctacaccatgttcatcttcaggaatatcaacggtgggctgagaaggttcaaaaatcgtggatgccatcatggcatgggtggagctagatgccgatgagggcgcaggcggtactgaggaggctgggctcgatgattggctagactttgaacgcaagggactcgatggtgatgttggagctgtaaattgggagtaattcgagaagactataggttcggagactagcgcgagctctatagcggagagagatatcggtcgttttccagggtgcagttcatccgagctggaggccgtgaccactgcgcccacactgatttggcgaatgatcagaagtcctgaaatcaaatcgggtttctcttcaggttgccgcttagacgggccatcctgtttcatttccacgtcaagccgtattgaaacttcgtcgacatggacctgcaagcgatctgcaacaccctttagaaatgcagcaacaaaactaggtaacgagaccgtttcatctccaaggcccagttcttcctcatcatcacttatggacgaggaggtacggtgcaggatttctgatcgcgacgataatgctgcttgtagttcctctttctcctccttcggctcggcctggaggaatgattcggcaaggtctgctggattggggatgattgattcatgtccgaactcatggctttcgaacaggctggtcctcgcagcagatgcttctttttcggaagggaaatgcaggtgcacgtcaattccgctggcctcgcagattattccgctactgtagatatcggccggaacggtaagtcttaaaagtcgaattcgggctgcgagcagtttgcttgaggccggaagatgaagaagcgtggctagtttctatcagaaggcatcgccggttagcatgggatatcggcggtgaatagcatcaaatgcggggaagatcgatcacagctacttacttcgagtcgtaacccgatatcacggagctcgacggtgcttcgctgaccccagcgaataccgagactgtcaggatctaaagcttcagtatcgatgaactcaagacgagacagagcgtatttgagcaaacgcttctggaaaaacgaaggtagaaagtaggtcattatgggcgataaggagccgaccggggctcacttagaagacattagaagtcatcggaaaagaacagaactgagaacaaacacgaataggagaaagacagataggaagagagcaaggaaaagtggcagagccggtacggactgcggtccctagagagatgtcgggttgtgaaggctaagtgcctgtttgaatgacgtttgagggtcccaggcgctagtgagctgatagcgatcaggcggaacagagccaaatccgtctgacacgcaatcattgatgggcatggaaataccatgtacatagggccctgcagatactaattcggccagagagttttctacgagttatatagaggacactatcggagccagggtctcgatatgctatgtattattttatctaaagcggagcgataagctcttgaacgtcaacataagaagtttcatgtaaactatgactaatctatccaggtgcatagaaagcgtctacctatcacgtgagtttgggcaggaaggtgcccgatgattattaggacgcggagggcatgggttatgataaatgcatgccagggagatggggttatatgtgccggcttagccagcgcacaatctgactatgatcagagaccgcccctattcgaagttacacttctcttcgaaagccaggactacccaatcgcaaaacttctcaaaatcggcgtagaattcgtgcagacgggcggctttaaggccttcaccaagaatggcttcttggatatctgtgttccaatcatttactgatttgtcttcgtagcagttccaacggatggaattctccaccatcatcgtgaggccggagagacccatgctgtgaaatgcaagtagagcctggtagaactcggatgacagaccatttggtccgagcccatatatgcctggcgagtcattactgagggcgacggaaactccacgagacagaagagctggaagagggtgtgactggaaagagttgctaagcccgagacatgcagctgaactcggtgaacattctatcaaaatgttctttgacttgagaacatcaatgagcagcggatgtttatatagtgaaagagcttggctaattcttcgggtgcccagcaaaactgcgtcgaataggttatcgtctgtttgatcaccatcaccaagactgtagccagcatggaacataaaggggatttccactccctcatcagcgcagcgcccacggaaccaaaatagtattggtaataaatcgttgagcggcttctcgttagcctctggcccaagaaggtcgaatccgcaaatgaattcagggaacatcttttttgcgagaaggcactgctccatgctaagaccaatgtctttgtttgatagaccgcgcatggtcgcccatatgactcgcgcgccatagaactcttttccttcttcagtacccctgaacttttcgacctcttcttggaaaatctggaaccagccagtataatcctcctcggtcttatcactaccttccagggtgtattcgaagttgaaggctactctgaactcaacataccttatcctatctgcggccaattgtgagaatatgtgccgtagacattttcgcaagataggttcatattgcaggatagagttgataataggcaaacggcgatcgaagatgtcggagatcgccctgctgccacgtggaatctgatgtgattgatcagaggccagagtacaccggctcttgagccattgacgaaagcccgatttcttgtccggaaaggaagccgcagcactttgcaagtcaatcatagtcgacggctcatagctatctgcccatagtgagcgcttatctgtatggcccccatcggagcgagaacaatatcggaacgcgaacggcgcgtcttggaaatcgccctgcgttagtagtggccgaggcgcagatacgtggatccctggcgtagcgaacgcctgatcgataagaaagtccatatcgaccatcgccggcagatgaccatgcaggagggaccctttcggcagacgtcgtacaatactccaaaggtcagagctttcaacccgcaccctgtctctgttggacatgcggctcggatgcgggatgccgtctgactggtaaccatcttgctggagtttggccagttcctgagcgcatactcgagaaacgatctggcatgcttttttcgctacgggaggcaacgcgttatgcaggtttgcatctgaacaacgatggttaacagtatatcaagaccaagcacatagcacacgattctcaccatgacgttgtgatttctctcgctgaatcaaggaatgacgaccagcgataaaacgctggatgaaggggtcctcatgatggggaacgccggcctctgccgcccataaacaactatccgagtccatagctctgccgtctgaccgttggtaagctggggattatcctagcgatcaggtggtcggaagtaagaccgtttgggggcatacgccgggaggcccaggcttcggggaaactccaaagaggtagaggcgggagacccggtcttggcaggccgtgaggggttattacacccgacgcgatcgctgtttccgggcatagcacatttttttttttcatctagtacatacctgatggtcagagaacgcggtgccgctgccctgtttatcagctcgaaaatgggacaagtatggatttgttgacgcagttgtctacccttataaccgcagtgtggaacagcactccatacggagtaatacctgctggcagtccagcctgactagcatagcctgactggtggaacgaaatcgggtattggtggatgtaaccttaaagcgagtggcgcgccttagtaaggccaaggagcgccgcggctgaagagccagtcatattgggtatagtagtacgtgtccagaccgcgactgacacgcgacagtcacgcttgggacccgagtatccaagcaactccagcagtacgagtgacgcagcgattttgtggtgtctggacactgggctctagagagaagatatcgcctagctaggggatcgcttaatattactgaatatctggggtatttgctggagttcctggggcaaagcttatcagcattgagccactgaccagggccacggcgttcgccgagccaagatttcaagacagtgccctaatcgcgatacggagatatcgtatcaacacgaggcgaggctgggaacaaagcgttcgtcccagtcgttgtgcgtctgcgctataccccgcgagtctggagaccggctggtgagcctgcaagatgttgttggcactaccaatgcctaccccctgcgactgatccttcagactcgaaaggttgattagcgctgtaacatt

SEQ ID NO: 4853 - DNA, 5711 bp, Emericella nidulans
ttattggggagtagagaatcgggttgcaacgtacggagatgcaatttgcgaaacatttgaacttggattagatgattctaaatcaattctaatggaatgccacaagagtcttgcgaccgagcctgttgacattctactagcatcacttctgcacgcttttggccaaactttcagagaccgctctttgccagcgatttataatgaagggcatggaagggaagcctgggattcatcaatcgacatatcccgtacagtcggttggtttactactgtttttccaattttcatacgggaacaaataccggatgatcctgttgagacagtcgtgctcgtcaaggacatccgcaggagtgtctcagataatgggaggcaacgatttgcaagcctcatgtcagcttcaacaaaagacgagaaaagagaattcctatgtccaatggaaatctcattcaactacgtcggccagcatcgtgatctgcaaagacaagacggtttgttccagctcatgaaccaaatggctggcgagactggtcaaggcggaggcgcatcagacttcggtaaggagactcctcgatttggactgttcgaaatatcagcccttgctgtgaacggaaggttgcgcttcatattctctttcagcaaatatatgagacaccaaaagagaatccgggcttggatcgccagttgcggtgatgtgctcagatctcttgggaagcgtctccaaacacatgctaagaggccaacactgagtgatttcccgatgctatccttaacgtaccctgatattgaaagcatgctagcaaagacgttgccgagtcttggtgtcagttccccagagctcattgaggacatttatccctgctctcgcatgcaacagggcatactacttgcccgatccagggatagttctctgtatgcagtccacgatacttacgaggtaagagggttcaacggtaagcctgatgttgcgagactcgcggaagcgtggcggatggtggtttcccgccacgcgatgctacgcactctattcgtggagaacttaaccagtcgtgatctattctctcaactggtgctgaggaactgcgagccatcgatactctatttgagttgcccgactgatgacgacgtggtatcgaccttcaatagccaacgtccggagatttacaatgaatatcaaccgcatcatcgcctgacgttctgcgaaacagcaagtggtagggtattcttccggttagagctgagccacgcagccatggatggtgtgtctatctcagtcatcttaagagacctccagctcgcttatgatggaaagctcgaccaaaacaaaccactgttcaagaactacattcagtatctacgaaatactccacaagacgccagtattgtgtactggaaaaattaccttgcagatgtcaaaccttgccttttccctacacttaccgatggcaagatcattgctcaaaagcagctcaaggttctgcgccccaaatttaatttgttcaatgatctgcagacagcctgtgaggaaagacgcttgactttgtcctctgcattcactgccgcttggggactcacacttagcctgttctgtggctcaaatgacgtctgctttagctatatgacatctttaagggatgccctggttgatgatatcgagtcagttgtcgggcctgttatcaatctgctagcatgccgggtgaagatttccgagggtgatactctcagagatatcatgcagaaggtacaaaatgactgcatggagcagcttgcctataataccttgtcactcatcgatattgtacacgaactcagactctcggaacaagcattgatcaataccggaatatcttatcagagagtaacaaagatgcagatgcaccataccacaggcataaacctctctcgtgtctgtgcaattcaggaccctgccgagtatcctttgtttgttaacgtcgtagcctcggacaaggctgcagagatcgaggttaactactggacggatacactttctgatgaacaggcagaaagtgtttctagcacatttttcaagtgcttggaaaacattgttcgtcatctaaaagagcaagtttgccagctcgaggtattgagcgactggaataagcaacgtataccgaaatggaataaacagctaccccgagaagttgatatgcttgtgcaagacatcatcaaaaaaaagatggcttctcaacctgataaacctgcgatcatagcatgggatggaactctcacctacgctgagcttgagtatttatcgtcgtgtttcgctgcgtaccttcagcaactcggggtacgtcggggaaccctgatgccaatttacgtgggcaagtccgtctggcaaattgtagccattttggctgtttttaagaccggtgccatatgcgttcccagggatgaggcacagcttggggacagtgtcgacaaatggcttgttgatcatggcgcacacattgttgtgacgcttccttctctggctgggtcgcttgaacggcaattcccagtggtcgtccccatcaataaatctctttttgagttcctgccgagtagcagccaagagaatcttcctcaagtataccctcacgatgatagcttcattgcgttcgattctagcgacccacacgaatcctcggcggttttagatcaacgcgcaatcatcgcccgagcagcatcttttgcatcaacaatcaattccaattcaggcacaaagacattccaatatgccccttgcacgagtgatatgttccttcaggaagttatgggcacttttatgtccggaggctgtctttgcatccctagaagtgattcactaagccagctgtcaaggtcgatcaacgagacaagcgcgaacctcatttgtctcacacccctggtagcctctttcattcgcccgtcagatgttccaagcatccaagtgctggttctgtttggtgagcagtcggcgagaaacgttagaaatatttggtcagaaaaagttcagctttacaccttctatggacgaaccgagtgctcctccacttgtatccaagtttcaggactagacgatttggacacacaatcatccattggcacaagtgtgggatgctgctcgtgggtagttgacccgcaggatttcacccgcttggttcccgtaggatgcattggtgaactggtaatagaaggtcccagcgtatcacgcgggtatttttgccacgagaaacaaaagaaagagaggttcactgaacaagaccgtgggcttatggagccagcaaagcgaccttacaccctctttccagggtcgcgccgaaagatgttcagaacagggtacttggttcgatacaatgcggacgggactctagtctacttgggggaaaaggttgattcaatggatcagacgctacagatgattgcttttaagatcgaacagcttttagatgttcagggatcggcgggctatcgatgtgtcgcggaaattcttgacttgagaattgaggaatacccagagccttgcatcgctgttttcattctttcgacagaaaagcaacaatccaatactataaaacagtcgacagtgattgcacggaagaccaacaactcacatatgcttatggcaaagttgcatgcttccctggcagcttccttgccggcaagccaagttcccagcctgtacttccctgtctttggcttaccaatgacctcgttgggaaaggtaaatcgcccgctactgagaaaagctgtcaagagtctctcagcggactctttaactgagtacgatttgaagaagtttggggagttctggcgccatcaattagaaaaaccctcactttcggggcaacatcttttacagccttttcctatccaagaatcacccgctctgaagatggttgacaaaggtatgaggataccttggggaggtagtttgcggaggcctgaagcaagagctgtgttactttgtgcctgggctttagcaatctacagttatacacaacgtgacgatattattctaggcgagctgttagtgaacgccaaagagagcagcaactcagcagagcaatttttaccacaggcaacaatgattcctcgccgagttcaagtcaacaactcaaccagtatctctgggctattggaccaaactgcctcttgtttggtaaaagccaggccctatgaaaagacaccactctcgtcaatcaggagcctcaatgcagacacttctcaggcctcagactttgactctgcgctttcaatctcatctatgacttcacaacagcagagccaatacttgagaagcctagaaaacgcggagcgcctacactccaggttctctgcatgcccaattgtggtattctgtgcgctggaggagacaggagtgagcctggaaatacgttatgatgatagggctgtgtatcgctctcaggccgaccggctgctagccctttttggcgaatgcttgaacattttcaagtcgacaactggcctggaagagaaagttgctgacctttcgaagaggggtggaaacctgcaaatcttcaacgatactatcgactattggaaggtacaattgactgatattgagtcatgcctgttcccagacttgagccctaagaaaggggaaagcaggttaggcacagaaacactaagactatcaaatgcatcaaaaatgcaaagtgcatgcaaggctctatccattaatccaaacattctgcttcagactgtctgggcgttggttcttcgatgctacacaggcctggaagatgtttgcttcggataccatgtctccaccaagaaagactcagttaacatattgccttgtcgattcaacctgaacgatgacttgaggctgcaggatgtcatgcagaagagaaaggaggatatggaatctgcgtcaaagtaccagatgccactgttcgagattcttcgcgctatcgggtctgagaactccccgatatttaacactgccttcagatatagaaaatcctcatcgaatgcggccgttttcaacaacgctgttcttgacccagttaatgaggggctgaatgagtacctcatttctgtcaatgccagcgtctctggttcttcagcagaaatcagtttcgactaccagtcaacgagcctctcagaaacggatattggtcatataatcgactgttttgaatgcatccttaactccattctcactctgcttggaccaagccgggtgatcagagatgttgagttctttggccgacaatcttgccagaaagtgagcgcctggaacgcatctcttcctgaacgaccaaagcggtgcgctcacacgatcatccaagatcgagtaattgcgcaaccttcagcaccggccatatgttcatgggatgagaactttacatattcagagcttgactctctgacaactaagcttgcataccatctcatggattggggtgttggaccagaagtattcgttgggttatgctttgagaagtcagcttgggctgtcatcgcacaagttgctgtcctaaaggctggtggagcctttgcatccttagaccctgctcaccccgaaagccgcctacgaggccttgttgatgacattgcggccccaatcgttctgtgctcgactagatatctggacaaatcgtcgaggatttgcatggctgcactagctgtgagccactatacccttgagcaaattccagattcgccagccacgagaagtctgcccactttaagtgttgagaatgcag

SEQ ID NO: 4854 - DNA, 11852 bp, Emericella nidulans
gcagagcactaacttttgtatttgctcctccaattccttgatcttgtcctggttctgcaaagtcttcggattgtcctttttgacaaccaccgtgggagccgtgtcctcccgcgagaaccaatttgataactccgaattgctggaaaaatctttcactagctcttcctggattacccgtgctgcatgaagttagtccagtaatcacgcctttgactgatgcgacactgcctacctgctaatcgtgcgctctcgtctccagagcgcgagcccgacggcttttccagcagcgcgcgtgtaccgcaccagatcagaagctgcctcattcgccttggctctaccaggccgtcggccgcaatatgcttgtagaattccgccgtgtccactttgtcgtgaggtaacgctgcactaatcagttgccgctcgccgaacctgggaggttatcctcaccgtttgatgccccagaatcaatcaacgaactggcccgtcgccccctcatactgagactactgcgccggctccccttgccggatttcttcccccgcatctctttattcctctgtataaccggtgtgtccgctacgggcagcgcaattgtagccgttcccgcctgcggttgttccggagacacaaacccattgcgctgctcctcctgggatttgctgggccggcccttcttccgcttcttctctacagaaacctgctgaacctgctcctcctcgcctcgttttcgtgttgagcgctcacttcgttcggattgagggttcgggtgcgggtgcggtttaggttctggctccggctctagagcatttttcgtttttccacgagtttgtcgcttgcccgttccttctgaagccttcttctgtcttgctacatcgtccgacctgtcttccgcccgcttcttcggcggtcggccccttctcggcgatggctgtggcgttggttcctctggagcaggaagatcgggctgctcggtacttgttgacgctttctgctttttactcgtaatgcgcgaaaactggaacccttctatatcctcatcataaactcctataacaccatcagcgcccgttcagattaaacagcccagtgagcactggaaaaaactcaccagccttgcgcttcttctccccgttaactccctcatcattcctctcctgcttatccaaactcgccctcgttcgtcttcctccgcctttaccggtcccgccaggcgcggcggtcgacgcatgacgcgtccgcgcctgggacgttgccatatcaattaccctcaaaggttcgcgacgcttcgtcttagtcgttggtgttgctaggacagtgacgggtcatgccagggccgatttaaggcaggcaccgtttatcgaagagattttgctccagaaaactccacccggaaacttctcaagaaagacggaaactaccgtgtgttgcgtcacgaagaatcttccgttcgtgttatgatgcgctgacagttcggcagaagcggagcgtgagcgtatactagaccgactgactgattcaccaagcggtccaagactaacggcaatcctatccagtcaggcctactcagatcgtttatcccaacgtagcgcagttgatgtagccagtgttacgggttaacggggggcgggagcgtgataaattccggtcgcgcgatcgggtcaccgcagtcgtagagcggcaattgaagggacgagttgagaacggaaatattaattgagggtctaccggtagacctcgaatagtagcttcttgcgctgttgcgcaccgatgcgagcgtttaggttgctttttgggggggtttggtcgttcaagtcgccggcacgcggttgttttggtttaacgcgtggggacagcgctagtctttttttggttcttccaccacgggcggcaccactacttatctctcaacctacgctctagggttatattctaatactattatcgacttcagaccagctaatacctcgacttgaaaatgattgtaatatatagtatgtgcacttatatacggaatactgcgtctatagattcataccgtcacatgctatcccctctatgtatgcatgatgcttaccaaacgagagcacatcatcagccctcatacttatagcctataattgtatgtccaggttcttcagtataatgcatctgtgtaatgaataaatgcaataacagtcgcaacaaatctatcattgacatctactgtagcgctgaggcatgtgctggtggagccaagctgccctcaatcctgcgcttggcggcttgcatctcttcgaggctgacatcctcgggcttcttgggcagatcaggctcgaactgtggtatatcagggctgtggcccacagacatacctacccggacctgagacgcacaaggggttgatgttagcaaccacgtgtcgagcagcaagggattaggtcttaccaaagtttccagagctcctcgcgagttgtccacgagatcactgtcaaagttgacctttccttcttcaaagggtagtaggagagtacttccgccaaacttgaaatatcctagctcctcagcccgtgagactttttcaccggcctgtcgcgtgatgaccgtacttccaaccatcatcgcaccaacgcaaatcaccataactcggccgtgtctcaccgaatcaatgggcaccaggactcgaacgttttcgccatacacatcgagcgcggagcggattgccatcgggtttaccgtgtagtattcgccttcgatggtcttcggggttcccatcacgccgtcgacagggatatggaagcgatgataatcctgaggagcgagccggaaaactcctaatgctccattctgatatcgtgagacatcttcaggataggcatttccaagaagtctcttgatggagaattcccgccctttgacccagacactggttgcttcagtgacgcggtcaaacaccaccgtacggcagtccgcaggcgaaacaacaatcccgggttcatgcggggcagaacagggtctggctcctggtttcagtgcacggtagaagaactcattgaagttcttgaactgatctaggggcagtagaacctccgacatgtctagctgatgaaagttgatgaagtctcgaatttgacttgcagaggctggatcgtcatatttctttccctgcttgatactaagggatttcagaattttgcggactttagaagtggttagccctgtggcagcaatgtcggggtctgaattgccttacttcgtttcttctccatttcgcgacttttgagacctttatataagagccgaatgcccaatcgaacatagacactcatccgttcctcattgatctgccctgtgatacgatcttgtacgagaatgttggcagagtttgcacctaacttgtagccaccgtaagaaatcttggtgataaccttgctataccatttgcgttgggcttggctcgaggtcacaaagcctcccatgacaaggttgtccacctgtcgccaatcctggcttgcacatgttgcgatgtgcgtgatgatatcagcatcagaccgcttggaaaggcgcggttgatgacaaagaggacactctcggagctcaataacgtgctcttcgccgcgctcgtcacccaagtcgtctgggtggagatcttcgtcgactgaagtctgctctgtggtcatcgtcgggatcgatgtgacctgagaatcaacattagtcggctgggacgagctggtctcaacatttaactcctcgccgtcactttcttgactggctgttgaagtagctgggctaagttttttgcccattgtccgcgggtctttctgcagcgactggagtgtatcctcgaggcacatcacaacttgatcgaatgtcaaacaggaaggatcgcctgagctattctcctcactgaagcgttcgaagaagctatcgatagtcgactcctttagtgttgacccaagggtatcgagcatcgtggtcagctcaactttgtcaatgctaccgctgtcatcagcgtcgtattgcctcagcattagcctccaaaattgttgtcgaagggcacggtaaggcatgtatttcgccttgactattatttgcgggaagtgtttatcctcccatctttctttattctttaatgttagcggaatctcgtagactcgaagaccatccgactcagatgtgacgggactggtagcagtagaaccgtcggtgttgctactgctcgcgctttgttcaggaagtactagcgaagggacagattgaggctcctgttgttgcgccgataaagacgtagtagagctcctcgatctcacaagatgcttacttggcctcgacaagcttgaggatgaagggaccgggctgaccttggctggaggtcgcatatcttcttcggaaaactggtagagcccggtctctggatcgatatcaggaccagcctggataagggtttgcaggggaaagcccgccgaagccacgaagtcgttccctgagaatttgtccctgtccattacggtaaaactcattgtgtataactgctcatgcttcatgacctggaagaccatcttctcgttgtatactgggttcaagttgtggcggatgaccggggttctgagcgttttacgaccaagtgacgttaccacgaacggatccatgtcaaaggaagtccgcgtcactatcctggtcagctacttcggtcaacaatataaagggaaacataccgtttcgctctgggggaaggtcggtgaccttgacaatctccatgaacacgatgccatgcacgccatttccaacgccagagaactgatacgccctggcagccaaggacttgcgtttcaaacgcttcaagcgtagtctcctcctgcgcttctctactgtctctggttttgttggatcatcggtttcgtcggatgtttcttcgtccctgtcaccagactcctctaggatggttgaagacgatactggaggaaaatactcgtcttcgtctccagtggagactaaggtcttaaacctcgtgtaaatttccgttggtgatgctgtcgggttcgaagggtcagataacgagaattgtagaagaatctcgcccgatacgttgttatccttcctcttgcccggttttcgattcgacttgagggtgtaccatttcggctgttcatggcatgagcacatatacaggtattgcggtaaccgttattacgtacctgttgttgaatttccccatccgtaaatatatcttccaacgcaatatcgaattcgcccaagtaatccttgccgaatctgtcgtggtcccagcaaatgcactcgagcaacgggacgccgacaaccggcatttcaaaggtcacattccattctgggttcaatgtcttgaatatggtaggcgtggattgtctggcttcccctagtgtgacgatcaaatactgtgagactcgtcagtaccgagttggcactattgtgcgtcgagattcctgggccttcgtcggtaggcccattcgagttcttcgaaggtatgcttacaggatcgcttgttcctcctcggtctttggctgcaaggtttctcccctgtacgtttaccagtacgagtcagcgaagttgacgacggtcagacacccgagccaagggcagcaccgctcacttacccgcaggaccgacactttgagtaccaatggcttgacatcaggtgttctcatgggactggtgcttctactttggccgggcgtcgaagcattgctccgcgtgctgagatgagagctaagacgttgtggcaatggtagccgaaccatgatgatgttcggacgggagagtgcgggggaagcggccgcggaagagaccgtggacgcgtcgactggacacttgggagtagatcctggggtaaggggtgcgggaagaagatttatagtaaattgagggatcttgacaggtggaatggcttgtgcgtgaaagccggggtcctccagcaacgggctagaaatgtcgcgaagcgtcaagcgactgcctaggctgtcgttaggctcgttgaaggtcttggacgggtcgatctgagatctgccggctcgacccagtattatccgaaatgaagtcaccgctcagtagaagagaacgtcgctctacgaaaattggactgcttaagggaataatttacaatcaacgacaattaggacttgctgaaaagacgtcggggaaaggagccggatggaattggacgggtagaggggtggtggggagtatactacaccaggtcgccaggctgccaggttttggtggccactgacagctgctgattacagtgtaacggcagccctacaagttgacttgacagtcaacatctacgagcgatttatcccatagagcggagagcggactacggttgagaagacaaatcttacatttcctcccattttcccaacatcccgtctgttttgcttatgctaaaaacagtgctttggcatgccgcaattctgccgtggttctccgcttacttcttccggaacgcccgtgcgcctgggtagctgctaccggtgaagccgcggcgacaggcagtcccaagtattatccccagatcattgaggagaattaagcgagaactaagcagtatgacaattacgtgataatcttcggtttctatctgcatttgtagtattatgatcgtggttgtggttcttggcctctgcagccggagcttctgattagtaagaaatgctgcctcaggagtggatgagttttttccgttccaaattcgagctgcgcccccactgccgccacgggcacgcaccacagtcatgttccttccgccttttcttccctttttaacctccgtctcccccctgcttacgacatcagatcttgccatctttcgtaagaacacagtcagcaggcagaactgcatccaagctgacctccgaatcccatcctcggaccgcctgcttacctcatcctccctgcattgcgatacttccatccgcgtcctcgcgaggtctcgccatatatcccgagtcccatttctagttggctgtccgactttgaattgaccggtgctttttgccgtcggacgtgttatctttgtcgtcaccaactcgtcgtttctccatgcagcctgcactagctccagcgccgcatccaagcatgcaaacatctgcttaggtaagcaaatctatacgcttgtcgcggtttgtatcagatctacaatctgccctcatctgcgtatctcgcccttgtgacatcggcgtcccttgtcaaaaaggccgccgttgctgtttgcaaagtcgccacgcgcgagataacagatgacctcacccgtgcatcgtatggcgtcgttccgaccgcgtcaagttggaggccctggagtaacaaggtataacaagacacaaagctgactgatatttgtcgcaggaccatgctgatcaaggtaagccacgagctccgtcgcgagagtcgcatcgcgtggctctgcggatcgcccggctttgacgcgtagtgataacgcactgcgacgattgtctcaaccagccttgtttaattaatgcctgctaacgtcttttctgttagtgcttcacgattcgctgttagcagcgcagcatttgtcgcagcatccccaacaaccgcgtccacagcagccaaatgcgcaacctcaccacctgcaaccaaccgccacaacaagcccccgcgatcaaaacaatatagaccctgcgatctccggaggcgcaatgcttcccccatcacaaccaccagcgcagccagaacccactgtcgaggacgagacgccgaaaacctatgggaagcgaccgctatctacctcgaagcgtgccgcccaaaaccgcgccgctcaagtacgtgaatgagaacaggctgtatctagaaccctactaacttgcgcagagggctttccgccagcgtaaagagagctacatccgcaagcttgaggagcaagtaaaggagtacgaagtaatgtcgcaggaatataaagctctgcaggctgaaaactaccaactgcgggaatatgtcatcaacctacaatcccggctgctggactcacagggtgaggttcctgagctaccggggaacatcgatctcaaccagccgcgaaccgagatttctgtaccgcagccggctcctagacctggccaggctggtgcctcggctcctccgcagggttcaccccaatcgcaggtatccattgctaacgacgatatgaactctttaaaccgcatagcggaagctggccttgggatgcgcaaacacccaaatgaagaagctttcttgagtaacaatttccaggcccgtcgtggccgaggggatgaaaccgccgacccttcggaaacgaagacggagcctccgactcatgggttaccaatggtatcatgagtgcttgtcaagcttgattccaccttgttcgcatttccttatgccgcataaattatgttcgtctttgtgccgcttctacttaccagcgtctattgtctgtgtctattgttcgtttcttaatctcccaggtgtatggcgcagagtgagggatctatcatggccttggggttggtgttctgcgtttgtctgatcggactggggaacttcgcatccactcaaatacagtattgtatacctagttctgggattgtctttcaaccaagacttaatcgcaacgcattacttggtctctgcaattggagatgcgtagaacaagcagacttcagctgtgccaaggcttttgtttgggcttttgtttgccagccacgagctctgcagataagtagcagcagtcgagcgtgttcatcttacaaagtccaggcttaccccaccaccttcaactccacctgatcatcaacaacttcttcccctaagagtctcaatggattattagtggttactattctctcgctgaaaggtcacacaatacgatggcgtccatccaaaatgagcgttccgttgaacaccgggcgcggagctaccaattggagatgtttgaagcgagcttgaagggcaatatcatcgttgtcgtaagtaaaccgacaacgccacagaaactctcttaacgactctagatgggcacggggagcgggaagacgcaaatgtatgccgcttgcccaggcctgcgtagcctgactgacgtgagccagcgctctcctgcgtatcatacacgagctggagaactcggatgggaaggtgcgatgcactgaggctcctggaacgtcctatacaccgacggctctaacttaggtagctgatatggttcctggcaccgactgtcccgctctgtttgcagcagcacagggtcatttcgcagcacattccggctgtgaagtctcgcactctccttggatcagacaaggttgagctgtggacagagcaggctgtctgggatgctgtgttagagggccttcaagtgatcgtgtctacccctgccgttcttcatgatgccatgacccacgggtttgtgcgtatatcccggctaggacttcttatttttgacgaaggtactttgttccatgtcagagggagattcgctaatatggacagcacatcattgtatccgtaaacaccccacgaatatgattatgagaaatttttatcacccggccctccaggaatatggtccgggtgctgttcctaggatcttaggtctgacggccagcgctggctctagtcgcgagggactgcagtatgtaatgtagcgctgcttgattatgcgctgaccagtataggacaatcgagatgaacctcaattcagtttgcacgacgccccaagcgcaccgtcaggaactgctggaatatacgcatatgcccgagttgcggcgggttctgtatacgcctttgatgaaagaaaatgcttcgctttggggtgagacacaaaaagtattaatagaggtttatgaaactaagaatgacatctccagaaggatctactttgcagaagttgcttgaaagggacaacacttactgcagcggccagatgaagacgtttgtttgcaaagccgtccatatatttcaagagctggggatatgggccgcagagtactttatcagggcgtcggttgaggagcttctgagtcatgcctatgttcactcaaaaatcgacctagactatgacgagcgggagtacctcgtgaatatcctgtctaagtcaccggttcctgatatagacgtccactccactgaccccaaggattttcccgtctcccccaaattcgaggctttgatatcgttcttgatgagcaccgaagacataaacttctccggtctgatcttcgtggaacagcgagcggctgttaccgtcatgtcttacctgctctctacccacccctccacgagagatcgattccgcaccggcagcttcattgggatgtctaattccacaaataggaaaactatgctaggagaccttctctcggcaaaaatgcagcccgacacgttggatgacttccggtacggacggaagaacctgatagtcgcaactgatgtgttaaaagaggggattgatgtgagcgcctgcagtgtggtaatttgctacaacataccgaaaggctttgagtcgttcatccagcggcgtgggcgtgcccggcgtcaaaactcgacatattctatgatgttgtctacagaggatgacggctccacactggacaaatggcagaagttcgagaagatcatggaggaagcttgcctagaggacaggaggcgtacggaagagctgcgtgcacttggaagtcttgacgaagacgtgtgcacacgtttctgcgttcgatcgacagggtatgattatgaccttactctggccgcagattgttgactttgcagtgccattttgacggccgaatatgctatgcagcatctagtccacttttgcgatactcttccccgacagaactatgtcgaagacaaacccgagttctccttcgagaggaatgacggcgggcttttgagggccaaagtcatcctgccaagcagcgtgaatcccaaggtcagacgtgcggaagggaaagcttggtggaagacagaacgtgcagcaaagaaagaagcggccttttatgcatataaagctctgtacgagcacgggctcgtaaacgacaacctccttccgttgacaaaaagccgagagttcacccgaaaggatataagtttattaccagccgtgcagaaggtatcggaacagtatgatccatgggtggactgggcgcatttatggtcgtcaaccaatctgtatcagaaccggattcttgttcgccaaaatgaggaggacacttccatgaagtttataactccgacagcaacaccgccaatcgcaccgatgaaattgtgttgggacagtgagacgacatacaccctggaattcgaggcggcaggagctgtttccttgacagctgaaaacattgaacgcatgagagccgccacttcactctacctacaggctacgacaagcacaccgctagccggaaacaaggactatatcgctctgtttggccctgacttgccctgggacgaactggaaacgtggctgaaaaagaatcagggacacgagcccgccatccaggtattctccagtcagaggcccttggaccgtatgggtgtcgtccgtgaccggtctcgctatggcgagttactcattttcaagcgatggcttaacaggagtggagaccttgaactggaatgcgatccgtatcctagtaaacgaagaaacctcctccaacgacaaacactagccaaaaagcgtcctgctgaagatgagatactgggatcacctaccaagaagcggatactctctgctagccattgcacgatagacagactccctgcaagtgaaacagtttttggtcggttcattccagtcaaaaagatagactagaagccgcgttggtcgcgacgagattatcgaaacagtgctctagatatcagtttca

SEQ ID NO: 4855 - DNA, 604 bp, Emericella nidulans
gtatgttaacacatacgatttaggtgacactatagaatactaggatctatcgtcaacgagataaatagtcaaccgtcagatcgcacccggcccttagtaggttacgttcgtgtaggtgaaacaatttccttctgttccctttgagcgtacatacgtatccaaagcacccccggaaattaaagatatgccgtgatgggttctcataccttcctgcggtcaagaaggcaggtagagacaagtaggagtgtagggagtaccgataccgggggaagttttgagctgccaataagcgtactggtagcggagatactgttaacgatactaccaccgggtccagaacgctctgcagtaaaatccaacccagcccgaggtccggatccatgccacttttcttctaagaattgtgtgcatcttgtttccttactcaggatggagtactataggaaacaaaccatctgttaaagcgtgagtctcgtactatcaacctcttaaccgaacttcctggtgaccataatatgttaagctgctctacccattatagagctccgatatgataaaactggagttcttggtcttgctattcccagcttgacgaatcaggatc

SEQ ID NO: 4856 - DNA, 2786 bp, Emericella nidulans
  unsure (1)..(2786): unsure at all n locations
tcaaggatcacggctgccaaaaaagtagtctaagaaggacacccaggctcttctttaaatacgaccaaatatttgataatgtgtttggtttggttggttttattattcaacgtcactcggcggttcactgggcccacgtgatctgcggcctcccagggggcatctgaacgtgctgtctaaacagaacttccctaaaactagctagatacaagtttgaagcagcaactatggaaaatatatgttggaaatgagcggaagaagcatccggcgctaccctggccaggtcttctgggggcagatgcccgttttgactacctatagacggggggaggggccgtaccctttatccaggtagatgtgtggactgttgcgctgtcaagcggctccggcgggcccagtttgggcatataaccttaaggggatgattcttgcacgatgcggctgaattcttcagccccagcagctgtacttaagagccagtctattgtttttgacgggccatcccttatgcatctcttctatccttccagcttttcgtggtatatggacagaagaagtgtactggggtctttgtcttgccacaggaacagctctccaggtagtctgtatggtcaaaatcttgagggggtaagaatcttgggaggctcctcttgtgaggggattagtcatgtgaagaactccacgaaagcaaaagccagacaagaggcggtacaacatgtgaatcagttcatggagaggtatgccttctaagacagtcagcttccgcagcagagatccaccaccctgcggtactgacggaccaaaaaaaatctcatgatcagcctcctcgataagccaactcatctaccttatttacacttgggcgtacaagaagcatgatgtctcagaaaaggccggccagtcaatcttcagatgaaacctacttttataaccccttggatgaagaagtggatagtgagcggnagaagataacccaagacccagtcaagcaagttgcatttgaaagaaggtgtattgaagatgagctcactaatgagaaacgggtgattatattgcaggaaaatcctagcaccagaagccactgttgcttctgggactgcattcctactaatcatatcacccgatatgacatattcggtccgtaggctctccgctgttgtctcatgctagctgcggcacagcagcttgactggctgtcattcgtcatgtcgttctgacattctgttcatgctcatgaagaggataatgaatcttgagagtagagattttaggaaattgcagtcattgctttcaggcaggttgtcacggccctacgcaccgtgatcatgagccagcatagattacagagctcatcctgggcacagtgcccggaatgagcgtcgcgcgattggccagcttcatcgcatacaccagtgtacgcgatgaactgacttctgccatctctgactgcctactaaatcaagttacgctttgtttcgcaaagacatcccacaatcaatctcttcatgtacataattctttctccatgcttaggattccgaatataagcaccagaatggttgggatgttctgattggcttgccgtctcacaggtgaagaaaatgtcttgcgcatctaggtgatagaaactattcgatctaccagcatggtaacgagatgaaatcatccccaccataaccacaagccctggcaacgaattcaaactcatgatcgtttcttgcagtttgtagctgtgaccattccttcttcagtataagttggcactgtccatcacctgctttctcatcctcttccttagcagcgtcgaacatatatcgaagcactgcccgacagcccatctgcgtcccagcgcgtcgcaggtagttcttggtatctggtggccactcgcttcgattgttacagcattgaatccaaagccatcatctgtcgactcatagcctcctaagtccgcttctggccgtgaaagaattgtcagcatggcttacacctcattgagattgtacagcccctttgtgctactgaaagggaaggagagcgcactgttctgcttcaaggattctcggcacccttccattttctccatagagtctttcattcttgtggtcaaccttgctttctggccttgtctgagtagacctctctgaggttggagaagaatggctggtgagaggccaggggagagataagagcgcgttgtacaatacatactcagagcaatcatcttaccgcagcagcaaccccactccattcaggcccctggaacgcagggccaactatttcgagtttccgctgcagcgagcgcgactgcggcgctaatcagtgagccagcttccgcaactgatgctctttttttgttgctgacgactcagtttcacgacaacagggatccaggatttgccgagaatggtcgagacttcagtcgattacgctgcgactaaacacctaaaatatcctcgagaacggtgtctgcaagcggggattcatcccaaacttctacggccacattaattgaatcgaccctaccacgttctacccagcttttcaacacttttgcgcaagataattatcaccctaaagcaatgctactctaacggagtagatacggcagacaggctacgagtcaagctatcagacaagtacatagacaagacgtggctcagaggccagaaattggatcgaggtccagatacaagaaatctcgaccaataaggcggtcagagatgacagaatcagcagctcgttctgtgcgctgtgaggctcaggcaggcctcgtgacagacagtatg

SEQ ID NO: 4857 - DNA, 4774 bp, Emericella nidulans
ggtttgaaagacttggcgctgacatggaaagtgttgatacatgtactggtctcctttcggaatataagccgcgatatgtgatgggcgtgggaaggggttgcgcaatgttgtcaaaggggatactgacgatggtacagggctatcaggaggacttgattgtgggagtggcccttggagcggacatgttcgactgtgtatggccgacaagaactgccgtaagtatctttctccagcactgaaaacgatgctaaccccaaaagcgctttggaactgcactggtttccacgggaaatctcaaccttagacacgcttcatttgcgcatgatttcaggcctgtagaagaggggtgcgactgcatgacatgtaagccaagggaagaaggaggttccggcattacgagagcctatctccaccacctggctgctaaagagacagccggggcgcatctgtaagtagcctctgatcgtttcgaggcatcaactaacttggcaagccttacaattcacaacgtacactatctcctaaaattgatgggaagagcgcgacaggcaattttggatgatcagtttccagctttcgttcgaagtttctttatgaagctatatggagacaagttcaaggttcctctatgggtggtgaacgccttgcgaggggtaggagtcgacttgctagaagattaaaaacaaccacgtgaacatagcaagggtccatacccatcgcagtaacaataataagtagggcgtagtcaaggctgtactcgagattgcgacctatatgtctcgatcgagtgataatcacgtgataacgtgacgcgcttgggacgcgttagatttccaatttccagagtttctggacaacgaccggtgtaattcttcatttcttcatctacaactccaatcactaggatagagtcaagcacgacagggtacaaaatgactgtctcactggacactcccagagaaaatgccaccaccgccaccgccggtcctcaacccccagcccacaacccctctcacgaagaacaccaatacctcaacctgatccgccaaatccttgcggaaggcgagcaccgccctgaccggacgggcacgggaacacgctcaatcttcgccccaaaccctatgcgcttctcgctctcgaagcccagccccacgaacccatctacaaagatcccaatcctccccctcctcaccacaaaacgcgtcttcttgcgcgccgtccttgccgaacttctctggttcatatccggctcaacatcaagcattccgctctccgaagcgggcatcaaaatctgggatgggaacggatcgcgtgagttcctcgacaaagtcgggctctcgcaccgcgaagttggcgacctcggccccgtatacggattccagtggcgccatttcggggctgagtatgtcgatgcccatacggattatacagggcagggagttgaccagttagcggacattgtgaggaagattaaggagacgccgtttgatcgccggatcatcatgtcggcgtggaatccagcggacctgaagaagatggcgcttccgccttgccatatgtttgcgcagtactatgtttcttatcctgagggcattgaggatgggaagggcaaaggcaagggagagttgagctgtttgttgtaccagaggagttgtgatatggggctgggcgtcccattcaacattgcttcatatgcgttgctgacgcacatcattgctcatgcgacggatttgaacccggggaagttgatccatactatgggtgatgcgcacgtatacctggaccatgtggaagccttggaagagcagttgactagggaacctacggattttccagagttgaagattaagagggaggaccgggggagcggagttattgacggctggaaagaagaggaattcgaggtcattggctatgcgcctcacaaggcgatcaagatgaaaatgagtgtttaggcatatacttactataccatgtatatagaggaagcatatgatacacgaccagtcaaacaggatttagagatacataattctcttccttttcccttttttttgccgctcatctttttcttcccttcctctttttatttttgaattcagcagctaatgtacagttgggtaccaaaacagcataacctttgtgcaaagcagagaaagaagcggagcaacatctatagcatttggaaagcaatcaaaaaacgtcgatcgaaggaatgcggagcaaatgaaccacttgtaaatggtcttaaacccaagcagaggacctcggagcttgttatggtggaatcacatccacagggaccctgaactgtatagtgtccttggccgtcttgacgatccttgatatcggtaccaggaaactagtggcaatacgcataggtactgcatagtgcttcagcgatccgtgtctgcacgactgcactgggtatcatggtgacaaaccaaaggtcaccgggtctaacagtatcagaagcgttacacttaacgatgatgagctcaccatccttgccttgcatggaaacgattttgtccccacacgggagttctcgactcaggcaggcggttacgaagcttgagggaatattgctttaatgtttcgtggacgagcatatgctgtgttgatctctgacggctactatagccattgcctcctggcttttgaggatcaacgagatatcatccttgacatatgatgcgttgaactttgacctcaatgcttcatcaagttgcatgagttactcaattatacctacgatagtgaaaactactccaaaagcccgggcgtgatctctgtcttgtgatttctatagaccctggccaagagcgtcgtcatttcgcccatgactagactgcatcaactctcattagcaggtatacgaagaaaatggctcaagtaaacaggggtacgatggctcactgagtcccattacacgttctcccttcacacgagtacacccaaaatcacagatgcatatccgctaattcctcttttcctgttttcaaacaccgcaaaaccctaactgtaagacattacggtatgtctgaattatctaactacaacgaagccgtgaccagtgggaattgaccaactgaaaacttgagttgataccgaaaggatagcttggagatctctagatgcatgatgccagtaaggcctttatatagccaccaatactcctggtcggatgctccaagcaatgccgccggattctggccttgctccagtatgaaaaaactgcaagtatcggcctcgtctggcgctaaaccagagatggatagccataaggctgcatgccgtttgtagttattaacaaatcttatgttacctgtaggccagcagactaaggacacgtgtgataagaagaaactgacagatgcaccctggaggagaggtgaataaagaattgatgcgaatagcatcgacagtcttacatgcatagaactgaaaagtcacggggcaaatggcaatgtgcagccgtggattaaagctaaataagcaccggcagattatctggaggcttaacaggaaagaataaagctccccacaggcgaaacttgccgcatgaataaggataaagccggttcctgcaatgcaccttcagggaattctgacggagagcagatagcccacacgatggacgcagtgtgatattacggccttaagtcatcaagtagcatatgaacgtgtatatgaagaggtatatatgactctatcaatgtatatacaatggaaccagaaatatctaaacaagctacgtcatgcctcatcacacagcaggacaggccagcaaagagaagtatggggataacataacttacatattatcctcagaccaccgactcctcgcctttaaataagcctcatgctcgttcttctccttctcctttccttccgcatccaagccgctctttccaagcaagccccgctcaacccactccttacttcccatctccgacaacctcgacagcgcgcgcgcgaacgcaaagcgctcctcgtcaccgctgaagagcgaggacgttttgagcgctttcatcgacaggcctaggtcgtccatcatcatgcgcatggcatcggagaggtccgtgtgttcgccgttgtcatcgagggaggttttgacttcggattcagagatgaaaaggtttgtcaggggggtggcggttgtgaggacgagctttgcctggtcatatgtcagtacaagggtgtatataagcgagatgatgggttgaagatgtgtgcatacccgactctcataaaccgcatcaatgaacgtaataaacctcctcgccagatcccgctgatgcaaggtcatccccggcacgtcggttacgataaacgcctcgtaattcctcacaagctccaagtaatctgccgcgcctgttgcagctccaataagctgctggaagctgaatttagcggccttcccactagcaagaggaacctgaatcttgcggccccagacttcctgcgttgtggggtgaggagggtcattgatgggatcgccgagatagtcaaaccacttctgagcgtgttggtcggcttcggggcctagcgggtggtgataaacaccagatgggggacggggaattttccggtagtcggtgggagaattgagatttattactgtcaggacggtcttgagaagggtaatgcaggggatgaacgattggcgctggatgccgtttaggtagaggtcatcagggtggcggtttgaggttgtgacgaggacgacgccgtgagacatgagggattcgaggagtctgaaagagtgagt

SEQ ID NO: 4858 - DNA, 4658 bp, Emericella nidulans
tcacagctaatacaggggttgctgagcagctcaatggggggaagatgatataggcaaagtgtggcccttgaccggtcttgccattcgcatggctactattcagcatctccatcgtggcccactagcactaccactgggaacgatcgacatagtgcaagtagagttgcgccgccgtttatgggcgcagatatgtcacctggactttcgggctgcagagggtcatggcttcgctccttcaatccatgagtcagatttcgatacgcgttgcctctcaatgtggacgattttgatctaatggaaggagtagcaccctctagcagactctcagatgcccctaaattcaccgaaatgaccatctatttacttcgaatcacagcctctcaatgttacgggcgcattatccagaccacacatgcgtcgcgaaagagaatccgtgtctgttcccaggggcctctggagaagcccgagttttgtctgaacttcaaaccctgttaaaaactgccgaggccatggcagctgagctggaaaaggcactggatgatcttgtccagtactgtgacaagagcgtcagcttgcaatcgatggccttgcatcttagtgctcatctgaaatccaaattttgagtcatattttagatccagattcctcgacaggaccgcgagaaggtcatcagcccgacaacacgaaggaggtaaacccccaaagtgtgaataatgtctttacatccgctaacgtacaaagtatcttcatggatgcggccataaccgtagagaactggtgtaccatcgcctcgagcaaggactgtgaaccatctcaatggcatatttcgtcgcatgctggcattcaccccatcctttacgtcctttctgaggtcagtagccccgattttcagaccccagagtgggccgatcttcgaaaaaggggtctgcaggtagcaaccgcgatttacgaaatccgcggccagcatacgtccggggcatggccagccattatctgttgcttgatcgagttcgattccagaacctctgtcctgcggacggcactcaaacagctggtctcagcccagggccgcaagataatccgatggtgacgagatcaggaccggataacatggcttcgggggagttggaattagatactggggatttcctgggatttatgaacctcggggactttggtttccctgatcttgcggatgttgacccgatgttgttctctaacccttcgcagtggagctgatgtcctagtatattaacttcacagtagatctgtccatcaagacatcctcaatccatatcttacaaatatgaccttagtcctgagagtatttacagaaacaaaagatatagaagatgttagagtgattatcagccaatttagccccttaataatctaaacactacgcagcttttgaccctctgtatggctcccgcaagtgtctgggagtccatctcggggggaatatggtgcgtaggattctggctgcatttttggacagtataatgtgcagttgaagggacaggcaaaggacggcgatcggttcaagacgtataaaacgagttttttttgcgatgcatttggccaatattgagctggtctcgagggaatagggatgctgcgttgtagtgtttgttctgatgaacaacatcgatgataataatatgtttgtgatcgcatctctcttactatctgtcctttcttccagacttagtacgaagcctaggcaggtgcagagtccaccgtcatttagaatacggtattttcatgcccaaccaggttcagaggcaatatccatatcccagtgttggtgccttgagtgtaccaatacagatgaccgacagcagaccagacatagactgcacaattcagtacatgaagtatccagccagccagagacagccagccagagagcaaaccagccattcctatagagcataacaccttatgacaaatgagagaggacgtgattatggctcgcgtcgcgggtggctgtgcgctgtggcgcccgcggatactcccgaagtccgagtacttattagactcgcatgaaggctaaaagccaatgaggagacagtgggtcttggtcgggggatccactgctatgtcaactacgctgtgcactatattggctcggccgacgtgggtcttcctcgactaagctatattgtaagcgtacttcgtagtagtatccagataaggatagagaaaaaacagggagaatgtatgatcatggtatatagcgcagaccaaaacaacatggcatatatcaggcatcaccatagctccataaaccgaattccctaagtttaagtacgtgataaacttgcccgacagtcacagaagcgaaacacctcaatcagcaccggatggagaacatggactctcacagaagcgctgaaaaaacggatatcgagaacgatctcagaatggggcaagagaaaatcgtgtcttgtcccagcaattgaggaccgcagcaatatgctgcggcacgcaagtggttcttgatggccatagtggcagggggaggcctagtcgtgcctctgagcagtggtgtcttgttccgtaggtcttctctaggtgctgctgctgacggactcgctgtcaatctgaatgatagcctgccttattatgatcgcccaggatcttcatacaaccgtctctgtggtgaacctgtctattgcctttggctccctcgccgtcgccatcacgcctctccggtggtcacacctggcagaactccacggtcgtcggctagtttacctgctctccttctgatttcttggccttttcagcatcctggctgcaatcagccccaacattggcatgttcgtcgcaatgcgccttctcagcggtgctgctagcgcatccatacaggccgtcagtgctggaccatctctgatatgtttgaggcgcacgaaggaggcaaagccatgggcgccttcatgctcggaccaaagcttggccccatgttcgctcccatcactggcgctgccctggtcacccggtggagctggcgcagcacgcaatggttcatggtaatatatggttggactgtattcttgatcatggtgttcttcatgccggagacggcaacgaaccttgaagagaaccagcagaacgagcgggcgaagtcgacgagtcctgcgatgaaagtcgtgaatttcttgctgaaacccacccagacgctaccttgctgcagtatccacccattctcatcacggtctattacaccagcattgtctgcgaacgtattacctcatctgcgtctccatcgaagacaccttcgccttgccgccgtactcgtggagctccatcatcgtcggtgttccgtactccatcatcgtcggtgttccgtatattcccggcggcctgggactgctgtttggtgcaatcgttggcggccgctggcaggactatatcatgaaacggacggcacggaagagggacgttttgactacgatggcaatctcatactacactcgattgaccgcctccgcgagaactgcttgcttgcggttatctcttcccgagagcattgttgtggtgggggtggacggccggacaagcatgtcttctggctggtgcctgtaagtacgacctgcatgtatggttggcataacaatatgtagttgattggcaacttcttctacggcttcgcgggaatgattctcaccaatgtgactatgacgatgctgacggaattcacacccaagaggtcaaccatgggtgttgcagtgaacaatttgctgcgtaacagttgtcctatgtgagtgcgctgatcgcgcagcccttgttcgatgccatcggtactggctggtcctttacggcagcctgtctcttctgtctactcagtgcgatacctttgattctgttacggatcaagcgggatgaatggagtgcgaggatgaaggtggctcttggggatatgcaatagtggcattacgtagttttggcacttttgattttcctcaactaatgatatgtcatggctcagctctagtcttcttgtacagttgtaggctgcattagaatattctgattaacctgatcaatggaatcatcagtaaggctgcttagaagtatttgcttactatttatgcaatatatgtcatgggctgcgcccatgacatgcgccgccttctgtatgcgactgtgatcacctgactagcgactggcgtccagtttgatgtcgggcatactgccgtctggtatcgctcaaaaaagaaacagcttgaagtctaatttaactgtcggcacgctgaggaataaattctaggcgcctcaaatagtcgggtctatgtaatcttgcgtctttcccaataatcaccagccctcgcttgatgaactcggccggtcccgttatgagttcttaaggtagaacggagtataccgatctcgagatatcacgtgtggtaggtactccacagcggcctgtcaccagttctttattctccagatttccacccagtaccactcttgctgtttacttttctctccgctgagtttagagaccctggacagcctacagcacgacgatgtctattcccaaaaccaaccaggagtgggaggctttgatctcctccatctcggaaacactaccagaatccctaaaccaagagcaagctccaacgccagccaaagtcatccgcacaatcgac

SEQ ID NO: 4859 - DNA, 4100 bp, Emericella nidulans
cccaaatccacacgtctgaagcgccacattgtcgagatgataaatgtcaagattcagtgataagaattccctccgaaggcgcagagacgcagaacacagtgcacagtgcgaatatgcagcgttgaagcagaagattgcgcgtccttcaaagacgccgttgagtatcctacttaagtggcgtaattgctagcccaaggtaggcagagacaagccaggagatgagggctaggaggcggattttcacgcggttgtggacgacagaatcgtggtgataggcctgtcggctgcggcgagggagtatttgagttagaatgagtggtttaaggaatggagaggcgggcttcttcagtggtcactgtgaggtgatgatagaatgggcttggtacggatgcatagagggattggcatatgcctggccttggggattatggacacaatccatgaatcttgtacggactggactgccttgtctggggatacgcaagaatttgtatacagtgagagacgatcagaatttgagatcactcttagaagggctttgtagcccagatttctgaccgaaatcggctgcttacaattcagtattggaattagttagggagtcagaatggtattttcttcttcttggactaacctaaaagtagggtttgaagcactgcggcccactcacgttgcaccagtcgttattttgcagtaacttggacttctgatgcatcacagccgggagtggactgatggtcgactcgttcggcaagttggtgtcctccgttctttgaaactaacaggatattcgaatcctctgtgtccaatccacgtttcgagtcagccactttcatatttctcaatgactgcgctgaaaagttaatggtttatcagcgccgcgccttcttcctatccggttccggttcttcatcatcactgatatcccgataaattggcttcggctgcgtttccttccacgcctttgtaaagatcgggtccttctcggctttttcagcgtatttcagcaacgcttcacgagggtcctcatcacgcatagaactaagcgggatattctccctgatgtgtctctcgtccggttgcgacttcgcaaacggtgtttgtgcgggtaagtgaggccgacggggatctcttgaacggcccgaagccgtcaagccgatggtagggtgccgtgcggaccacgtagcggagctgtagtgcggcacgccgttcgatccgaccaccaccgagtctccggagataccttgcgaaaggttcatagttaaggttgggtcatcatcaatgtggcggcgtttaggcgccttggacatgaccaaggcagcgcccttggttgacatattcgggttatatagcacgtgagtttctgcgtttgcggacccagtgaggatctggttaagtttctcgtgccattggactgtgatcaagggagatcctggcgtgactggcgtgaccaattcaggcttcagtgtcgctgggttcagaatgtgtaaatgtccagtctctgaaccagtaacaacgtttgccgaggtaggtgagaagacgatgtttgaggtcggatatcgtgaagagatggacgggtgcgagacagtcgtgatcggttgtttgaacttcctcgtatcccatagcttaattgtgtcgtccccacccttggtaataacaagcctaccatctgcactgacatcaatcccactggtccatgtatcccgcgcatgagcatcccttatctcagcgctaggccgtgtatacggcccgttcccgctccacatcatcagactgccatcgagagcagcagcaacgaggacgtctgcgccaccttgtttcggagagccccaagcaagtgcagtcatcttgctccgaccagcggatccggcaaccctagacttgtgcacaataacctccttctgcgatctgccaatatttgcgtcccatatacgaaccgtactatccgttcccgcggtcgcgcacaggttctcatcagttggagaccatacgccgctcgtcacttctgaaatatgcccctttgtgttgtgcatatctctcaagtacatatcacccttcacgaactctgtgactgtttcaccgtcgcgatcaagtatccgcggttgcggtgtggcagagacaactaaaacgtatgctggagagatggggttgaacgccgcgtaatgtaccgcatgtgcatcctgtgctgccgatgtctttttcgccgaggggtcgacggacttgaaggcgcgtatcgttgaaggtgtcatcgaggcaaaatcatgaagctttattgtacagtcggtggagccggtaatcaatcgcgatcccgacaggtcaacggtgatggtggtcactgcgcgctcatgtgttttcatcacaagctcgtgggagactggaaactcgtcttcgtcgtcatcgtcgtccgagtcatcatccgaatcatctgaatcctctttgaccttgtcgctaggccccgcgggcccgatatcatcgccctcgctgtcagatttcgcgtcgtaatcgccagtggcgtcactaagctttgtcttctcattgcttgtgtctggcttaacggcgcgtctggtttgattaatctgagcattgacatcaggtctcttctcctgtttcccgaagctcgtcgggaagaacttttttaaagtttcctcgtcgaaaccctccataattgttcagcagtagctgtgctgtttcttgaggttaatcgtcgcaaatgacttggagctttatcgggaagctgggctctgcctgtatgcactgtttgactctctcggcgagtcatatcttatctccctgattgtgcatgactgaggagacagagctaactttgggatagattatatttacagctcgtattgtgtcaccttgtagtgtaatttgatgacatcgaatattataagtcaggtaaaatgcttctataccaagcctcaatcaaacggcgtccgaaaatggtcaccatacaatgtctacaaaactagggctagatttcataatcatacttaaattggaggagcatttatgaacagcggaggctactggctactggtctcagcgtgtattccgctatgctagaacccgaatcgcagtatgccggttcctattttcaaccagggccgtgttggcgagctgcacagacgcttttaactgtcactggcgcagccattataaaatggtttactaggatgaagatacacaatgcgatggtaaatcaagttgtgagcctagaatacacaggttctatggtacggccggtgggatagcgcaacgccgatagccatgtgcatctacaaatacaagccttccacaggaccgccgtcctgcttcgtcttcatgatacgctcgcgagcggcacggaaatcgtccatctgcaccctcatgcggcgctctctcagggccatcaaaccagcttctgtgcaaatggcgcggatatcagcaccagagaggtcatccttttggttaatgaactcgtcaaggtcgacatcgtctccgagggacatcttcgaggtatggagagtgaagatcttcttcttggtgttttctgttttacgtcagcatcaccactatattggatctgaaggtaatacttacgatctggattctcaaacagaatctttcggtcaatacggccaggacgaatcaaagcagggtcgagggtctcgatcttgtttgtagccatgatcaccttgacgtctccgcggtcgtcgaatccatctaactggttgagaagctcaagcattcgttcggtggatctctcttttcccgccagaagttgaatcattaactttcgtaccgattgcatcaatttcattaatgaagaccattgacggctcatgttcggccgcttcctgtaagacctgtcgtaccaaaggggaccatcttcaagtacttttgaatcaacctatttcaaaatttccaataattgccacatggccttggtggaacagcctggaagcatggctttcccagtccagacctccaatggtaaacccccttgcggttaaaccccatttctaaatcccttttgattaacacgaaattccccatcttaacctttgaattcctttaaaacccccttttgctttccttttggctttctattaaac

SEQ ID NO: 4860 - DNA, 5827 bp, Emericella nidulans
tagacacacagggtcattgtttctgccgtgacggttagagctgaagagatctgcagctgactgtagcatgtaaaggtggcatatagctggcttttcatctcagtactctatcatagtggtgcttgaggttaatgggattggaagccttgaactgagaagagagaactgaggtacaatctccatcactaccagctgcaggaattgatttccggtagggtgacgtgtcttttaaaccgtttcagtgttgatcgtgtcttgtaagaggtcggctatagatgcacatcgctgttttggggccagaaacacgccgcacggtcattcattattacggtacaaaggtattttatagttgatacagatccggcctctatcaaaggacactctcaatggaagaaaagatcaataaaactaaaatttaaaattatacaaaaagcaagtcagttgcccaatttgtctagttactttggcttagatctgtcggttctactgaggaatgcctactaggatttgcccagacagcagaccaagtactgctggctctatagggtccttgcggtgtggcgatctcttagggaaatagctgtgcacataatatagcactgcctcttaatatatggattgacgttttctctatacgcttctggtgaggtcatgcttttaagaacttggagcaaagttagcagacgagcacagcgcaagggcttgatagcaccaggacttagactttgatattcacttacattcccttctagcttgtttattctcggccgtattgtgccaaagcctcaacagccacgtagcgaccgatgcatccctcatctcttgcgatatctccctcgtaacagacaacttatacttgccgtcttctttcctttcaataaccatctgctcgcctttgaagtcgtttcatttgtacccgagccccggttgcaaccagccttgaggctccaattcgggcaaatatcaaacaggacaagctgctgtatctcctcgttgaacaacggcgtatccgaggctgttttacccgcgctcaacagcgctctgaaggagggccgctgaagccgggtctcgaaggtctctagccgaatgttacctacggttagttcgggcaccggcgacgtaatgtactactgagcaggaatatcggtgcggtattgtgcatttgcaggatggacgaggtagaatagacgccgatgtcgttggcgctttgatgttgtgccctcaagctcaggcgcggatgcatctccctccagtctggcgaatgaacggttgactccttgtttggggtggacttaatgtcaacgtgtatacgatagagtagagtggaaggcgtgtttcagcgaggatagattggcctgataggaagagaacggcgggcttagtcagctcggcatcttgtgcgcctggtttcttgcaaatatcggagtctgaatacatgtccatcgtcttgggatttgtatgacatgagcaagtttagccaatgatgtatgaaacaatggctatagttaagaggatagtgtgcgttagcgagccctcatcacgtgtcatgcggctcatctgccccaactgtcaacaggaccaggtatgaggcattttcctctcttactggtacgagatgaacatttcctcgaaggcatgagttgatgagactcgcctactcgaacaatcccagccttgagtctctgaccctctagcagagtggagttgctggtgggccgccaagcgcggctgtgagtgtcaaaaaagtgtggtatcagcactgacttgtgggcttccctgctaagactccaaaatgcaaatctcttgacttcctgggcgattgtggttcgattgtggttggatgcctgaaatactctaggagtataatcgagttattgctccagatttcatgtatgtttagcgtatcatgcgaagtactcaattggccggcagtctaggtgaatatatcaaaagcagataatgtgacatcatataccgaacaggcccaacctacttaccccagcgaggttgaatcgtcgatctcttccctagatgcgtgccggcacgccttacccgtgaaggcggttactactgattcgctactccgcgcgtccacatccgggcgttacccgcacacgcccaagcgaccagcgaccagggagttggagagtcccaagatcgtgaaaacaagactctggaagcaagcaagcgacggccgtctccaaggctgagtctggccacacttgcatcaatcgcctagaaacaagccgcatagaatacgtaagtggaggccggtaacgataccaacatcgattccagaatcgtcgctcgttgtacgtcttcaattggctctaaggagaggctgccactttcccgggtccctatacacaggatcccacacacaccatggccaggagcgaatgatacacctccagaggaaagtaagcaccccagatccatcgaacggacgtgatgacgcgggctggaagtgatgcggtgatagctgcagcagccggctctgagaaagacctccaatatacgtcagacctgctttgttaactgcccaaatgcatgatgaagacttgtgaagcattcggtgccaccacggccgtatatccgctgggtaagcaggtccagcgccgttcattgctattattctgttgccgatgctgtggccataaacgccgcacaggtaggcttcgctgcagctggtttcggtggtgcattgccgccgcgcgtatacccagagccagggctgtcctcaaggatgtgatgtccaaattgaggccctcgctggagtcccaatacaattatgatatgcgtgtcgatagcttgctcgacccgtccgtcgatgatacagttattggtcctgccgagaacaatggccagcagatgacagccataccggtaaactttgaatcaggccaactaccgttcttggttgttaagcatggcggcctgtctctacttgcatggaatttttggacgtcttcacttgcgatgcttccgacagtcctgcgccaacccgtgtggctttgcatgccatttgtacaacagcctgaccccggacgagaatggggagttgcatttcatcttcaaccagctgatggatctctagagccccggggatcttttgccgatgttgcttttctccgaaaggtaaaattggaagcttcggcttgtttaacgtgctttgcttgacgggatgacgctttgggtatagtccggtcaatctgaggcagttcatgttgaatcaaacccataacctgctcgcgtagctaaagtacttcgtcggagaagttaggggcctcatccaatggatatcagttcggttgtaccccagagctgatgttggcaggtggtcccttgctccttgcttacacattacatttgtgcaaccaaaattgcacatggggcgcagaaggatctatccggccttctgagcgcgctctagtgtatttctgttttgggtctgaggcagggcctcccaaacttgtttgctgctgcagagtaatttgaacagtagtattggttggttgcttacagggtgcccagccttgcagcgctaggcgtgtgacggtggcgtggtctgatcggtggttggcaaagtcaggccctttgttccaagcgggcaatgaaggatgattcagaataatgggcagttcctgttaaaatgtgcagagacatggatgaatgaactaatgaatgaatgagatagacagtacttgaaagttgacggtcaagtctggctcaacccgtagagcatatcaatcgttatctgaactcacttaggagttgacatgaaggtagatcaggttcgcaggccaagtctctctgagccagttgagtcctggaggcgtcggtagggaccttatggggttttgttgcgctccctctcctgtaacaatgctccagtcaccgatgctggacctgttcattccgacttcgagacactaagtccacgggttgtaggctggtttcaacatagaccgtactcctacaagtacccctgaatgacgagtcgatcgaggactcataaccggactggcagccagacagttttcactcaactcggatgcaagtcaatctcagactcgctttgaggccgtttcagcgcagcgcaagccttcaccaggtcataatgaccagcaatgcttactacaaggaccggggtaaaagcatggcgaaaatactagacacagggtaatgcacgaggggttctgcggcaaaagatgccagtgttgactggggccgtggattgagttggatatattaaggacaaacaagaagataggatccagttacagaaacaacattaacgccacccctgatcaagtagtaatatgcgaatgcaatgccgcaaatctcattctcggctcccaaaatttacgacgaccgatctgccccgttgagcatgcgcgaactgccgcaatgtcggactgcacaatgcacgcgaaacatgggatgtggtgcgacgtgggtataagtttcattctctcttctccattattccttcactgacgggccggtttgtttatgttcatttcatcgagcccggacacagttcgaatcgacttccggtatccgttcaacagcaatgaggttcaggattaaatttaagcgccaccgacaaggacattgttcacaggaatgtggactacacgggtcagtcgcgtttactcaactatgaaagatttttgaccagaaaacttgaacagaacagggaagcatactcagcttaacaatgtagccaataaaccccataatcaggaatccggtgccaacggcctggctgattttgatgaactcgcgcttgtcggctgtttgtggtcagcattcatcttttgagcaaagagaaacacgatccagggagttgaaacagataaaatgagagagaaaaggctatgcatacgcttctgactgcggttcacaaactgcattccatcgcgaaggaactcctgagggatgttgagcaattcctgtacttgttcggacatgatggcgaattatgactaaattaacactgtagacaggacgtggagagatctaaagacaaggattgatcgaaagggaggagtggcaggttgaaagtcgagatagcgtgggtggtgatactactaatgccagctgtgcttttggtgttgggagctggaaacggcccggattaactagggaccggatacaccacgtatcgaggttttgggtatgtggctggtacaaatgcactagccacgatctggcccggccggtaaaacgtgatgcggggattactcggacctccccgcataagcctcttctacctcctgaagcgcatgtacagaactctctggcactctcgctttgtctatgtcctatgtctgcatactatgcagaatgaaggcagttcaatctcaatgatcaaactagttatactagggctaaaccaaaggcaaattacgattatggccttttatataataatttctcttgaggtgctatcttgaattacacctgctctatcacaaggtatctcatcttaacttgtcaagcgacagtttcacgatgcgccagagtcaccgacttggcagcctcctcatccagcacgctattcttccgcgcggcggtctcaataaacccggggttctcagccttgaggcgggcaaatgtcttctctgcatcccacacccaaggcgtatcagcagcgaatagcaggtccatatcctctagcgtccgctggttactctctgggtataatgcccagaccattggaatcgcgatcacgttgctggcagcgaatacgtagagggtcttctccccgatggcttcaaacatcacagggcagaggagggtctgtagagctatagtttag

SEQ ID NO: 4861 - DNA, 1696 bp, Emericella nidulans
agtaaaggtagatgaagaggaataattggaaaaagggaaaaaaataaaagggaaatgggaaaaaagccacgcaataaagattcgaaaaaagaaacttgaaaggaaaattttttggatttacaaaaatatagggaagggggaggacgggatataaaaaccccttgaaattgagggttgccgtaggaggcaatttttttaaattaaaaaagggggtgggggggaattcccccaaaccagtggtttttccaaatgttgccttccccaaaagaaagttaagggcgggcaagccattgccccatttaaaggggaagctcccatcctgggccctggtggaggcataaacggtccccattgcaaggaagatacgcgctcctttagggccttctttcccagccttgccgacccgggaccggtggtgccctgctgtatcctttgggaagaaatcccctccccggaaggggagacatatgtgtggcggatgttggcgaggtcttgcggggtgctaccgtccttagggtgtaacatgatacccacgccgagtttgttggcggaaccttcaagaccgatggcaatcattctgggtagtattttctgctgacaattagggggaaaaactcattaagatagtattatacgatgcggaatgaagctataggtagtgtaagaactgtatggaggggcagcgtcggagatccttttttttttatcagcaacgttatcgattggctcgtctgctttggatccggtcctggttgttccaggttaggttccgccgctgcgggtatccgacggtatacaagaccctactaaactaagtaagctacagcgacaactcaacagcccactactctctcctcccctcccctccctactgctctgctttttacccacttcggcagattcctcctctcctggctccaaccttctttttataattatacaattgcgggttgtcctttttcacccctgaatccatcctccgaggtgctaacttcgttttgtgcccgcccacaatcccgcaaggttgtcaaaagtcatgtcctcttcggctcacttccccgaccgtgacaatttccaatgccggtcagacgagtttactacctggctatcatctaggcctggcgtcaaagtcaactccaagattcgtattgcggatctaagagccaatgctgctgggcgaggtgtcggtatgttttaactccacccggacgagtttttctcgtctagcaatctgtcctcgaccttattaagttgtatcctttacgaagaagtgattccattctgatacgcttgcctcgcgggttccagtggctcaagccgatatcgacgaagacgaagaacttttcgccatccccgagactcgtcctctcaacccacaattcgaaactaaaggatttgctctcgcaggaccttgatcaactcggcccatggctctctctgatgctggtcatgattttcgagtatctgcaaggcggcaaatctacttgggcgccgtatttcaaggttttgcctcagaattttgacacacttatgttttggtcgccggaagagctggaagagcttcagggaagcgctgttgttgagaagattgggaagcagggagctgaagagtctattctcaagctaatcattcctgttgttcgagcgaatcctgctttatttcctccgatcctagtattctatagtgtcacctaaa

SEQ ID NO: 4862 - DNA, 3690 bp, Emericella nidulans
agttggtactcatgactggttcctgaatggtaaggtttgttaaaaaaagaatggcacaaaaccagacagtacacctacaagagccagagctcaattctcataggctaaccaatatacgtcttctaagcaagaacaacaaccagagtcacaagcaggattgcaagcccacacagcctaggcggaatcagggacaacccgatatccccaggagactcttcagcgtctggaacatttgttgtttcctcgcccgaccccgatcccaaccccgactcagactcaggaagtgtagttgtttcggtaaggtcttgatccacaccggcgggttcatcgtcatcattagtgttattagcaaatggtgtattgtgagtagtctctgggagatcctcccgccaacacctccaatcccagtaggtctcgtgtcctggtgggccgtggttaggaaccgcctcccagagcttaacgagtgtctcgttgcaggggcgtatttcataggcaaagctgactatacccagatcaaccatattcggcagttcaatgctacatagaggatacatgagttagcgacgtttatcctggtccgggatgcttataggtgggctgaatggcgttgacgaacctctttattttaccccacaaccgaaactgagcggctgtctcaattgtcgagtatatctctaccgggttgcccgtgttaaactcgaatatttcgttggtttcggcgagggccggaaaacttatcctgtagagaaacgcttagttcaggatacagtaatagtatatcttctctgccttcttaatttgaagaaggggacctaaacttcaacgaggattgaaaacttattcacgtaccgggtaatattattaaggatcgtcgttgtcccaccaacgagggtatgtagctttgggaattcaagctcgatacgattttggacggaaacaacgagactttcggagtattcggtggctgggtcacccagggcctcgagctccggcgctgaaaagctttattgtgaaatcatggattaaacaagctcgtactccttaaggctcttgtgctagggctgtgcaaaacgaaccttgccgcatatcccccgacatccagtgtcttcgctgtcttgagagccggaagattaatttccaatgagacctcatcagccgcgaaaatggaatcgctcttgggatgcgaaaactccagcgtcccttggactgtctctaggctggagagatcaacgctaagggaaggtcagcctgttaactctgatcgactgagagaatagcttatgcggccctacctcctccaaccgccaaatatccacagattattgacttcacgcaagctttggagatcaacctccccggaaatccatgggtcgagaagtatattgtccgcacgttcaagcttgggcagattgatttctgtagcttgatgtaggatgatactgtccgcatttacgagatcgggaaccgtgaatacaccgagggtaccggaatttgcggactccgcaatggaaatattaccgacgaaatcagtttctcttttcaagaattaagtcgtctttgtagctggcggcaatctcgatgctgccggtgatcgttgtgcagccgtcgtgaaagatgtccaggtcttcggctgtagatacgatgatgggttcctccacacttttgcagtcttgagcaattgcaactggaatacgagtattggcactgtatgagcaggaaaattattgccatcaaaggttgcatgacagggctgccataccaagagaaagtggcaaaatggccagcgctttcgctagagacactgtggtatatctgatggtggcggccaaagttcctttacaagcccgacatatgccttcaggaagacgagatccttgggggaaaggaaacacccgagaatttaaaaccccatttaacatgacggggttttgcccagcagaaagtatgatggaacgtttctggaacccttgaaatcatcgaacacatcaacaaacactaaaaaatttcattcctctgggcatttcgccctactatcaggaacttgaacatctgttcctttattggctaaattggatagtgccaagacagcaagtcatgtccctgcgcagtccggttggtggattcacactaggtcaacagggcatgccgcaaggacacatatctgcatgtgccaaatccaatatagccaatggacttaagatccaagtctgggcatccaaccagcgtgatggcagaccataggattgacaaccaacagtcatgcggtctagtgggatatttcatgtctgttccatcattatagaagctgtttttttgctgcagccactcacagggctgggaaatacgtgcaaggccgaggctaggctcctacgaatagccgcacggggcggcggcttttcacacattggcagctgatagcagcaccagattgctttacagaagtcctaggtatcttcgcccattcaagaatactataaagccctatcttttagaaatgtttctatcaggtatttgctataaaacgccaggttgattaacatgaacttataccacatctttcctgtgggattctgatcagccctcggttcttgccatctgttaatagatcgaaagaaatagagttatgtgaagctcccgccgccgaatgtcgaattcacgtgacgttagggttaatcactgtaggtctcttctttccactatgggagaagaccatcaccaggacccgtgagtttgtctggctcagatgaccttgcgagaatgaagtggagtaagatggaatagagacttgaacgacattcacgacgaagcgtcactcttggtcaaggcggcagatctgttcgggcatctgttctgccagaaggatgggtcgaaaaagagagccgttcaaacagcttgcgctaacctgttcgaagacatcgcaagtagagtccttggagaattaccgcggggaccatactttaggggaccatactttatcggatcacccaaggggccgcgttttgatccagatcatcaatgagcaaagaccggtttcgctgctggaaagatacgcgactgagcgacgagacgtgtttctccagtgtaccaatcagattgcaacccagaattgcaagcggcttctctctacgaagccggcggacgtgcgagagagagagcggttctttgagcagatcaactctggcgatatatctttcttatggaacgggcgaatgaagaactatgcatttcaaccaccagagtcttgcataacagccaatagaggctattcaagaaaggaaatatgcttgctagactggtgtttcatatgcatatcgactgttcgcaggaactctggttaccgggagtagaactccagtctcctacgccgagctctctccccttttgcgaacatcggcagccgtgggtggcaaggtctgcaaaccaatggctgagggcgtatattcaactacaggggctttaacaacgacctcaccattctcaacaaccctatctgcgggactatctcgccgagccgctccggctgcggaccatcccacatctttacgactccagtctagcatgcttgattgtcctccacgcagtggggtctatgatcaaggcccactgggcagtcaaaaaatgccatgccttcagaatgttcagacacatctcgagttttcatccttgctgttgagagcttacaaaaccggc

SEQ ID NO: 4863 - DNA, 5113 bp, Emericella nidulans
atattcgtggaagctcggggcttgatctgacacagtggtgaagacaaggccggtgggcgtgacatgatatcgaagagtcttctcctatattcagtcagcgacaacatgatcaaagcaccatatcagcctccggaaagacatgcagtatctgcacaagtaattcgaatctcttcagaagctggcatctgccctttcccagtttttcggaccgcctgaattggctgctgagcaatttcgtagctcacaacttcgccgacattctggaaccttgtcaaagggccaaggagataccacgactaaaaccatcagccatgttcccatgaatagagctctagacaaccttcaggaagaccgcccgcctttcaagctgataaagcggctggctgcagtaccaggaagctggaagcgtgcgcgcgagttcaggcatggtgcttttgcttgatgatctgctgagctccgtaaccacgctcagttcctcgataattcaccgtgatttatagaccatcatctggcgttctggtgccgatccatcagcggcatctgcagatggcttatgagtcttctgtaattggcgggcgtagtgtttcctgatgagggcatgagatcccgcggcctaacaactatggtctggctggggtaagaccatgacattgctccttcaccgtttttttcttgattcacatctgtgtctgagcggcatggctgggcttgacgcggctgggcagctcagccctatgggagtatgtatagcttccattatccatgatcatcaactatgatttcaggacgataccgcaatgcacagacgaacaaccgctcatctcagtaagcacagatatgaatatggaatcgaatgtcggttctagtccagggtcaatatagcgatgttttgctgctgcctggatccggaatcctggctgtggcgaagacaaccatggtcaagtccggtttctggcttcctttagggactttctttcatctcccgacttctcctcataaacctcacccgctgtttttctttgatagagggtatcccttcgtcgctcgtggcctttctttatcgcgaagatcacatggttggtgttcgcgttagaccccgccattgatctaatctatcggagtgacgtgaccctctctggatccccaatccgaccataaacggccgtaccatttgcgaaagacgagattatagtcccgacttcgggagctcagggaagaagctcaaggttgcctcaggtatagatcttgagatgacgagctccaacgttcagttcacgcctcctccctcgccgccttcgccgacagcgtccttcttcgacgtcagcgacgaggaggaggacgaatacaacaccattgcccattcgacccccaagaagggcgtcaggctgcttttttcaaaaagcaaggtgcgcttgctcgcaattatttgtatgcagaccgcttctgaccagtcttcgctaggtttacgtccatcccactccgtcggcgaaagacaacatccccggcttcatcgcgctcgtccagcaaaagcccctaccctccactcaaaagactacatcctctaattcaaacgcttcaaggccagatctatcttccttccttctcgcctgggtccctgaatcagccctcggcgatgcctacgacacctacgtcaaggtcgatctctcagaagacgactccccgccgcgccagagatacctagtaccgccgctaccggaaacaactacttttaaagatccgatcggcctctacgcatttgcggttccactgtcacagatatattctcttctggtacggccgccgagcttgggctggtggttcggtagtcttgtgatcaacacccgggcaggtgacagctttccggcactattcttccacgacagcgaatgccagtcgactatactacaaaaaaagaagcgggctagagagacgtttgatccctttgacgaggatggaagtgtattctggggtggagacgaggttttgcgatggctaaggaaatacgttgacgtgcagcggtcgaccgttgatcatacagtctacctaatcaacccgtctgaagaagaccagctttcttttggaaaaccacagctcaccgaggcggcgggatcgcaggacaaaccatcccctaggaaaaacgaatctgcaccgcacgatgcagggatggacccattcatgaaggcgatcaaggaaacaaggtggagggtgcttgaacagctcagcaagataacgacttttacgcgacgcaccgcaaacgagatagccgagaatccgcgcattcccccgcaagtccgtcgcctcttaaagaccccggaaatccaaactctacaagaagagttcgatagcgctaggatatatcttgcacgatgggcgatgagcatctcagaacaaagcgagcgggaacgcaatcgacggatatggactgccagggacaccctcgaaatggagaacagcgctgtgggagattttgaaatcttggaggctgagatggggaatatggccctccaggaacgccgcaaggtggtcaccctcaaggagtggcagggcttcttcgatcaacagactggccgactgcaagtcacagttgatgaagtaaaagagagaatcttccatggcggcttagatcccaacgatggagtgcgcaaggaagcatggcttttcctccttgaggtctatccatgggacagtgacagcgaagaccgccaagctcttatgaactccagacgcgacgaatacattcgcttaaagggcgcatggtgggaacggatggttgagggcgactccaccccaaagcagcaggagtggtggaaagagcagcgaaatcggataggtacgataactcctccatacaatgacggcacagttactaataatgtgcagagaaagacgtccaccgcactgaccgcacaatccctctcttcgcaggcgaagacatcccccatcccgacccagactccccattcgcagacgtcggcacaaatgtgcacctcgagcaaatgaaagatatgctcctaacatataacgaatacaaccccgacctcggctacgtccaaggcatgagcgatctcctcgcacccatatacgcagtgatgcaagatgacgccgttgcattctgggcctttgccaacttcatgaataggatggtacaaactctccaatcccccaactctcactcatcttttatattaatgcagtatgctacaggagcgcaacttcctccgcgatcagtccggcatgcgcgctcagcttctcacgctggaccacctagtccagcttatggacccgcagctctatttgcatctccaatccgccgacagcacaaactttttcttcttctttcgcatgctgctcgtctggtataagcgggaattcgaatgggtggatgtcctccgtctctgggagacattgtggacggattacttaaccagtaatttccacctctttattgcgctggccatcctagagaaacaccgcgacgtcattatggatcatttgaagcagttcgatgaggttttgaaatacagtatgttccctctccatctcacgtacctcactcacgtaggtgacggcctatgttcggcctgcgctaatcgactggggatagtcaacgaactctccaacaccatggacctcattccaatcctcacccgcgcagaaactctctttcatcgctttggtcggcagattgaagccattgacaagaagaataatttccctacgccgccggggcagcctcaagctcagcgacctacgcctgctcagcctcagtcatcaaagggaaaatcacctgagcgacaattagcagccagcacgggtgtcagctcaagtacacaagcggggcctggtagtaaaccggaagcagcgaaaattataccccaagagttgagggatttgttcaggaaagatgttttttggaatgggaatagccagcactcgaattcgaaaccctaaaactatatggtaagaaaggcactttagctatctgcaccgtcgctgcaggacaggacatactacggcaggatagcttgatgaggcagactgggctacaatatgttatgatatggtctttttattttcagacccttttctatgttggtttacgctttctggcagtatgcattgttgttggataggcagcggctgctatgactttgttccagcaaaccactcaatacctacaattattcagtgggtgctcatttacgcgattataccttagcacctgtgtaaatgcccagttgctcctggagtcgcagaaggattgcaaggatgaaatgcaaacatagtttggctagagttatatatacctatcctaatgcaagcatgcatctagtctaaccatttcatcccaaacgaagacagataatacgaacagaaaaacaaacaaactatctagcctttaccagagggtatcttaatgcaaacaaaacggaccgccgataaacagagccctaggagtgtatcgccaatgcagaatcaaatgcgcagaaatcgaaacccatgtccatgggtatggccaaaatgcaaacccgctaatagccaataataaggataaaacgctcaagtaatgcaacgaggattcgaagacaagaaccacgcttttagacaccagccagaccaagactcagtgaattagaaggaaagggagaaagaaaaaaaaaaaaaaggcctatcgcaggccacgcagtacgactcgtttgctggagccagctttgccgatatcgctgatactcctagacttgggtagcattggtgtgcgtccgtcgactttgttctctggagacggcagggtatatttgaacggcctgagcgaagtgctccggcgggcctggccaagaacgtcctctacccaagcctcactctctgggcttatggtagcatgcttggcacgtggcttcggtccagcgagaccaagggggatagcgggggcgctcggagatccatgtcgaagctcgctgatggacgacatagcgctcgcggatacattagacgagacggacaatcgtctgtcggttaaagcggagaacgaaacgttcagaccgtcacctccactggctgtacggacatcgccaaagtcagagacgttggatgaacgcctggttttccggacggc

SEQ ID NO: 4864 - DNA, 1619 bp, Emericella nidulans
tcgtcgcgtcaaatcccgcagtccgagctttccttttcgtcggggaggcgcggaagagtgcgttcccatttcgtcaataacggcaggctatcccgcagcgacgagccctgggctcctggtggaattgttgcgttctcccatgaccttggaactgtcagtggcgaacaatccgtgaacttcgctgttggctatgtgagggaatcggctgtaaactatctaggaaagccttacacaggatactatagggctcattaccccaacacctacaaggcgttgtcgcatttcttcgatgattacccagctgcggttgttgaatcgaagattgtcgattctgaaatggatgctcaagcggccgttgcagggggaagtaaatacgctgatattgtctcactttcggcccgccaggcctggggaggaattgaccttaccatccccaacgactcactcaacgaaactgaagttctggccttcgttaaagagctctctagcaatggcaacctgaacacggtcgacgtcatcatgcctgcatttcccatttattacattatggatccggactatatccgtcatctgctagagccgatgatgcggtacctcgcggctggtcgttggcggctgccatatactatccacgatatggcacgacactatcccaatgccattggacacgatgaccaaaaagcagagccgatgcccattgaagagtgcggcaatctgatggtcctcgttttggcctatacgagggcaacaggagatagagcctgggctaatcagtacatcgacatcctgacgaagtatgcagattacctggttgagaacagcatcgacattgagttgcagctatcctctaacgacgctgccggaccgcttgccaatgagacgaacctggccatcaaggcagcagttgggctcaaggcattcggcgagataagcggactgagcgagtatgcgcgtgttggtgaagagcgtgccaacctcttcttcaaccaaggactagggacagacggaacaaggtctcatttcgtgttgcaatatcccgataagcctacctcatggaagaccccgtacaacctatacccagacgtgctgttcaacctcaaaacatttcccagagaagcataccagatgggaaatacgtttttcagagaggtccggtcagagtatggggttccgctggacaaccgacaggactgggccaagtctgactggaacatgtggttagcgggcacctttgacgatgaaaccactcgtcgggagttcattgacgatctgtgggcgttcgtatctaatggtaaacacaactggccattctccgatcgctatgttgccacatcagccaagggtcgagaacctggccttcctgttctgtgccgcgcgcgaccgaccgttggtggccactttgccttgatggccttacagggaccaaagtttctccaaattgctgtcaacagcaagctcgaagagacattgcgagcgacttctgacgggttccccgaggaagtgagagaggatctttagaagtgcagactctgtcagttcagcaaagtttgtagatttccgtctcgtatatatgtgctccaatgttattgtagattgtatttatgattaattattttgtt

SEQ ID NO: 4865 - DNA, 2243 bp, Emericella nidulans
ctctgctggcgttcacttgttccgagagacgatgatgctttttaaagcacctagccacttggtaagggtctcttcgtcggaagtagagagtcggtatatcttttcttctgcaatgatttggaggcagaagttcttggaccgcgacatcggatcaacttccgtgacgtcaaaaatttgcgccattggtattattttaacggcagagtattcctgctcgtctttatagaatgcgaggctctttgctcgtagtacaacccataggcgtttccaatgtcgcacaccccctttgatcttgagacactggagatatccgctgcaaataactcgttcagggtcgcgcaggctccccatctcatggattctaccggaatcgcgcgcaaatgtagattgctgtactgctggcgcggacgaagagaattcattgatggaatgtttagactttgagtgctcatggccgtcaggtccatcagaccattcagaataggaggtaatatcatttgccgaatggtcctgcggagcaacaaacctccttggaaaattaccagaaggcctcccacgaccaaattcaggggagctggccctttctcgaacctcaacatcagaatggtcggtggtgtcgtagatacgctgcctgttcatagccgcagaatcctggtttccctgtcttttggacagagcaagaagagcctcctcatcttcgtttatacgactctcagcacgtatccgtgcaatccagtcctccatatccttgtccgacaacgcctggaaccggtaattctttgatgaagtaaaaattgcaaagacgtgttgccggtgcgaacggtgcgactttataggcgcaacggctgtaacctcggaaagtgatatcgatgctcgcagtcgggtcgcttcttcatccttgtagacagataacaggttcggccggagaacaaggtaggcaggtttccagaaggctctgaatacctatatcaaccaagccagtcagcacaattcgcttccaggcgcgaaattccgcggaggagacttacatgttttggcttcacccgacggtttactttcttcgacttcagaacccgatcaaactcaaagctcccgttttcgttaacgggagagaatgtatcgagattcataacgttactgcggtgaacggcggggttttgcatcggcgagaggaagggctgctgtaccgtgccgtcagggagatgtatcgccggggtgctcggcccctcaaaggccaacggaccaggtgccgcgcgcatttgatgcatggtatgattgaacttcgctttatatgggactccgtttcatataaaaaggttatcagtaatcgaagagccgaggaacaaagtgctggcgctaatagaatcctgagcgcgcaccgcacaggtgcacatctgggccaaaggaagatcgatggaagcaggcccccataaaatagtttacggaggcctaagtgacgggccagatcacaggcagaaacaaacagaatgcgtctggctggtaggaacaaagcagtctaggatttcgtcaagaggctgtgtcgaaaggggagatggcgggcactgaaagtccagaataggccgtgagttggcgccttcttttgcaggtgtcaatcgttttgacttcgtttcagctctacagccactggaaacgcaaaccacccggtcagtcagacgtcattaggcaaattctagaaagtctattctgacctgcctgcgaccgcctcgagcaaatctgaaagacaataatacggtgtataggcagcgccatatacgtagatcacaggcagagacatactccggagtagattcaagacagggcctttctattttcaactaaactactttaggtttagtctggtttagcttccgcgtcttggccagggacggctcttcaacggtcacctccttcaccatacatatagagaacgaaatgtacagacaaacctgacacatagaatcgattgggtgtggatcaccactgtccagtctcgagttcaaagccaactatgtcggacgcatgcgttcaccggtctgaaagagcccgttctcagactgaaggaacatttaggcgccctgcatccttttggctgaattggaaagcgacgcttggtatgagggacggcccttggagatgcgtccttaattgaagtcgcctttgactcataagatatctatccattgacacttgacaccacggttcggcatgtctcgacaattgttactctatatttagcaggagtt

SEQ ID NO: 4866 - DNA, 5255 bp, Emericella nidulans
atataaaagccaggaaaaatagtgtgaagaaattataagaccactaaaaagggtagaaaaagaggggaatatgccaggaaaatatgagtagggggttaaaagggaaaatattcctagggttgaaacaaaactaaaacttttaaattgagctaccaacccaactggacatttgaaaagcccgcaagttttacaaattcagccaaacctgtcaaccgtgttgatccggttggaacggggaacaggtccctaatcaaacggcaatgtcgccaaaattgaagaaactcattaagcatgtcgaacaaatgacacaaggttcttctaccgtggtgtttggaaaacatgctggcaaccttgaacatgaccatcttgggcaccccccacaaaagtcactcggggatccttgacggtctaagacagtactgccaaagcatcgtgaagcgaacgctcggcttggtcaagaagttgctctgtggcgccacggagaacgattgtgcaagcttggccagcagctacgccggagaatttgatgagggtatcttcgccaataatgacctcctcgatcaggtcacaagaccccagcttgacctggtcggggtggtcgaaagtcaaggcgatctctccaccggtaaccagcgccagtcgctcaatgccgtcaaagtcggcgtgctcgattgacatgataccagcctcggtgaacagctgttcgggccagttgtaaatgagttgtcggttgacaaagcagttgatcccgtgtgccttgatccgctcaaccttggccttcatcttctcacgctctgccttctccaattccgccaacttccctgttgactcgaccttcacgcgcgctccgaagatcttcaccttatctgtgtccatcgctgtgtttgcaacaagaatcttagcattttccaggcgcttcggttggttgacaccaatcttcttatcaagaatgaaaccctcgtcgaggtaagagtcactgagctttccgccggcttttttgatgatctggatgtggctcaagtcggttgagccccgaagtcgaagaacggcatcgcaggcaagagcagcgaactggtcgcggtcctgggccaggaccttagagctgagggtagtgcgggcaatcgagtggaggtctttgcggaacttctccatgtcgtcactgcggtcaacagcaaccttgtcgagagcatcgagggcagcacggctggcaatacggtatccttcgatgatagtctgtgggtgaatcttgcggttgacaagcttttcggcttcccgcagcagctcggcggccaacaccgtcacggaggttgtcccatcaccaacttcgtcatcctggaccttggaaatgttgactagtacttttgcagcggcgttatcaagggcaatggctttgaggatcgtggcaccgtcgtttgtaacgagtatttctccggtggacctgcacacagtcagtctgctaaccccgcgatccgcacatccgccactaacgctgattgtaaaatcttgtccatgcccttgggacctaatgtgctcttaacgagatctccgacggcgatggcgccgacgaaggccgagagacgtgcattctctcctttctcctcaataacatcgtccgcaaagatctgtgtggggttggcgaaggatgcctgaagctctgttagaactatgtcgagcaggtagaacagcccgaataaactcaccatgatgataaattgctgaaaaaagaactaccgaacaggtgaaagggggggctcagggatgctgaagaggcggagagactgccacaataattggagcgatgcgggacaaccagaaaagttcgcgatgtggcccgagcttcagaccgccctgagcctccgtcttcacctactgctcgcacttgcacctccattctacttttacataaatattatagcaccttcttccgataatgacggccgaagaggagcaggccaaactggcgcaaaacaagcgtccccattccgaagtggaagccgacgaggatggtgcgtgctattcaccgtctcctggtacagcaactaacagttaaacaggaagcgaatcgtctgacgacgacttcggtccggcgctgccctctgctgacgcgcccaagaagaagcgccggaagctcccattcgaaaaggtttacgtgaatgcgctgcccgcgtcggcccggtactccaaatcgctcatgcacaaggatcaactatcctttgtaacgatgacaccgcatacggatttcctgatcacctcgtccattgatggagttgtcaagttctggaagaagatggctgttggcgtagagtttgtcaaggagttccgcgcccatgccgcggagatcaaaggcgtcagcgtgagcgcggacgggcgaagctttgcgacaaccggggcggacaaaacagtcaagatcttcgatgtgattacgttcggtatgttaggtttcgattgagtggtgggtagtgctgactattgtagatctacttgctatgctaaccctcgactttagtccccgctgcatctgctgggtacaccctcgcggcgcatccctcccactcctcgccgtaaccgacgacgccagcagcacaatccggatatacgacggccgcggcgagaacccagcaccgctacacacactaaaatccgtccaccgcagtccgatatccgcaattgccttcaatgacgcctacaactgcgttgtatcagccgacgagtccggcatgatcgagtactggcgcgcctcagatggcacttttgagaaacccgacaacgtcttcgagctcaaatcctccaccaacctcttcgaattcaaaaaggccaaatccaccccttcatccattacgatatccccttcgggaaagcaattcgcaacaatatccttcccggaccgccaagtccgcgtcttcgactttggaacgggcaaactataccgcaagtacgacgaatccctgtctacaatcacagacatgcaacaagccggaacagcattgtataccctggacgccgtcgaatttggccgccgtctagctgtcgagcgcgagcttgaaaaccctgttaccaagcccaaagcaaacgttatctttgacgaatccaaccacttcattctctatggctcgctctacggcgtgaaatgcataaatacttacacgaaccgtgtagtccgcgtctacgccaaagacgagcctttccgccccctcaatctcgcaatgtaccaaggccaaccccagaagaagggagttgtaacggtgtccatggccgcaagtgcgaacccgctcctagcccgaagccgaagagcgcgatcccattcttgttacaaccgggtttgcaaaactccgcttctacctcctctccaacgaaaccgagatctcaaaatctacacgcgacgttcacaatgagaaaccccgcgacatagactccgcagccgcaacaggtggatccacaaatagggggaactgggcacgtcggctatccttcacacaacaatgggcgacatccacctccgccttttccccagcgcagcccccaaagccgtcgagaacttcacgactcacgcgaaaaacggctactacaacaacacaatcttccatcgtgtgatccgcaagttcatgatccagggtggagatccgctcggtgacgggaccggaggcgaatctatctggggaggagagtttgaggatgagttctctgctctcaagcatgataagccgtatacattgtccatggcaaacgccggaccgaacacgaatggaagtcaattttttatcactacggagaagacaccctggttggacgggaagcatacgatttttggccgcgcggtgcaggggcttgatgttgtgcataagattgagaatgtgaagacggtgaaggaaaagccggaggtcgatgtgaaaattgtcagtatatctgtttcatgattattttcttcgcctggttttagtgttcctgttttgcgagcgagttaagaggcgcattgtgcaatatacaaataccattttcatggctattacaggattacctacttcccaggctagttcgaattttttctcggttagttcatgctagctcatgcaatcgtccatcagatagacggcatagaaaggaagttgctgtgtagggccaaaaaagagttaaaagcaaggaaaggaataaagctcgtaaagacagaccatccagcgaatggaacaacggaacagctcaatccgaattagatgcacgtataccgtgatgaaatttcaacagagaacggaaatagacgcggaacgccaggtatatgcaataaacggcagcactattagaacaagcgcatgtcgacattgaacgaaggtagcgaggataaaccagactgaatcggacaactagaagataagctagtagttggctatcgcggtgcctccctgatctccacgccgctatctacgccttgcgaattttgcaaaggcgatggcgagggaccttgccgattcagcgggccaacgtttgtgcgcgagctgctggcgaaggagactgtgttgacagagcgagcgcgcggcacgagagcctccgggttgcggttctggaatatccggctgtcgcttgcgctttgagtagcgtggtaaaggttcggatgctttttgtcgtggcgccgtttgagccagaccccgacaatggctatgacggtgaatccgacagcaaggacaataaccatgatcacccactggtaatggccatcccacctgggaagtgttagttatcatacgatacgattaacattcttcgacggcactgaccatgattctggacccgctctgccagaagccgcggaggagccggagctgtccgccgtagaatttgcgtttgaagtgccattattactattatttccgctaccgctattgttctccgagttgctgttactcgtcgagtcttccgtcgatccggaattgctttccgtaccgcctccgctgttgcagaaatcgacataccactgctgcaggagctgacgatcttcggtactcgtgcaggtgtcatcacatgtcccatcggcggtcgtctggaaattcttcaggaggtctgactggcagaagcaggagacgtaagtctcttgattggtcacctgagcggtgggaggtgtgcaggaatcgtcggcttgtgcgaggacggagcaggtcaatccgcaagctggaaatgagctggaagcggcggtaggtccgaagttgaacatcttgtgcgagaatactggtgggtagagcgagtgaaaggtaaaaaaatgtccaagc

SEQ ID NO: 4867 - DNA, 2579 bp, Emericella nidulans
tctccccgatcgtaacaaactatcccttgtcgttgccgatagcgattgcaatctctacgtacttcagtacgattttgaaggtgagttacctacgactctttgagaataataggatttattctaatttacagatccaaactcgtccaatggcgacaaactgctgaaccgcagcaaattccacaccggaaactttgcctccaccgtaacccttctgccacgaaccctagtctcctccgagcgcgccatgtccggctctgacaaaatggatattgacaacacagcacccctccaccaagttctcgtcacctcccacaatggctctatcggcttagtgacctgcgtccctgaggaatcctaccgccgcctctcagccctccagtcccaacttacaaacactctcgagcacccgtgtggtcttaatcctcgtgcctaccgcgccgttgagagcgacgccagcgccggtagaggcatgctcgacagcaatctgctcctccagtacctggacatgagcaagcagcgcaaggctgagattgcgggaagagttggcgccacggagtgggagattcgggctgatcttgaggccatcagtggtggaggactcgggtatctttgatatagtttgggggtgttggtattgttcttcttagatcatctaatcacttcactgtaatccatgccgcaaactagtcagtaatttttctacttaccatgacattttgcatgcggcgaagcactgtacttacatgaaataaatatatgtaggtgataacaaagactagcagaagataaacatacaatcaatgggatttgcatgtggtcacccgacatactactaactagtcgatgtttggggtaagttcagtcgagcaaacggaagtcctgttctataacccctcatggttgtaatgtaccaaaattattcaaattaaactcctatttctattatacagaatgcaatccgcgcaagctagtgttgagctgactctcacattccttaatagtcaattatagttctccttttcaattcactgaactgcttgtccattgtctattaacgaagcaagatgcccgtcccatgcgccctgccttggttctcttccaaagcacgtaacagtgaaaaagcaaccaagcaatacacagtacttgcaaactataccagacacagtatggatagcagcaaaatctcatcgacggccagccgaatttcgttgttcctatcaagattcccagatttcatctcgggtttcttcttgcccggaataaggcggtccatgtgacatagatatataatgagaggacgacagtaaaaggcccactcgtagacaagatgatatgacgagaagaataaacgaagccaaaggggaaatccacgggactacatcgcgccaggaccaacaccacccagatgcccatgccacataaccatacatgcccagcaataaaagacgtcaaatcattgtacgtgaaataattctcgagtatgtccatccagatggacatatggcctcaacaagagaatatgactgcaaatatataagcatagccgaagatcaggtgcagaactgtcacattagaatacgtcctccgccgcaaaatatcgtttgctctgacctcgcgccgtaatgtatttcatctggggcatattcgtgtggtgtaccacatgtgggcgatagacagcatcaacggggccttgccaatcctccaagcccaagggaaaatactcatacaacacatcggcactttcgctcgtgaaaggaactggcagcatctgctggaaattggctgtattcaagaatgtagcggacgtgcttcttgactgcgcttggggcatagagtgagatactttgcgcatcttgactggcctccctgaatcaacgcttaaagacttagacgcgaggtcattagagaatgatgtatgaggacgggaatcgccgtttgagagattgagagagtcgtcgtccaaaagagataaattaataggggcagcaatggcgctcgtcgtccgtcgatgtgcctctaccggtctcgaaaattctggactggactgcgaatagactgacgagtgcggcagcgtcgtcgtcgtcggaggaggaagcgttgaatttgttgcaagagcccaatttgggggggattgctgggggaccccgtttgatgaagtttcgggagagctgctcttcacgacggtttttgccttgtcggtcagactgggcgaggttcgagtaagattattactagctgcagccgcttgcgcgttcttcctggaagcagcagcactaccactcaacggtagatctttcctagactggaaattacgaggactgcgaccccggacgatgactggccccgagtgaacctcgcaaatcggggttttcatacccgtggacaatgttgcaacgaccctgagccgaaccacaaagtgctgttgaagctcctttcttcgcccattgttggcagtcgcgacacggaattgaagacgcttccatgcgattggaaaagtggcgtaatcggcatcaagatcctgtccagttaacatgtctaacgggatagctggaggctccttctgacctggcggcagtatg

SEQ ID NO: 4868 - DNA, 10396 bp, Emericella nidulans
aaggcagattgatgaactttactcgacttggttgctttttttgagggctctcgaggaccgaggcacacgggcgttttaattggctgtgtagaatcaatcaaaggaggacgcagacgtttggaacaagttttctctaatctaaccgggtataaacagaaaatcgctagagtagaaagctataacaacaacaaagaaaaagtctatatataaccacacttttcacgccgtaacctggccattcctccgtctctccaaaaccaccgccgcaatcttcctcagatccacctttctgactttcccgctccccgtcacgggaaccgtggcgtcgacaccctcctccccaaacacgaacacatgctgaggcgccttatgcctccccagggtctcgcgcgtccacgcccgtagctcatcgtcagacggcctcttagcgccctccgcaagggcgatgaatgcgcccacgacctcgccgtattttgaatcctggatcccaatcacagatgaaagggaaatagagggatgcgccgtgagccgctcttcgatttcaagcgggtagatgttttcaccgcctagacacgaccatcgtcagcattatcccctgaatacaaggtttgggtgggggatgatgggagaggaaggggaggagtgcataccccgaatgatgatatccttgaaccgccccgttatagtacagtatccctcgggagtgaaaaccgcctcatcgcccgtcttgagccagaccgttccctcttcgtccgtgaccagtgtctcggcggtcttctctgggttattccagtatcccttcgtcaattggtagccggccatgcaaagctcgccgcgggtgccgacggggacaatggcgccgttcgcatcgatgattttggctttagcgtgcggcatgacctttccgactgtctgaaggcgcgtttcaatgctgtctgttgtaagggcgttgaagcaggtgggcgatgcttctgttaggcctgtacaattgatcagtcgggctttgtacggtttaagatgaccgggagaaataccgtagctgctggtatactgtctcatattcagctcctcgaacaggcgtttcatgagaggtcgcggcacgggtgcgccggcgatgatacccgtgcggagattggagcagtcgaagttgggcggtttatcgaacgagagaatcgcctcaaacatggtgggaacgccgtgcagggctgtgcatttctcgtcggaaatggcgtgcaatgttgcgagggggtcaaaggtctcgctcgggaagatgatcttggacccgtgcgttacgacggccagcatgccgaggaccaggccgaagcagtggaagagaggaggcgggcagcagaggatgtcgaaggaggtgaggttcatgcgatcgccgatgaagcgcgagttgtttactaggttgctggacgcacaagtcagttaccttccattgggtttggggtccgggggtggttgatgatcgggcacatactgatgcgtcaacatggcggcctttgggttccccgttgagccactcgtgaactgaagattgcagacatcttcggtctgtaactggctctcacgctcggggagagtgtttggaggaagcgggaggccgcgctcgatgacctgcgcataggtggtgaagtccttgtatgtgccgcgaatgacgacgatctcttcgagggctttggatgttccggatgcctttgggtgtggacccagctccgcgaggacgtcttcgagagagtgcttgttgatgcggggggtcaaaaataataaccgacaatcttaaacatgatcagtattctgagttccatttaagaaaaaaaaattagaaaaccaggagtcagtaccggtatgatccaacgcataatacagctcgctcggtgtgtatgtattattgagcaccacgagaatcgcaccaacccgcgccgcagcaaagaaaatcgagatatactgctcgcagttccccgccatgatgcctacccggtccccctttttgatccccatcgccaacatgccgcgcgcaacgcgatccgcttcatcgttcagatctgcgtatgtccatcgcgcgccggtccagggaaagacaagacactcgtagtctccatattgcaggctctgaagggttaggagctcgccgagagtgacgtcgagcaattccggttccgtcggcccataaacaatggagagctgctggggttgaggggcttgcaggtgcgaaagcgtctgttggaggcggcggacgggaccggccatggtgcagtgcgtggcaggcgggctggcagaaagatggataacgagcgagccgggccaggtggttgaacgcaagtacttatgctatcgcgaggcgaaatgcaggtcaggatgcaggcagcttaaatatgacccagagcgctggtgaagtgggatccagccgtcaggctacctcggagctggacgattgacagccgagtcgacgatatttctgctctaagcgagtcagagggaaaatacggagactgcgcgggcatccttgattcttcagcggttcgaccatggcatggagactccactttcgacacgagggtgacgatatcggatacgctggttatcatctcagatctgcatggtagaggtctgggcttttctgcgacggatttttcgggtgctttgatactgtctgtggtgtgaatatgggataggttatcctcattggtcgaaatcttttcttggaaagagctgtcattggcaggctgatgcaggggccgaatctgataactttgaaaaatctgataacggatacgcgcgggatgaggggttaccaaccgacggcaatgacaatgattctgtactgcttgtatgctcagaaaactcaaaggagtcggttacacacgaaatatggaaattaagaagcacaccgatcagttgatttttccattcattgttgatcagttcgagtgatatgtggtcgcagatggaccgcgaaatagccggttaaatatatattttcgccaacatcacagctagcagcaacgatcaacgtacgaaacatactgaacaaacagcagttaggccctccaagacagtatgagcattctaagagatatcttctggtcttccaagtcgtttcaataccttggcgccacgcgagcgatgactcgacgctccactacggatcagataatatttcgacgacggcccgcgtattattcgggcgccagctcgagcgacagcggggcacaggatagctacggaacattcgagagcatgatctgatgggatggcaaatcttgcaatagtacttaacccttgaactgtccttcgaatctgagtactatttaccgagatagtgatgcagggactgagggtctgcggttgaacgggtcctgcgtcgaaggctcgcttgcttggagactcctcactacctcaggcaaaggttattcttttcttttcttggtgtctttcaccttcggccaaacttagtggatttcttagcgaggtccacgggacatgacggtatgacaaacagtaaaggtaagactgtcataattgtcttttgtaatgtaattttacctattgcactttccagaatttcaaaatactttgaagacggtcatatactgagtcctcaacagggaagtgatcgccccagctggagcttcagagtcaaggccttgttttcagcggtcgacgcgctttctctcgtaaaaagaaacaattccgcatcccacgaagctccactgtagctgacagcttccagaggggctaactcgtcatggtatccaggtccgagtgaccatctcggtgcctgcagaaggatccgacctcgctctgaagccatagcttcgtcgaccatagaataccttcgttaccagggcaatttagactgagatgtctgaaacctactgtatccaggccttccttccccaggctcgtgctttcaaagccgctctctcctgttttgccataccaatacattccagccagagccagggcccctcctattactgctcggtcgagctcggccgaacccagccaggcagcgctagcagcgatatccgaagttagtggcctcatcgagtcagctttggcgcctgatagcacgatcgataagatcaggcccaggatcgccgagatgcacggagatacggcgttccatggccctggcacaccccacgaatacgaggttctctgcaccataactcgcgaggctcggcctatcgtcgtgcattgagccctacattgaccatatatggggcaaggtaagcgagcaggagaccagggcccttatctccgcgactcccgtccgagactcaatgctagtggcagggcgtaaagcacacttcgctcagctgcgatgtgtcacgtctaacatgacaaggatcgcaatattccatcggctagtagttatctatgtgccactcaaccaagaagggatgatctgcattgtggaaggaatcacctgagactgaagcagggtataaaaactacacgcgcattttccaggcgccaatgggacactctacgaaggtcagcaaagtaggatattagtagtgacatatcaactccgtaaaaggggcttacacggtcagaggacgcaacgggcctatggccataattactgcaaggtattgatcagacaacgagagagtcatgcgggtaatcttcgtcatcacttgcacaatgctatcttggactgtgctctagagcatcttcctgcacgctgaaagggtggagggctgtttcaagtggacagaatcacagagaatcttttaaagacgctgggtgacagttgacaagccggtgaccgtcacatcacgccgtctggccgagactcgtcttcatagctgaggctgacgaacattactgttttacgaggtatacaatggctgagccggacttggagtggtgcttcatagcttggagggcttggccttgctgggcatgattctggacaaggtaaaaaactagatacagggatatgcggttctgctgaacttgttgacttcgcgtgcaggggagattgggtagggactgttctgaggagacggtttaggaaacagtgagtcactgcagtaagtgcgtggccctcttgctcagcgtgtcgagttctccaggtttgaagtttgcgcatcaattctggagcttttatcacgtataatctcctgggacaagggtctggtatgattgctaccggtcattgcgctcacggcttcgagcaagtctagacctcctgtgatgatattctcactatagttgctttgagtctgggatgctgaacccgccctcgataatgtgagcctcgcgcacatgtgtcaacccacggctacaaaacactagactgcactcattgcaatataatgctgcgtgttggtggcctattactcgccgttgaaagtcagcttaagtgctttattaccttaagttagcatagcctctgcaatactagatctctgcaatactagatgtgtctttgagtccttcgacgaaaggaagacgcatagaggaagatgcatagatactcactactgagacacttgagagctatatatatttctgttgtttcgtgcgccattcgaaagtccgcccaatctactagtctataagcaccagcacctctagaatgtcagcaaattacgccccctacaatggctagcttacgtcagttttagaatcaactattatgggtgctttactgtgtgtttgttttatattattttatattgatctatgttattctattctatttggtatcaatttatccattcaattaccgatgtaacctgacccagatgtattaggccattcgaaacgaggggaggctaccgatgctataaatatcacaaaataagcttcataagctcaaggagatctcatagtcctgcaattgcgactttccaaaacgtacagagagtcactttctaaagggagtgagttcgcagatcgcccgctgtacggagaattcgccgtgtctatttaggagcccgcttcgacgtcgtcaccattcagcgaaactgattccacacctcctttccaaaacttcgttcttctcccgagtccaccgtctagcacttaactggcaggtagataaccggtcggtccttggtttgtcatcaatggcgtagttcttcgccagtatggttgcatcccgtgcggggttcgcgggggtataagttggaagtcactcttgtaccatttcctcgcctttgcactacacctacgtaccacaacctagaccacgccagtaaaatgtccaaacctgaaatgatctatcgccgactcggcaattcaggccttcatgtctcggtcatcagtctgggaggatggattacgtgggttctcttcaatttgttgatttcggacggcggctgacagactatctagattcggtggcgatgtcgcagaaggtagcgttggaaatagcccaaatacccattgagatgttgctgagtggttgagctgatactctcaatttcagagggcaccgaagcatgtatgcggcaagcctacgatctaggaatcaacttcttcgacacggccgaggggtgcgcctgccttacctaaatttcatattctgtatactgatggacccagctacgccggtggaaagtccgaaatcgtcatgggtaatgtcatcaagaaagccgggtggaagagaaatgacctcgtcatcagcaccaaggtttggccccggattgccgacgaccctgccggtttgcctgcatctgtcccgttctaatatggaatgcaaatagatctacttcggccgcgcgcacggcgacaaccctgtcaataacattggcctctcccgcaagcacgtcatcgaaggcaccaaggcgtccctttcgcgcctccagctcgactacgtcgacatcatctacgcgcaccggcccgaccggctgacgcccatggaggaagttgtgcgggcgttcaatttcgtcatcgagaaaggatgggctttttactggggcacgtcggagtggagtgccgacgagatcagcgaggctgtggggatcgcaaagcgattaggactcattgcgccgattgtcgaacagccgctctataacatgctggatcgcgaaaaggtggagggggagtttgcgagactgtatgagcgtgttgggctgggactcactgtcttctcgccattgaagggcggcagactcagcggaaagtataacgaagcgttggagcggccgccgccggggagtaggtttgccgagagcaaggacgtttactctgtgggcattcgcgagaggtggcagcaggaagagggtgttatcaagcagctcaagaatgtcaaggtgcgtgtccctttcactggcagatgaacgcaggatagtgctgacaggatctgcaggccctagccgacaagctcggcgtgaagcaatcccatctggctctggcgtggtgcataaagaacgagaacgtcagctcgatcatcactggcgcctcaaggccagagcagatcgttgacaatgtcgagagtcttaaggtgctcccgctgctgaagcccgaaatcatggctgagattgacaaggcgcttgggaacaagcccgccgttgcgcccgctcgcgttggatgaagagtttgagatctggtcttgggcctagtctgggatgcagttaattagaacggaagagcagtagatgtgaaacagatatttagatcatagaaacgccgatgggtatcatacaagcaaaatgccagtccgtgccagtccgtgccagtccgtgccagtccgtgccagtccgtgccagtccgtgccagtccgtgccagtccgttgccagtcctttgttattcctttgccagttccatgccactgtcgcctatcccgtccgaggcatctactgccctaggaaaccatgtgtagcaacgcttccgcacgcggtgcatcggatccctccttcacctggaacactgatcccttttccaaacttcccacactcgatacagacaacctgtagagtgcccctggtgaccacgatcgcaccccgaccataccgcgcctcgccgccgctccttggacacagaccgcattcgatacagaatctcttctttgcattgcgtccccgtctcccccgcccgcgacagagcatccggtctgcgaaacagccggctgcccggagacggaggcagtaccgacacgcgtacagatccttagagagagcgaagtctgtcgtctcggccaacagaaggtcggtgtgacttgatgcaggaaggaagttgtacaaatacgagcaggtgagtctgaagttcgtagatgcggggaaatcgaggtggctgtatattatgaggtggatttcaggcgggagagagagaaggtctattactggaggtggcatccttttctctctcttttcccttttttgtctttttgcaacctgtctcaagagtggcaggtacgtatcttcccgcaccctgagaaggaaagtcttctatctggcctgttgttagattgatttgcaaaatccccgcatgttcgtgtatggcgtcatattgggtcacctgatgcaatgtggctgggatggggttgaggtcgcttctcgcctatccaggaggaaagtattttcctgcgatattctgacttaatatgatggagtatactcttgaggtagccccttgagtgggtggagagcgcagagcagaagctgggactgccgtctaccatggcgccagatgctagcactgtccttgcgaagaataaatactatctgttgtaatctctagataatgttaatttacttatgattcttgtccctaatcaccagtcttatattcgttttcaccctggagacatgagccacagcccatggtacggctagctcgccatatacttctacatgttactgcatcaccacaccggttcttagtataactttttttcatatctgctttcttgctttagcaaccttctcatattcgatatttcaactgaaaatatccgctggtcgaagtatgctcgagacgggcttgtttcttcggatcgatgttgcagctctcaggtcagtctttgattttatcaagatgtatgccgaaaatccaatggagaaactcacatttgtcaagagagccaagagtttattgattggcttcaagatggttgccgttttactgccatatatctactgatgtaggctgtgggattcctaggatttgagcgttacactcgttagtataccattttcaaggtaaggattccaacaattgcgccagggaaatcaacaaaaaatgcctttagtgcatgtgttcatttcgtgtaagattatagtaccattctatccttcctctctatgtagtcgacaacattcgaaggcgtgagcagatcgtttcgctcacccagctcactttcttaaagggtaagggccaagtcaggctcacggagacactcgtagtttcttggacggtagatttccctacctttgacgaatgtaacgggaatttgtttgagggagaacctactgctgagctatgcctaggcagtacaagaacttttcagaagtatatgcatatcataacattgagtgacagtaccatcgctgagattactcctatttattgcgctcgactatggactatgaataactgataagtattagaatgtacaaaccatctaggactgattgccagagaaaataacaaacaacaaaaggaaaagcatttgcccctccgcaagtacatcttatcaactgccgcaactgcctcaactgcccccgtcattttgcttcaactcctgtaatatgtggcctagtcatcggtgacacattccataagttgaataaatttaatgaacacatgctctcctcgaaattcataccaaacctgcagagtactaagccgcctgacacggtcaccagctctcaaacttttcggcactctatggctaggtttggtctcgggtattggagatacttttatgacgatatcttcgtctttaagaaagacggaggtgtctctcgagattcgattggtttctttaagattgcgtttcactatctcggttatgccattgagggcaatggagtcgagcgtgattcgtaccgtgtcttgactgtctccagagtccgaactgaggactgtgccggtataggtttagggttatgattgttgagtgatcgttgtcagccagtttcttggaaggacccgtaatcgtgacctgggttgatagaattaagatggaagaacaaatagtgttgcgttgaactcggttggtcaccgtcggagagagtaagatggagcaggatgcgatgtgatcgcaaagagatgggtgtgtaaatgtcctattagactcctggcattatataccgaggcacatcctgtactccttagactctgtgttcaaactgtaattcactgtaggaatgccagcgaaacaagccagcaaggcccggtacccagttctagccccaaagggaccag

SEQ ID NO: 4869 - DNA, 5257 bp, Emericella nidulans
gcaggtaatgccttcaaggataatgcgaccgcccatcggcaaaaccgacgaggttttccatacgcggtcatccgccctgtacgtagcaggaagttcggggtcatatttcggatccttcaagatatccagtgcttccaggaaaggggcgatatctccgtcgtggacgctagccagcacgcgttaactatgaaccctcagagagatgtagggtataatcaaacttacaagctaaaaaacagtggtccagcttttggcccttcctgtagaaggcctgctgtagcattcagccacagccatcccattgcaccagcgtacgggtttcccgggccagctctatagtagtgcacgagatcgcgggcgtattcgaagttctcccagtcttcgcggctgaatacatcacaccatggactcgagcctcgtacgagggtttcgaagccacacatctcctgcatgctgaaaatgtccatattcgtcagagctcttagggccgaattcccctgctcgaatagcagtcgttccgctatagctggagcatacgactgctggaaaagagcgagcatgttcattcctttatcgtggccattctcagtgtcctcaaggtatctcaggcacgtgtcaccgggcgtcagtgtatccgctcgtcggtcgaatgtctctggaatgatttcgagcttggctctcccaatgtccccccagttcaagccaagtagcccgagcgcgaaatactgggctgtttgaatgacgcgctggcaatcgcttgcccagaacgtgaagttggactgggaagataggagatgatggtaccgcgttaagaggcgcgttccggttgtaaatgcacctagcatgcccgagtaaggaccagttctggttaattgatcaaagtcttcctccggagtactggtgaaataatcccaattgttaagaaacgataacgagccattgagggtgacgtttgcttccttaattcgctcgagaaggtcaagatggcctggagaagcagttagatatttggatacgtcgcaacccagtaaaatcaatgcgtaacccacggcttccggcattctttgtagggtatctttccccatggcgcgccatttattctgcggttagaaaatatactagtgaaatgcattggaggtagacactaccatatgcacttggtcaacatggcatccagctggtggtttgatgtcctgtgtaggaccgtcaagtttctcgatccaaggcccatacccgcccaggtggtaatacaagttccaaccatcactttctggtactgatggattgtaattggaggttctgtgggaaggattaaaccatgtgttccagctagaggaatatggcgatgtagtactggggcctttatggggtgcggtaatataatctctgattatggaaaaggcaccgtcaaggtagaagtttgaaatactaacgaacacaataatgattgagaatccaatcaatgagccggaagaggaaaggccagacattttttgccaggcgaagccaatgagaattcagagctcggtaagtctagagaggatggcttaaacaggaggtggaatggcccaagatctcggccgccaagacaaactggcgggcatgctatggggcatttcggcagacgataccactgcagagcatatacacatatattgtgactattcaaaaaatttctgagcatattcttctgagaaattcattcagaccaagtcataaattagctatacagcataccgatatcgaggactcatatcgcccatctcttcaatttcctcatccgtctttccagcagccttctcgtcttcaaaaccctgttctctacgcttgttcttccacagataataagcccacatgatcccatagattatccctgcaaagccaaccaacgccaaagtcacggcgttgccgcgcacataacgaggcccctcctcggttttgtagagaaacggcgacatcaccccactgacattgccaaatgtaagttgcaggccggtggcgaatgtacgtttcgcatagcggggaagagtcgtaggcaaccaggccaaaggtagcccgaccgcgacgtaaagacccagtgcaacaagaagcgcgccaaagtaatgcactccagacgaggagtcggaaatgagtataccgtacccaactactgaaatcgccgcgaagacgcagatgaataggccgcgacgttgggtacggtcactgaaccatgcaacgatcaagtatgcgacggcgcctagtgcgtagcagggtattgtcagggcttgaacttcgggcacggaccagtcccctagtcccttaatgatggtaggcaaaaaggtgctgtatccgtagagcatagtgtcaacgccaaattgcgctatacaaaaggcgtaaatcctccagtccagtgcgccttctttgacgtctgcccagtgaaatttttgggcggatgcggtgtggccaaagtgccgactgcggcacttgacaactaatgctctttcttcggcattgagatagtaagccgtctcaggatcatccgcgagaaagaaccaggttgcgatgccgataatgacggtggggatgccttcaatgatcatgatccatcgccagcccttaagtccactgacgccgtccatgaaaccaatcgcataagcaaggagacctccacatgcgccagcaagcgctgcgctactgaaaaggtaacctgttcgcaaggcgatttcgtgcttgctataaaagagggtcaagtacgtcatcaggccaggaaaaagaccagcttcgacaactccaagcagcagccgacaggcgatgagtccgccataattctgggttatacccgtcaaagttgctataacgccccagatgattgctatggccgcaatataacgtgatggtgtaacgcttttttatgacgaggtttgagggtacctcaaaaagctgtcggccattaatggttagatgcaggtcatcggatcaagacgggttcaatacgcacacagtaggtgacgaatagaatcgacactgcgacctgatactggtcaccaaccaagcccagatcctcctccagaccatataatcgagcgtttccaatgttgactgcacgtgatgtaaagttagcgggttagcgtgcacatggccggagagcatacctctatccagaaagctaaagagatacaagaggaccacaaaagggagaatgtacaggtccatcttcctgatgagcttcttctcagccttctcatcaatggcccacatatcggagttcgagtccatttctggaacactcgcttctttatttccaagcctttgttgttcgacgtccatttcgggttcgcagatctgtatctttagatcgcgctgtgtcgtttgccccgatcaatggctatataacgctttttctgctgtttcgaggcaaaaataaaccgtggcgcggccggtctcggaggcgaatttaacgggatttaccggcactcgttctggcagcgcccatgctcgcttataaggactcgaagccgtgtatggtgcaggaccgcgtcacgccatagccaaggataagggatcaaaatttatatcaaatgactgaagccatcgaatgaaggaggaaggcgatctgacaaaagtgggagaaaatgaagcgccaagactccagactcagagcttatcgagtttatcagctttatcagcggtaccgcatagtaacagtacacaaaagtgggatatggagttcctaaacgcattttacctggtttttaatgatcttggatattctatctcattattgacataccagaatattgcgtggtcgtttcaaagcaagggtgttttgcgctcgcattgatatttcccacaacgtcaggctagaccgaagctgagacatcaatgcgaaaccgagcaggtgccgcatattcaatgagttaactccatatcgtgcagatcattatcgcgtcttatctttcagattcatcttgaattgaccagaactcagccttctgatgccatctaaggtctcgctcagaatcactggacgtcagtgctgatctactctagagtacaataatcttctttggcgcactttatagtatctgcttctctgacatctatactttgtcttgctctcagacaactctgagctggcacccagcgttttgttactatgtgatgctgtgagcatcgagatctacttataccccgtcaaatctatagatatggtaaagttggcactcaaaacggttgactactttgacagttacagtgattcctcagcttgcaaattactttggggctcaagaagaccgggtaatatctaattctcagaaattgtacttggctctggtaacccatcaagctgccaacctagacaccacaaaggcgtctccagagggctgctggatggaaccccaatcatcctctgcgttgcgtcatcttcaaacatccttcgttgaacatgtctatggacggtgtacaacttgacggccccattgtctctctatattttcaccaagttcctattgtgagtatacaaatggtcatggctaggaaaggtttgcagtttttctcacacttgtcagcgactgaaccattgacatcaatcacagaataagaatcctaagagacgagaaaaataaaccgaagttcgaatcgccttttgcgtcagtaatactacgctattaagtaccccattcgcaatgattgtacaagtctatcggcaatggatttacatcgaggtagcccagttattcacgcttttcactttcaatcagccaagacaaattacgatatactgccgccgaaataatagccagagaaacaatccgtgacgtccttacggcaacaacatctatcagttgatgagtttgaggaaattactatacgagttcctcgacgtagccaagggaatcagcaacaagtggagaaatatatcgcaaatcaggttacagatgcactattgctgcctgaagataattggacctcgaagttaagcgggttctaccagagggacattctcggcgcgctgcaggataagccaggctgcctgctttcaagcacaatagtggtggtcctcgcgctgcgatgccttgtacgacgatagacctaggttgacatccaacttctagcggcaagtctcctaaaactggacggtattatttgacatacgaaggtgatagagtgagagaactctcagaggcagtgtactcggggtcaatttctctgattaccgggcaatgtttctctcacagccatattagcacccgacgtgtgagcaggaacactccct

SEQ ID NO: 4870 - DNA, 10498 bp, Emericella nidulans
ctgctgagttaggccaacacatccaaactacaagctctgttttccttagaattgccttgagcttcgctcaaacatatccacgtgtattatcaccacatgggaaagctgaagaacgaatcgacctcggagagtactcccgatgcggctgcgagcgcaacgtcctcagctcctctcatagagcataataggtactctaggtaacttcatgggcctgaacagcggcccacgagcgtacggatctattactacgttgaatgtcagcctcgttagcaccagcattagattcaccaatagagttcgatagtaggtgcatgacctgattaaaagctaatatcgtggcctccgctttccaggtggcgggcggccactggtatgtactaaactgtgcagtcctgcgcccacactagtgtggagtaaatgcaaggatgtactcgaaatgaacatcatgacctattctgagaacctatggccatatttagactctagcttacagcctgaaaccagtgctctctctcccgtaggagggtcaactgatacttatgttcgcatcttgaatctgcaagaccacgcacggctttaggcggcctatgtgcatacaatctgcacggcccgcatccagtctcctgttcgggaaagttcaatctgtcgtctatcaaaatctcggccgcgtggccccgtgcatatcacgcccaattgcggaaactgttccacgagcctggcaaggatcgacccggtggagcgttgtccttccgctagctcgacgtccaatgtatcacagtattttgacagttggtggggaacatatccaaatgcagcaggaaactcccagactgggacgaccctcgaggggtaatgctaagctttgcctggtagcgcacgccgatccgacataaaacgccactaaatcccatggatcaactacagttgggggtttatgagtggccattgagattatgactgacataatgactggttgcagcagggataccgacgaatcggcttttgacaaggtggagcactggacagttggtttccagggtctaactcccatgcttgaaccgatttttttggtggagatgtcgtcaggctgcgttggcggggcttgtctgccgcggttgaaaaggtgtttttatatggcagctggtcatctgtaaattgaacgactcggcccctcaatgccagacatctcaccgtcagtatgcaccggtacgctctcgttgtttacatggttgctctcctaagcttcgtctggacagcgactgcggactcccgagtcctcctcaatgcgctgtatgcactcccgtcgtgtcagtgatccaactctaatgtgaaaaagatcgactgccagcgacaattgatcgagagtcagacatcgtgctcatccaccgacacaacatgtctgtgttcagaccagaattaccaattagcgctgtccaactgtgtcacgtctcactgcatcatgaaagatgcactctgtaggtgtcgcatatagctgagtagagcagctgagtcttatatttgcatgtctaacgagacgcggatagtggctaaatacgttggctcgcgccaatgtgatatccctatatcccagcgctatcctcaggcagaccccggcacgattatcccatttgccattgctacgattctctttgtgattcgaatggtcactaaagctatgcatctcggtgggggatggggctcggacgattacactttgatggtagcctatgtgagacttccatactgtatactggttcatgaatgtcactaatgcgaccaggctttgggaatcgtggtcttttctgtcaacatctccagtatgttttgatgcttcgtcctatgcgataacctctaacttctcagtgattgatcacggatttgcgaagaacatatgggatatctatccccaagagaacatcaccatagcatacaaggtacgtctcgccgtgccggccccagttgacaaatcctcattcctcgcacagcgcttctacgggttcgtcttggcgtacaaagccctgatatcgctcgccaaaatctcggtctgtctcttccttctacggatcttccgttccagcaccttccgctgggttggatacatcatgattggaatcaactccgcgatcgccatcacctggatgcttcttgacagcttccattgtatacccgtccatctcgcctggactcaatgggagggcgtcgagcagggcaagtgcatcaactttattgccgcgacctacgcgaatggaattgtcaacatcatcgtcgacgttgtcatggtcgcgatgcccatctatgaggtctcgaaactgaatctgtcccagcgaaagaagatcggcgtggcggtcatgttcgcttcgggattagtgtaagtagaatgccttcacttcgagggcctagaatgctaattgaccacgtagtctcacgatcatcggcattgtccgtgtcattgtcttttcgcaaaacagctcgaacgacaatcccacatgtcagcacctcccccagcttcagtagaagcatatggctaataaggaacttagatgaaatggaggctctgaatcgctggtctgtcatcgagtgtcagatcgccatcatctgcgcttgtcttccggctaccagagctatgctcgccagcttctctccgggcatcgtcggcgagtcgaccggggaggcctccgccgggctgcagaaccagtacaatggacccagccggtccaaccactcaatgaaagtcccgctacaaaaggtcaacatctcaaaaacggtgtcttactctgttgactacgttggtaaatcaccgcgaaggtcttccaatggctttctccagctcgatgatcgcgggtctgagagagactagtctttgtctctgcgcctgtataacgcctgtatattattatataatgttttctaatgtagccacgttatctgacttctttgcatatatgtatactctctatgttactgtgccttctgctatgcggcctctggggcgcggtttcatagcccctgaaatgtgtccgtagattatattacaacagaaaaggtaccgttgtaggatctagcaagttgaggaatgcaagatctaaaaatccagttaagtcgatggtgcaaagaccagccacaacagcctcagtggtcgtgtcgtccatattgcttgggtgcaacggaagctctcagccaaggtgatattgccaccaatgtattcaatctggcaaggatacgggcaaggtttctgggcaataccattttcgacccagcgctggagagccttgaggacggtggtgggctggccgccgaggccgccggcacagtgccccagacccgaggactcaaaaaagcgccagaagtcatggttgtctgggaagagcacccgggatttattggacatgtactgtacccttggtgaggatacttggatcggcctgctgggcgaaagcgcgatgtgtgagttccattcgtaagactttcgataattccggcaacatggcagtagaagaaaggaaatgaaagtaccatgccatcatatgtgcgaagcttgcctccagcgttcttgaaagcgtgcaagtctgtattgtttgcgttccagtagctgccatattcgggagtgatgaggttgaaaaactcctcgtactcctcgtggctcaagccggccgtgttgaagctgatatttctcgcaacaaacagattgaaccactcatctttcacggcggtggccaatgagctattgtatcctggttgagcaccaaatatactaccaatgtcagaccccgggttgtacccatgccagagctggcggccgtctgtggcgcgcgcccgaccaggcggcattggtgatgagcgcggcgccttgactgagcgcaattgtgcggttcaaggagtcacagatgaaagtcttcttcacggtggtataagggtcgtagttactgccacccatattagagataagcccatccaccaccccgttccgggggtcatagtagcgaatggcctcattggtcagaaagtccagttcgcagactagcgggtccacgttgtgccagacgcgcatcaagagaggatagcaaagggtggaagtaaatttggtgaaggattgggcggggacagaggcgggaagccaggcctcgacggtgatggtatcattgtagccgggatgggtatattgcacggtgatgttgcagaatttggcattttctaagtcaactgtatccccattgtaattgaagctgtacggtttataggaggtgtagttagtgacccaagtcgccgaaagagaaagaatctcaggccccgaacacagtcggggtctaaatagctgcaggcgagcaaagaaagaagtccgtcatgaccaggaagataatataaggtcaaccagaaacgcgagataaaacgaccgttgaaggttctcccgtttaagtagtgtttttatacctcagttttctggccaggacggggtacagtacgagccatttatttttgtctaacgtcgaatcagaagggagttaccaggccattatcaaatggctgttcctaaaataaatgttcgtgctcggacttggctttggctaatttcttaaggctgaacaggaaaagattggctccacttagagtgctcttagggttaggagaacgtagtagattgcgtcggttcgcgcaacggggttcccgaggattctaggcatccacgacttgagattactgataatatgccttcgcacctaagtcaggatagctggtatatggttttccgcaagcttcttttacagggatggagtagccatggtcaacgctgtgctgccatgctgtgaggtatggttctagagccgcaacaaaggagagtgccggcaaaaaagtatacagaaattgagcttacagggaatgaacggctcatcaggtttggtatctttaaaccgcaataaccagaagcacctgttccatgctcagctcaccaccctgccgtacgtggtctctcctcgccctaaccaaacgcggcgctgtgtcctgacttgggtgatgggagctctccggtatatttatcaccctggtgactgttattggcttcccttcactttgccgtggaacgattgggtatgtcattctccgagtgggtgttgcactggcatctactgatcgcttgcaagaccaggcttgtacgatgctggatgggccagtggctgtttgcgggatggtgcataatctttactcctttgatgtgctgtctttacatttgctcatctattgcgaacgtcgaaacgacgccgtggacaaaaaaaagtagggcaaggattcgaagacatacaagtgcagtgccggattccgggttttgccctaggcttatccaaacagtcgaaactatactggcttgacctcgcctgatcgcctagcagtattgcagttacggatatgcgtctaatactatatcttatgagggctgtacagggttacttctgcttagccgccagatccatgaactattcattttgggaagcattagtataaccacgaacagatggctctatatcttgttggacaacctagtttgatactggtctacactctattctgaccgctaccttgcggtacctgttcatctccgctggctgcagatcctggctgtcacactggtccccaccgtcagaatctacgtctttagagccgcataatcaggagcacctgttcaggctcatctcgactaccctgcggtaagtggtcacttttcgctcgggggaggtgatgagactgcccagattcacacattcttacaagcagagagagccaccgtgcccgcctcccctgagaatgatatatttgcaacaatcgtgcgagaaaaatgtagttcctggacttctcttccaacagctgcctacattccacttacagagcggacgggccgccgggttgtgattcatgctgaaacatgcaaggagggatcgtcccttggcgggcacatccatcaggctaactcctccaactgcccttggcgtttgcttactaggcctgggagtggtggagttgggtcaatccgttgcagtgcgacaatatgtgaccgtagtttaatatactgaagacaagccaacgggtaggtctccgctcaccacatgtgacccaagaatataaaggcaacactgtccccgtcttctctcacctggcttgatcaaatcgacagtcgctagcctcagattcgttattttcatgcccgtcatgcttgcctctctagttgctgctgtgcttgcgactacctcctgtgcatccgctgccttgacctggtctttggacaagtccgccaatccatctgacgacgaatccgatgcctacagccggattgaagcagcaatggaggcggccgtcgcccgttacgcccgccttggtgatgccagcaagtcgatatatgtctactacgtccccggcgtcccgaccgccgaagcaagctacgatggcactattcgattcggtagtgatcgcgcctatatgaacgaacgcacggcactgcatgagatttcgcacactctgggcgttggacagacagctgcctttgatcagcaatgcgcggacggtgactggcctactgcccttcctctccttcgatcgtgggacggcgcagatgccgtcatcaactgcggtgggggtcacttttggccgtatggactgaactataatgacgaatggagcgagaccaacggcgatcgaaatgtattgttggtcaatgcaatggttgatgatggtatttaaccatcgtttttgattattatcgcaatatatatttttgagcattgttcggtgctcatgatcagatgaactaactggactcgtaaacctactaaacagctacttactgcctttatcccttcattctatgtcagcagaatacccgagaataattgcgttgttcggtaattgccaacgtggtcaataatgggtttgcacggatgcgtctagtgatgaattgtcagcatataggtggaagagccccattaagaccggcgccctgagattagctgcagtattaccaggtagaatgccgttctaactgcagaggctctgcgagggacaatgtagggcttccaactgatactcttccagcacgacatggcttgacggtcaacagtttttgtacggtaaatacctatatacgcgcatttactcatgtgaatttgagagctaactcaatttatcactgcactatctccgtatttaccaaaggtcctattactcctccttggcacgcgcgatcttgtccttgtactgtttgttgcctattatctcaccagaccaaaatgagaataggtatcccacccaccacaacacaggtgtagttcatattctccaccgtgactggcatgttgtatggaaagctgaagaagatgatggcaaacagaagccatccgactgtgacactgttgacgagccagccccatttgcccatgtggaatgatcctcgatgcatgttggcgcggctagtcagcatgttagtggagattggaatcaggtacgcaacattgttgatggtgactgcagcacccaacatactgttaaacgcggtgctactgcccaggtagagacagccaagggctgcaatggcagcggcgaccaagagctgcgcgttgaacggaatgccgaatctcttgctgacccgggcccatgtattggagaacggcatcgcgctgtcacgagcgaaggcccacagaacacggggcgaggacagttgggacgagatcacgcatgggcccaacgcaatgaataggatgaaggtcagcccaaaggcaccaccgacggactcggtcacctggcgaaacagttcggtcagaggcaggccggttttggtatccgacaacgcggcgaaatcctggacgctgaacatgagggcaatgagataactgaggccggtgataaatgcgatagtcagagttatcccaattgccaacggcgcgttgcgcgagggcttctccccttgtcagtaccagcaaaggcttttcgccgaagatcaagtggtgctcacattggtcatttcttccgttatatgcgtgatcccatccaggccacccagactgtatagtggattaacgaggccagtgatgaagcaaatggcattgttatcccagccggtattattgatccaggtccggaagacaaattctttgctctggtgcgtcggagcgcacgcgaccactgtgacgaggacgacaaaccagccgatctggagatagaagagagaaaatttgttgagggacgggatgattcggttcccaaacaggacaacagaggctgtgaggatgttgaggatctggtagatgataaacgtctgccatgtctgaatcgccacgtccgcgtggtagagcgaatatagtgcctgcactaggggacggtcagcactcaacatggatcagaaccggcaatttggtcgaaccgtaccgatttgggcgaagatgaggtttgtcgatgccgtggtgaagatccctagactgttagccatattttcgggtcttttgtctgcggatctgcaagtatgcagcggacttacagccagccactgtcaaccagccggtaacgaagctcaagaatgcgctcaaccttctgggcgcaatggctgcgatccagtggtacatgcctccctcggttgggtagctggagacgaactcggccagagatgcaccgaggaacgactgcatgatcgtcaccaagataaacccatagattatcgcgcttggcccccccgcatttatctcggtcacgatacttaatccgagtcctgtccatgagatggtcgtcgtggaagcgaggccgatcagcgagacgatgctgaagtggcgctccagttcttgcttgtggcctggtcggtcagcatttctctctctctattattgtacgtaaagataatatggtggctcatctacccatctgagcgaggcggacctcgtcggcatccatgtcggacgcatcctgcgcgagcgagacactgatctctttggtcgtcttcatcttggctgtcggatcttttccccggaccggtctttccaggactgaccaggcattataaatgcggccctagtatcctcagcgtcgtatcggcttatcatttggtgttacaatcatgagataagagagacgggtgcgcccaccgggctgttggagtcaatctttgaccggtttcgttcttagttacctcctagtgacttccgcgttactccaattctgcaagcgagctccggcggggtgtgccaataagataaataaatagaccttgacggcgatggcaagaatcgcagtcgactcggttctcggttgtcgaaatgctggcaaaggcccgttggttgctccccctgctgggtgccagcgccgtgcagtgcgcgcatctgaacctccatgcacagagcctgctcgacgagtccatgacactgcaagatgctatctacgatccggcggcttcgtacctgcgctacatttacttcccgtttgctgctggcccgcatgaaacgcggtcgtcagtctggtactcggttggactgttgcagcggaatcagggcagcgacgccgaggaagcgttcaagatactcaggaatgtcattggcgatcaggagaagaatgaaatagtgcagtggtacggcgactacacgaaataccccgagcagccaaccgtcggcactgcggcttatcctccggtggtcagtctccgtctcaggaatcgatagttcggggctcagggctaaaggaaggaaacagatctataactcgtgggaccccaattggcgaggattcattggcaccgcgctgatcatcatctacgaagagttccagcaccttctgcctccagacctcagcgacctgatcctcgaaagcgtgtacaacagcactaaaggcgacagctaccgcgtcggcggcgtgaacgaggacaatctgtatccggcctattcgaacgcctggctgatgaggactgtgaccagctcatggacaggtcgtcatttgaacgatgccaatatgaccgctgccggtgatgcggacgcgtctgatttcctcgacctctttgaccgtaaccacaccctgtccgagtttaacggtccaacatatgcaggcgtctcgctttacgccctcactattgcagcaaagtacatgggatcgacgaacgcgacaattggccgtaacgcggcacgtctcatccagcagatatgggagtacgagtcaatcttctggaacccttatatgaggaactttgctggcccgtgggatcggtcatacggctacgatatgaacaattacgtcgccatcatgtccctctgggtatgggcgctggttggtaaggagagcgcctggaacacgactttcccaatctggacgcttgcccatgccgatgatttcgaggtcgcaccggttattgctgtcctctccgaattccataaggccttgattccagacacggcaatctcgaggctaaccgcgttctccggtgaacgtacctaccatggccatgtttatgcccctccagccgaccatgagccgcggaacgtca

SEQ ID NO: 4871 - DNA, 4380 bp, Emericella nidulans
ctcttcaaccaaaggtgtgaatatacgcgccatgatctcgtttgtctgcggcatcgcgccgaatctgcctggtttggctgcggtgacagggcaagacggcgtgccgaagggagcgaattacttgtacagctgcagttggttggtgagcattgttgtttctgggatggtctattacttgctgttttttgtctggccgtttgatgttgaagagaaagtcattgtgcttgagggaatggaggagggagatagggttgttagggttgaggaggcggtggtgcagaagaaggaggctgtctctgcatagcttttgttccaaatgtgcaatagttgttcatcagagcattaattcaggctaatattttatatttacccacaaagttcctgtttagtccactaaagcggcccccctagcccatcaacaccgtatccaacgtccgctcgcggcctctagtagagggaatcataacagaagtaagggcttttggcacgtctctgcaagtaatggtatttcttatagtaaaaatcatattttgatgcactagggctacagatagtcctgccctctcatctcccttgtcagccttgaactagcataaacccccctcttcgccgtccttccccccatcctcaataacccaataagatgatgaactccagcaacaacgccatcaacaacttgtatttctggtccaaccgcctcctcaacagcctccttcagcttcgtcattcccgcacagccgagcgtgatcacatccgccccgcgttcgacgagttttcgcgcagcaccacacatcgcatcaagcacctcctgctctcccttcctctcaagaccaaggacaccaagcccacagctctccacgccaatgctgaatccttcatacccatagcgtctaatcgagtcggtgtggagaactccagaccttgatgaggtaacaacaatgccaaaccggcctcctagtgtcctcgcagcgaaaagagatgcctccataatacccaccacaggagtagtgagttcttctctcaacgccttgataagcgggtgctcgctgtagcaggcgacgaggaaggcatcgtactgccttgcaattgggataatggcgcgaacggcggcggccgtggagagcactgcgtccagcgaaccctcgatcgcagtgggcgcaggctgcggcgatgtgaagccgtcaacttggatatcggagggtaatgttggcgcaaccatctcaagacaattaaacgtcatggaccacgtggcgttggggtttaccaataggatgcggtatttcttgtctggtccagtatctcccctgatgatatcgggtgatatcgtcgagttcgtctcaacaggaggggcacgagcctcttcctaaatgccaccaaccgcaaacgtatcggcaagcagaggcggttcatctacccccgtttgctccaccaggatcttataatgttccacgcgtctatgccttgcaaaatcgaacgtccgcttcttgccagcgttacaaagctctaaatcacaatctgcaacaatcacctcatcctcaaccgtcttcgtctctgcaatggcccgcccctctgggtctacaatcatgctgcctccgatgagggggtacttcccgtcgtcgttgccacagcgtgccgaactgacagagaaggtggcattcgtgtagctatgtgcctgcataacgagtttgtggtgaaagagtgagagcgcttccgcctcttctcgggacatatctccgctctgtccccagaattgcggcgcaaagccgttagtattatatccacacagcacgatctcaacgccttgcagtccgtacgcacgccaggactcggcccagcggcgatcattgcaaatcatgagccccaagattgggtctcctttcgccgttccttctgtgccagcgctagaatcagacttgaggacttgttcgacaagccccggcacccgaaacgccttgaaccccagattcccaggaagaaagtacctcttctctagctggttcacggctgtcggatcaggaagcggttcgaagtccccaggcagatggattttgcggtaccgcgataagatgtcgccggtggagcatgatagtacacgcagctgttatagtgctcgcctgattcagtcgcttctgcgaacgcgacgcagatatcgacgcctaattcatgcgcagatcaaagagggcttttgtgttgggtgctgtgcggatgtcgccgtgctcgaaccagctctccaactcggtttcgtcggtgatcaggtaccgcgggaagaacgtggtgaaagcaatctcagggaagaggacgacctgcgcgccttgcgatgcggcttctctgagcagtgcgatcattcgagccaatgtatcggttcggtcgtcccatttgttggttgtgcccatttgggctgcggcgaggcggaccgttcgggtcatcttgacgtctgatcgaatctgaagtgtgcagagaatgcaatattgccgttgttattactgtcgataagttttaatacgtcttaaatgtaagaaccggaaaaaaacccggctatcggccagataggccacaaaagctaccttatcaccggccgttggagtagaataaccccgtggagatgaaacggagacatggcttggagaaagagataggcatgcgagacaacctccaatcaccctgagtatttagataacattataggctcggactcatgtcagccgttcagcaaatctaacttgaaggctcaactcgctcccaaaatggctgatatcgagctcatcatcacaaacgctaccatagtacaacccctctccctgccggtacattccaacttctaaaaaccacctcaggcaacagcttcagacatcctcccaaatacagatattgccatatcaggggggaaaatctacctcctcggacaaaacctctcatccctctttcctaccgcaccaaccctctccgcagacggtgcctatgtcctccccggcggcgtcgacagccacgttcacctgcagcaagacaacagtccgacgggggatacttgggagacgggcacccgatctgcaattgcaggaggcacaaccacagtcctcgcattcgcgtctcaaaaacgcactgatgggtctctcttccctgtagtggaagagtaccaccgccgagcaagtggcaatgccttttgcgactacgggtttcatcttatcctgagcaatccgacagagaagatcctggctgaggaactcccagtcttggtcaaggaagaggggatcagtagtgtcaagctgtacatgacctaccaacccatgcgtctgcgggactctgagttactagatgtcatgggcacaacccgctctctcggcatgacgacgatgatccacgccgaaaatgctgacatgatcgactggatgacaaaacgactcgaaagccagggtcgaactgaaccgtacgcacacgcattggcccgtccaaatatcgccgaagatgaagcgacataccgcgccctttcacttgctgaactcgccgacgtgccgattctcatcgtccacatgagctcatccgtagcggcgaaacatgtccggcgcgcgcagacaaagcttctccccgttcatgcagagacgtgtccgcactacttattcttcacaagcgagaagctaaagggggaggacttccgtggggcgatgtgtgtctgttcgccagcgttacgtgagagtccgatggatctcaaggcgatgtgggatgggctggtgaatggcacgtttacgacattctcgagcgatcatgcgccgtcaaagtatatcttcctacctagccttctacatcaactgcctacagtagcaccgacaaggtagagtatgcgataggctaaccttgactaatcgagcagattcgaccaccagctcggcaagaagaagggcacaagctctttcacgcagatccccaacggtctccccgggctggagacgcgcatgccctcgctattctgcgcgggcgttctaacgggccgtctgtccgttcaaaagttcgtcgaattgacggcttcgaatccggcaaagctgtacggactgtcagatcgcaagggaaccatcgcaccgggctacgatgctgacctggtgatttggtatccgacagccgagcaggcggaagcaatgcaagcgggctctagttctagagtgacgatgaaatcattccagctgaagaacgaaatgctccatcacgatatcgactacacgccctttgagggaatggagttcaccaattggccacggtacacgattctccgggggaagcttgtctgggatcgagatggaggtggtgttattggcggcaaaggggacggagggtacttgaagcgcggtatgagcacgctgagcaggccgaggggggtctttgtcaatgatt

SEQ ID NO: 4872 - DNA, 2328 bp, Emericella nidulans
ggtagaatagacacttcctttctccgagatgcgcgatttttcgcggaaggaactgatcaatgtgcttacatcggcaggatactgttgggcttcagacgcgggcgggtattcgatggctctgagggggatttcgctctggttgtagatgctcccttctgaggcgcggcggcccccttcatcgtagtatacgcttccctttggacctctggtgccaaactctgtgccttcataaactgtgctcgcccatgggttcttggacgttacacttcgggttagcgcaggtcgagattctgcggtcgagtaaacgcttcgtggaggaggtgcctcgatagctcggtagccctgatagtcctggaactgtgattgggctggcgaagtttcatgagaagaaagttgtcgaaattcttgaggcatgaactgcgatggtgatagagaacttgttgccgggctttgttcggaatcgcccttagacatggcgtaggcaattgcagcgccggcggcagcgccgatgagcgtaccgacaatcgtcttagcggctttactgtcatcattcttttgcgttgtgtgtgtgtgaacgacataggtttgaggaggcgcttgttgaatttcccgagacgagactattgacccaccgcgttcagagggagctcgttctgagggagctggtcgatcaacggcagttaaagccctggatacatgagatttggcattggacttggcactgctggctttcgatacgaccgagccattctcgagcagtgcaagagcagatttgctcacggctgatctggccacggtactgccgctaacggtgctgccgctgctgcttctcatgtctgtgtcgggacgatatacagcctcaatgctatttccatccatatccatgacagcagcgctaaagtagcctgactgagagtcgcgagtcttgggctctccatggagtttccctcccgctttgagtgcacagatgaaaaacgagttgacagcatcctttgaaggtgcggggaacgcaacatgagcggcgccggcggggcatctataagatagttagagatagagctgcgagtcggacgtctgcgtagaggccacccaccccggcttttgctcggttatccagaagtccgcgggctcgttggagtcttgcccaaatccaatgtagtcgtcatggcgaccaatgaatttatatcctaggggctgtaggcaggaaagaaaaaaagatgtggaggtagggaggtgggaaacggtcaaggttaaatgggaaagaggcatgtcttcgccggatgaactatctcgctgagtcaaaaactacagcgggatttgtctgagaggagcggcggtggtatgacagggtcttgatgtgtacccagatctgactgctgagtgctggttatagcgcagaagacgggcaacaaagaagtatgatgaacgatccgagtaattggaaatgaagtagacaaatacagacggtgagtcaggaagaagcgggctgataaagaacaggataaagctccctaagtaccctaagcattggagttacacccaaagcatgcccatgccatccaaccagaagctttggggcgataatctcgtaaccggcctcgtgagagaccagggagccttgatattgcaggcatgagtgcatgtctcagcagcagcccagggctcctatcggaatcactgaaattgagcaagacccacgatgctcctatcggtgaagttagccatgaggggttgaacagcattacggtaacggccaggtcatcgtggagaagcctgaacgggaccttgtagtcgaggcggccctgtcaatgagggaagaatgggtgggtaccatgcaagaccgaagccaagcaacaacaatgaagtcaagctggtgaggcgaccgattaagaacaaggtaaaagatagagattggttggtagtgagagtctaacggaagatttccaagcctgaagcgtgacactgaactgcagccactgtagtagctcatccgtacagagtacatgctgtgtagtgaccttcttgtccaaggccatggcttcatgcctcatggagcagtagtaggaggggtcaccccacgcacaacctatcaattggctggatgtagccaaactggtttcattggccgccgtgttcgtcacagtcaccaatcatgttggaacagcaaatagaccagaggaacggtcgaagaacagtagagcacgagtaccgggagccacttaaaatggcccctctgaccgtccgacaatggcctcgcgttcctgctttgggcacttctgctgctgctagcctgctagtcgccgctggtgtgtctgaccgctcggtgat

SEQ ID NO: 4873 - DNA, 2087 bp, Emericella nidulans
ttgcgccttctaaacagctggaaccacattaactctatcagttaaccatgattttctctttcttagaccaatctggtagggagagaagcacccgaggtggtcagggctcgctccgtcggcagctgggtatttctctgactggtccgcagtagacaccaaaccgtctgttctcattattccttgcgaaattgtttttctccacgtcttctctaagtcgacgttgaagtcagacaagcggcaagtcatatggcagatatctcgcctacagaaaacattgccgactcgcatcgtcgcaatctgagttcgaacaaagcatcagcgcttttacgggtctctactcgagacatacaattcggctgacagttgtgagggcctatatcaatgcacaatgaatataaatagtatattgtcaatatagacaacatgaaaacccaccgctaaaacacaatggtatctctcatcagatcaacaataaggtatcttagaacatacatacgcatacatgagtagaagaaaattgggaaagatcgacgtaaagctaatcagaacatgcctccgtccatagggatgcgaggttggtagggtgtaggagatggcgatgcgctggcaccaggcgctgtactctgccgagccatggcatcagcagtggcgttcagctcgccttgctcgctagagaccttacgcaggcggttgcgcggcctcgaccgggaccgggaacgcttctggccttcgtcgtcgaaggtgctgcgttcttgcgcttgggagggctcatagtcagattgcgatttgaacgcgttgaggattgtttgcgtagttgtttggcgccgacgacgtgggttcattggaggaataggaggggtttccatgccattgctcaggcttgcgccaggaggaagcccgaccgttgggacgttggatgtgcaggagatgaaggtgggttcggagatttttgatttgtcgatgatgcgcttctgaagaccagtgtgacctgcggcacgctggggaaggggctgaggaagagtggtcgtagacgcagccggagagtcgccgttcgcatcgttgagagggggcgttgcgttacgcgagaagggcggacggccggcgaagggcgaggagctccgattattggcgagttggcgatgggcgcacggaatggtcgatcaaccggtgttgcggaccgactttcttggaaatatgcacctgatgcggcggatggcccctgttgtcaaacatagggcgctcgtaattctccaaagaagggcgggtagacgacgtaaccgacgtcacacgtcgccttccataagtgaagccgttatcagagcttatctcgtcttcttccaaagtagtgagattgtcgcgatcgcggcgagagcggctcttggaacggctggatgcattcgaactcgatcgttctcggcgagaccggaagctcgagtgaggggatgcaccacggctgcggctcgattcgcgagattcctcttggctgcggcgactgaagcttgcaattctagagcgcatggaccgttctcctacatgtggagagcttgagttgttatgccttcctatatgaggaaacgccattctgtcctcctctccccatgggtcatccgagaccaaggctggtgtggatgcattgccgccgaaaggaagacccctcgggccgcgagactctccccgaccaaagagatggtgcttgccggtcttacttttgagaagggcaaacgcatttccaggcttgggctggccaaaatcaggagtttgacggccagacacagggcttgctgcacggctttcatcggcaaagtctcgaagcttttcctgcacgcggcgacgtcgctctgcgagctcgttggcgaattcttctcgctctctttgtgtctctgtgcttgcctggcgctgatgccggctgatacccagttcgtcccgccaatctggaattgggtcgggaactactggaactgacggtggagcagccgtgggagggtgagatggttggcccaattgaggcttgtcggtggaaggctcctgggcagtcctaagttcagtaggtggagggaagctaggagactgccggggcatgacagaag

SEQ ID NO: 4874 - DNA, 4445 bp, Emericella nidulans
catttatgtcgagaacttttgttgatgctcgaataaggctgcactgaactccagaacttgtccgggattattcttcgagcattgcaaccccggcaacatgcgtaaagattgatgacgaatgtcaattgactatgccggcgggagataactggacctggttattatctcttagcagtagaggccgggtgctgtgtagaaagccccgtataatttcgcggagaactgttcagttatattcgcgcaccgtctataacgagataggcaattgataactaacagtgcagacatccacacaggacaatgtcagcattttatatgatgtagtggaccaggtaactaaagggagttttgagtctatgtttttgcattttagtagcggtggataccaaaagatgaccagtgaattccagggcaagtgccattgctgtcgagaggaatcgacccaggctcgtgggatgcaatgcctgctatgtccaatcttcttgacgcgcttttcttgcggccaatgcggacagatgtcaaactcaaaacacctaggtacacgacgtgaaacaactggagatgtcggtatacgacgcacgcgccactcgccatcatcaatctctagccttggcggataccccgcccagtcccattctgcaagagcaagcttggcgcaacatggcaagctcctaggatggccgcctgccgcctgtcaccccatgaaacccaggtggtagaattgcttccttcgtcatccgagaatacatcgcggaaacctctttatttttagataactcttaacggccttacttgacatggaacagtactacttgaaagtagcttaatcgtcaagacggctcctcataaaactggactcaatacagtccaattggactactatgaaaataatgaaatgcacagccactaaatgcggtgaatcttcatttgcgacccaaaggcttttggcttagaaacgctaaatcgttgaggtgcatagaaacagatacccactgtgaggctactggatcatattcgccctccacttggattctgcaggaaccctgcgagcccttgaggcccacaggcccacgaatgaagaatattccctgacgataagcacgtgagtccgatctctggcactcgtcaatccgtttcttgaaaacctgcgtcgcgtcgtgtagatcagaaccagggcctagttttggcagaggtagccatcgcaatgtagccaaaatggatgaaggctggagatgcgtgctcggcgactcggattgcgacgcgccaccaagcttgtccaaggtcttgaagtccatatatgagtctgacaagcacgcccgctcacttactgagcttgtagttctaaattggccaataaacctttcccaaagggctgagtacgcatcgagtacggctagtgccagataagatggacgtacagagtcacgaatgttctcgctcgccacgggcttttgaacccaggagactccgtttccagaaaattctagactatgtaacggtgagattatgaagacgtactttgaagaagggatgctatacccagatcgacggtaagatctcggagcgcgagaggggaagtggtgtagtagccatttccccgatatcgtgaaaggcggtccaagcatgcgcaaaagtagactcgattgtgaagcttcactcaggacgatggatgccagttcatctacaggtataagaaccagtttcgatacaacagcgttcggagacatagattacctttgagcgactgaagcttttcagggctttgggagattttgacaaactccttccactcagggtctgttgctgcatataatctgccttcttccagatgtgaccatccagttggaatgaatacagcctctatacggtctcggcttgttgtttcaggtgcagaatgactgtcaacagttgtctgcgaggccgtattgctggacgtattatcctttcgagccggaacaaatgagctccagaaatatgcagctattccacagagcaatatatttgcgatgaagcctcttctgtcgttagaatagtcgcaggatgagcgagtgtaggtaacaccacatacctggaccaaggtcgtttgatcacctttacatatcgaacgttgggtccatgcgaaaagtagcggcgtgacggatgaatctgtaacactgattgatgactataaaggagtggccttgagggcggcattggtatggcacatctacgtgtcggataattgatctcgtcaattttgcttgctagtcgtcgctagtcgatgtatgtcaaagtgcaatgttgtttgaccagtggtgaattcgcttggagtgaacttggtgaggatttcggatagataaactaagataaggataagagtctgacggagattattgggagattgacaagagagcacagcatatggaatactaccgcgagtcctccaaagcaagggtctagcagtacgacacgtgatcaggttgaaaccagttcctccaacatagtcccgaagcgcatcttaatcgtaagagcacacctgatttgaacatgccataatctttactctcctaattgcaaccacttgcgaaaattgtactcacatactcagctatattcttgatagctgttttctgacgaactctatttgggttcgagagaagcagcacttgccgaacccttggccatattgcacagctcccatcatctcaatatgcggtcggtcttcagcttcttgaccacgataggcgccatctctgtgggagctaccgctttggaagcttctgttatcacttttgggtcagtaactcaaaagcagggcctgaaatcttcagatatatcaagcgccactctcctacagctattggagcttcggaccaaatcacccaccacgtcatctttgcagagctcggatgaggaaaatcttgagttcttgaacagattggcaggtccgcctacacgtttgtttggtgcgcccgctgcggatggaggattagatacactcctagtcgtgctagaaggtctgactgacgaaattggtatgacgatgttgcgtacctgtgatgatttgtatatatctaactgtgcaacttacagggaggtcaattcaggctgaatatcaagatgaactgctaatcactgaattcgtcacgggttctgcggaagatacttttctcgattacattctggaggccaggcttgaaggcatagtcagcccggaaagcaagcgctgctcactcacctctgatagcaatgaggtaactgtcgacaagtcccctgccagattaggcaatgcccagctaacattcgtcatcggcgccttcagggttttgtcatgtcatgtcttcctgccaacttcaatttaacccttggtagtgggtttctcggtcaaatcactagtggcgagtcttggatcgataatcgcaaagaacttgtggttatgcatatcgccttcaaggtattacatatttgttcgaagttagataaaaggccaatgctaagaatgtctcttccgatgtcccagggcagtacggcttacataaacgatctgaaagcattcttgtctggtttgcgttcactgtcactaaatggcaggagggtgactgctgtcgctctgcccgatctaaacgcatcgcagaagctgtctcgtacgcggcgggcaccggaacacacggcgcttgacaccacttttagttgggatagggacgagcggctcatgatagctgatcaacacgcacaagcgtcgctctcccttggccccgtttgttacgcgtcgaattcttcttgcaatgatgcgacagacacttgctcgggacatggtgcctgctacgagaaatccggtggctgctatgcttgcctttgccacgatacatatgttaagaccgcaagtggaacggagcggaagatacgatgggggggctctgcttgccagaaaagggatattagcagcccgttctttctcatcatgggggtcactgtagcagtactgttggcggtcatttctgctattgcgatgatatttggtatagggaacgatgaattaccaggcgttatcagtgctggtgtgggaactgttagggcacagaagtagggtctcaaaacacataccgtcggcgctgatgctggcaatcatggtcgatgactacttgcatgacgataagtaaaataataaaattcagcacttccgctaaaatattcaccagctgcctcaaataaacctggctgcagaactgggatactcaggcggtatggcatatgctggcgtgtgtacgacatggtcacggatgggtttgcaccccgtccaaaaatgttacctcttgccaatatgcgtactggatcggttttcgcctggcgggaagtgtgtactggccaaaagatagcgcggctctgttactgaattagagagcaacttgtttactaatattctaatatgcgggccagagaaggcaaataactagcacttatgaacc

SEQ ID NO: 4875 - DNA, 3522 bp, Emericella nidulans
caacatgcagccggatgagacggttcttctcggtctacaatcataggggactttgttatctcgcagcctcatcaatttgagagtctcgaatttgtacgtgaacgatccatggtcgaacacctaggccgcaaaaaatccgtatactgctcttcgtccggaatagtttattggcaagctatatcggctagtctgcacataaatgctatggtcacttccactggattcaagaacattgatcctcagaataaagctcaatgaaagggtcggccaaccagagagctgttcagagtgtaagcgcaaaactccgcgcttaagcgcgataaacccggttttggggtcgcgtatgatggacttcttgcctggttgtgggaaggaccgtatataaggtactatcgcatctgatgggaggtttgaaggattgtgattgtacgcgtccggctctaggaacacgcttgttgttagtgtaaggcatacctcgctatcggaattggcggacgttgtttgggcggtcgaggcctccattgcgtaaactgaaataaagcatgttcgaataagggaaagtgtgaatagcttgttgttggtccaaaatgaattgaatatattgctacttcgaacattcagataaatctcggcgacctgaaggctatagcttccgagtaagcgtcaaggtcacgagggcaacggcgtggtagaaacagatgcctctgcacaaggagactctgacatgggaacagaaaactaaaaggtttcaaaagatgtgtcaatccatttaagcctaagcgaagtattcgacaaaaatgcaatggtctattgttcaacaccgcggagttccctactacgaatatatatagtgcacctctgatacgagatagagctttcaacgcgatctagaaactgaaagggcgtatactaaaagataagcccaagcagagtcataaatgactatctcgccgacacaatagacaaaaaatagataatttgctacttgcacgaggaggttgtgttgtcgtgtggaagcatggaggagtctagtattcaggggtgcggatgcacaaggaagctaggctaaatactaatgagatgctgactaagactgtgcagaccgggcaccccaaggacaggggaggaacccatgctccgacaccccccctcgggctgcgcaggcgcaaggaagcatcaaaaggaaagctaggtacatgctgaatatcccatatagtttgtaaagggccttaatatagtctcaaaggatctataccccttttcccatgtccaatgtaatataatatcccttgtgtccttcctacaggtatctcggtcgaaaggtaggggtcttgcaatatagaactggctggcttgtgatgatatcatggtttgttggctgcattgattcaggctcgtacggcacggcaatactggctcgtcggcacggtcaattctggctcgttggcttcattgattcaggctcgtacggcacggcaatactggcttgtaggcttggtcgattctggcttgtcggcacggtcgattctggctcgttggctggttgaatttggaggctcgaacaatggtagttgatggacaagaccagtgaatgtcatgttaaaatctcccctttagtaatagcaggggcttgtcaggttatcccatgggtatcggaagttattctgtatagcaataataacaagaaaggacttccttagcatgagtttgatcaggataggcctcagcccagagcctgggaaaacacactatctctaggtaagaaggtgtaaattgcagcaacatggctgctagaagagtggcttggagccaatatataagcctctatagtagaaagctctcaatcttccaataggaagtaaaagtctagagcaaccatcaggaattacagctctgtagactatatacacctttatacttactgtgatggtgtatttcaacagtaaggagacatccttgcctagtatatactatataataagcagtactggccttccaaggttgtttttgatgcctcgtgaggctcttaatcggcatattaaaatgcctacgtggtcccaatccaggggttaaagccacgttgaaggatgctaccccccctcggacagggagggggtaaagaaacagatagcatgttgctcagagcttcgagaatcaattctgcatatttatatccagcaagaaactgaattctctcagcataaagggctcataacctgtggaagcatgaaggagtctggtattcaggggtgcggatgcacaaggaagctaggctaaatactaatgagatgctgactaagactgtgcagaccgggcaccccaaggacagggaggaacccatgctccgacatagatccgtaggagtggctgcctgttaggcagacactccgctaggcagcagggagatgagctgctgcaactataaatagctggaactctccatatagatcaatgaacacatttgtaccttaatccagagttacaacttaggcgaggggtcagcgtatgaattcaccaccaccaccaactgtacaaccctaccccttccttggtcttctctgagacaaggcctcaggcctcacgactatccggcttatctgtgttgtgaatcgaggctcaaccaagtgaacaatagagcttcgtatacggaatttattccggatacaatcggaatgattggaaatccatctgatgtttgtcttgtatataaaccctcaagtttccagatgagaatatgaacaatcaatcttcctcaaaatcacaacaatctgtcatcgtattaacggtcttgaccgacagcatgaaggccactatggcattggaggaagcttcgaaatgttgtgaatcgaggctcgactaagtaaacaatagagctttcgcatacggaatttattccggaatgacttcgaatcatttccaatcagtctgatactcactctgtgtataagccagggagtatccttgtacggaatgtagctacatcgactatttcgataaactagggacacggcgtgcataccactattttggtttgtcctagaaaagatttatccaagcgaaagtattatacattgccctactccatgctctgctcggctctggtggtttaatggctgaatccacattactgcagactggccctgaagaaggacgcagactgcctgctgccaaatcctccgaagggaaagcacaagacggagggagtatatacccgttaagaggcggggtatccaatgaacagaggcaggaaaggggtgaagtgaatatgcctaagcaggggatgtggggcggtgggatgttggaatagtaaacggagaggaagaacaaggaagccctattcctctccctgcagtgtgcatttgatttgcttctatccagcagatgttgtgctgtggcgtacgtggattatcacataaaaggactaagaaaggctaaggatacacgtagcactctctatcccttgttttcctgatctgtaccacacgtgaccggttgatgtcttgactctttagtatttacagg

SEQ ID NO: 4876 - DNA, 307 bp, Emericella nidulans
aatgcacaagttcagggaaaaaccaggggcagggctcctcgcggttcataacactattccgaagggcatctccttcccccaaacagacgggccaaacataaggggggtgttctaagaggttttgggctgatccaaatcttccgggctcgttactcttaaaagacatcgtaagccactattgggtctgcatcttatgtgtaacaaggacaaccctagcttgctggctatgctcagacttatgagaggtggtttggacactagcctggggaaagtggaacccgccgcttgtcatcaaagtggcaaccgt

SEQ ID NO: 4877 - DNA, 3093 bp, Emericella nidulans
  unsure (1)..(3093): unsure at all n locations
ctaatacgatagtcagcccctcgacgcaacttacagacttagggtcgactcactcgtagcggtcgatatcaggacatggtttgcaacggagttggcggtggatatacctctgcttcaaatcctgggtggagcgtcgatcgaagaattaacagctacagctgtggctaagcttccagcgggtgtgtttccgcgagtccaagtattgagggatgcagagacgcaatgattcgctttttcactctaaggtaatgggaaatggggagttctgaaagggacggaaatataaatcgaacggtggaatgttgatagaaataatggagatgtataatttctaatatggcgggactggtggtaaagacgctgacttctgggctctcctcgccaggtttcggtatcatcatgatataggagacattcctagccatattgtgttgtttaattcttattatataattcaatgataggtgtagacctaattgacgatgattctgtactgggcactgtataaacattcatcgagtctctctttcgacatcaggaagtcgttgagtgtccacctaactgcagatatgtcagttggatacttcctgataatatatcgctcgacttgactagaagggctgttgcgttagtgagtggctcaatggcgtagctgcatgaaattgccgatatgctttgggtgctctaagtctagactccatataatttagagctgcttcctcacatcttaccagaggcatcgaatacaattcatctcttaatagactgcagatcatgcagagccccagttcaggttgataccctacagggattatctgtacgaagtctattatgcctatatagagacttctctgcctcagatctgcttgaaagcctagtagagataccgagaagaagttaagcagacctacaagccagctagaaatgatttcagttgttaattattaagaatacagtgagatggcaggcgattggaactagtatcccacgccctgtttgagcaaggggctatgagccatgtccaaggttatcatgaaaatagatcttgtatccatacaagaggcaaccatgtctaacaactatcttcccaggttaaactagacaatgatattatcttaaaacttgtcagatggttatgagctgttccatccccattggcctactattcccgctgacagtttattcgagaagcaaagtctagattaaacccaagtttttttttaacccgcgaggcttgccctttccaagggccctttccaagcaattgccagcattcccaaagcaaggttgttcaaagccgatgccggaaaagtaaatgccggagtcaaggtggaaagtggctgcggcagcaaaactagagtagctgccgatcatattcgacaggcaaactagtaggagagcaagagccaagattaatagagcaggcatctggagctcaacctttaagaagctctcagttgctgtcgacagcagcagagctgttgcatggctaatccttggcatatactggggccaggccggagacgtctgaaccagcattagagccatgaggtatagcaaatgacaaccctaggtgcaatcgaataggaacgagaaatatagtgcaactgtccgatgttggttgtaaggcgctcccgtcttggttgcatgaagatatcgtaccttgttactagtatctatcagggccattaaagcctactcttcccagcccctctaggtaaaatataaagacactccgcctcggctagaacctttccatcctcacccttgatattccccacgatcttccactttctctcctctttggcctccacaatcctgcccgaaaccaccaccgttcccggcgtcatcaccggcctaacaaacctggtattcaaatacgctgtgaccgggccctccatacctggctctccaccagcccgactcatactcagtatcagacccatgaactcgtccaacaatgtcgctacgatgccgccatgcagaatcccggggtaaccattgagatcagaaccaagggtgcagaagatgcgaacttcgttcgtcggtatggcgttccggtatagaggcgtggcgtttgatgataaaatgcggtattggaggaggcatgaggagatggtagagcgggagttgagcgttgtagagaagaggctgtcttctgtgctggctttgatctttcgagaggccactgggtgggtaacgaaggtgggatcgttcaggaggtcggatacccaaattattgaacgaaaggggtgatatcgtctgccattgtcatgcgaactgatgggatgcgaatggtgttgttgcctggcacaagttggctatgtgagaattggggtaaataagctcgcactctggggagccgaggcaccatgggggagtaggcacccgcgccgatcttctccgcatcttttctctatctacttttctccatctaccagtattgtatataatttattaatcgtttctgtcttacagatcacgaaatgaaagtagtgatctccagttttgggtttctgaatgcacatctgtagacttttaccgtattcggccgccaacaacccagcttttaccgctatgaacataggcaagagctgctacatactccatttcatactctaggatataggtagattccaccgcttatagttgaacttctgcccaacaggtttttggtaactttcacaagttttcaacttcaccttgttcgtaccccatgtcttgaccgggtacgttaaaggttagtccatggcaatctgcaatttccccgttctttttataacaagagcttgcagcacacaccatatccgtttagaaaaagaacattaccttttaggccggtaaaaggacctttccggggcgagtcctggcgttcgattacttgaaagggccacctttggtttcagattttcagagctttatgtccttccatgtacgcccgggaccagttttcgttgctttttcaccgaattatttttaagcccccaagagtttagttacgggggaataactaaccttattttttcacaagacaaaaaattgggttcgcagctttaatttttattgtgtttaagggggaagnttacaaaaaat

SEQ ID NO: 4878 - DNA, 3055 bp, Emericella nidulans
accgccgtgcagctgtccttgattaagaccctaatatgtgattcccattttcagtgcgtttgaatggtactccggttgtgcgaagtggatcaagtctcaaatcgaatccatgtccataagcattcaagagtcgcgacaatcaagccacgacattaaagtactccaatcgacgggtatcgtagcccaaggctgcattgttcggatatacctggcctctgtatgcgctaaatggtgttaaccggttgaccggccaaagctcggcggtggcgatactctattgtaagccggtttatctccatatcatactcagtactcttaatagagctgcctgcatgcagcaagtgaatatgaaccgtgatatgatattcacacatttacacctatagaaacatccgacgtcaatggcctcaaacaagggaataagctagatcagaaaggtacataggacagaaggaaagaagacaaacaaccaaatgctagaagcgaatgagactgaaacaattttagattccccgctgtcccgacctctagtgagcagccaacatcttcttgatctcggaaatagcccgggcagggttcagacccttggggcaggtccgtgtgcagttaaggatagtgtggcaacggtacacgctcatgctgttgtcaatggcgtgcttgcgctcggcggtcttctggtcacgcgaatcggccaaccatcggtaggactggaggaggatggcagggccgaggtactcctcgctgttccaccagtacgacgggcaggaggttgagcagcagaagcagagaatgcactcgtacagaccgtccagcttcttgcggtcctcggggctctggcggttctcaaggccctggaatggtcagtcatttcacaccttaaccgaatcgaaagtccttacatcttcggtcttggtatcgcgctgcaggtaaggcttgatcgacttgtactgcttgtagatctgggtcaaatcgggaacgagatccttgacgacgtaggtgtgtggcaacgggtagatgcgggattccttggtggcgtcagtaggaatacggcctgccattgttaactcctgctgcatatcaaggctgctatcgttctgacggccacgtacacaagcaagcaagggtgttgactccgtcgatgttcatcgcgcagctaccgcacataccctcacggcaactttgtcggaaggcacggtggggtcgatttcgttcttgatgcggatgaacgcgttcagcatcataggtccggtcttcttcaggtccaattcgtaggtatgcatctttcgcttctcggagggcaatcggggttcatcggtagacctgggtcttcttcatgtggggtagggggtccaacacatccagtcagtacccgacgcatgcgccagtgctgatgtcgaaatgcctctcgcgtgagcagactcgaccgtcgcatacgaacgagcaaaggtcgcaggacggaaaagcgaccttgaggaggcgacaaggcgcgaagttgtgcgaagagaggccatcgtaactttttccttcaatccgattcacaagggatgaactcaatgaggggaaaccgaagtacagaggagagaccaaaagaaagaagagaggagaggatcgcagagacagcagcccgctacagtgattagcaaatgcagtgccaaagaagcgaggatcaagagagcaagaccgtcaatcgtcacgaagagtcgtttctgccaccaaaggtaacctcgggtctggcggtcggccctttgatgactcagcaacaagccaccaatcacggctaacctaataacaagcgtcgggcggacacggcaacccttgactagaagacatatccatgtctactgcgagcacggcaaatccatttgagcgatgctctctatcttgctaccacaagcagctgattacacgaattacgctgtatggacatggtcaatcgccgacaacctcctttcatcacagccgtagctccggttgaggctgaacggagagttccgagttgccgtccaccacttgccgacgtcatgtgatccggcctgaggcatgcaaagaggcaatggaaacctttaggcatcgacaggcatcaatttcaaattctttgtgcctaaggcattaatttgatatggagttaaggcaacaacgcaggcaccaaggctaaaaggcctcgcaactaaccctttacactgtcgacggaaatatctcggttaaatgcagccctatcgaccaagtccttgctcatcttcgtttctccactggagctccggaaggtctgcagcacagtgacatgacggcagttccgcaggctccatcggaatgacctccatggcctttgaccacttttcatcccctcattaatctccagctcatatagagcgtcggcagggagattgtatagctgggaccgcatatatggcttgcgcggcttgcgctgactggtattgttaccggattcgaattcctctagcacaatgcgctgcgtggatggaaaacccccatcctctgaggaagctacaccgttgcggtttcactctgagctcgaccttttgccaggaacgctaccggccaccgctccctctgtgactgacgcttctgagcgtgatgtcttcgacgatatggccagcttgaccctgggagaagagacctcgactgagactgggttcttgactgatgaagaatatgatattctggatgctagtgatcaggagtttttggatgccaactcttctcgttaataaatgatggcggtgatacttatgataaagaatgaaactgtggactctaggatttggtatttccgggataatagcgcggtcagggaaaggtgattcaagttgtttcttatctcacatgcactgccgaccaagctcggccgagtaagtgcatgctcatgcgctgtatctcacatcttctctcaaattggataccagcatgctgttccgtttctgcttgaagatgttcttcgttcacggaaattctcggtctgccctgggcggatcgcgtttcaaggccgggtgccagctaagctactattctctttcatgtctttcccaaggtacct

SEQ ID NO: 4879 - DNA, 6227 bp, Emericella nidulans
ccaacaccagtaaagcatatgcgcttgatgcatctttcatgagttatccctgaagcgtgcataaagacctgtttctttgcgccgatcgtgagtccgccccatacctctcacctcaactgctctgcttttcgcgataccccactactcccttcgaggtcaagtttagtatgtccgcgccactgtctacctatagacggggccatctcttcccttaacctcaaagctcgaagtcgtgcaatttgcaagacatatgttaacttgggggttcagtaattctttctgtaacatgcaacgccccaccagtgacccctctgctgacacccaaccacagatgactgcacttttctataatgattgtcaacgagcgccagatacatgatgtccaagaacaagatcaccatgggtagcacccgcgattcccactcttatgcggtcagttttctctagggacactaccacagctagttctaacacgggtttgcagtgtgatgaatgccgtttacgcaagtccagagtatttcattcctttagagttattttaccttggcatgagcctaaccggtagtagtgctctaaagagaaacctacttgcgcgcagtgcaagcagctggacaaagaatgcaaatatagcccaaagataacaagaagccctctaacacggcagtacgtctgcatctgaactgtcacccctcgactatcatcttctcttatgccggtattaactcttgcttcaggcacttgacgtatgtcgaagaccgcttgcaggcatttgaatccgccttaggacggctatttcccggtggcgatctggacgccacagtgcgttctttattgcaggatcaagatcccctctcgaaggagcgctcttcatccaagtcttcctctagacattccacgccggcaaagaccgaagcagatcggcatgagtcagcaccagaagctttgccccagcaagccgatgggtttgactgggctgagaaccggattaccctcggagacctgacagacgggatggcagccctgtcaatcaaaccggaaggcgcaggctactttggtattcgctctatccccactcgcttttccacttaatgctgatcatccttcctaggagcgtcttcaagcgttgtaccgcttcgggcattgcttaaacatgggttcgacctcaatataccgtccggatcgtccaaacgcgtggataattcggacagggttccactgaaatcgcagcttttgaacatcgcgccttctggtgttattgaacaagcattcatggatgcattcttcaacaactatcatatgagctatccatttgtgcatgaggccactttcagggcgcagttccacgagcagcttccccgacctcatggaccagcatggcaaattctgctcaacacaattctcgctctaggggcttggtgcatcggagacgacaattctgacctcgatatcacgttctaccaagaggccagaagcaggttacagcaaatgtctgtgtttgaagccggcaatctcactcttgtccaggctttgctattcttgagtaattacgctcagaaacggaataagccaaacacaggctggaatttcttgggtttagctgtcaggatgtcgatgagtctcggactacataaagagtttcacggatggaaaatcagccttttgcaacgcgaggtccgtagaagactgtggtggggcgtctatatcttcgatagtggcgctgcgaagacatttggccgtcctatccttctaccggaagatagcgttatggatgtaaagcatgttctcaacattcatgacgaagcgctcacctcgacgaccacggttgtgcctcccgaggttaatgagccaactttgtacacgggaatgcttgcgcaggctaaattccacatactcacaaacagtgtctaccaacgtcttatatccgggccgaaccccacaccagaggagacccttagccttcagaaaccgatggaggaatggtataatagtctacccgattatatcaaaaatccggctcccggttcaatgtcagacaatttcgctctagtccgcagtcgactattgtggcgggattggaacttgagaatcctcatttaccgcccgatccttctaagatgggcttcgaaacgatggacgccgaatacgcccaccgagccagaagacccttacgaggctgagtgccggatgctctgcttccgcaatgccaaactgactatatcctccatcaccgatttcgtgaacaattatccgtgcaccagggttggtgcatggtatatgctgtgcgttcccctattttaccaccaattaattctctagatgtgacctcaactaacactcgctccctcgctacagttacttcctcttccaagcaggtttaatcccaatcatcctcctgatgacagatccaactagcgcagaagccccaagctggattcaggagatcgaagcaactaaagccctactcatgtacccttcattgagcaacaacaaccttgccggtcgttgtctcgacgtaatatatcgactttgcgcccctgtatatccgtcaaacgccaccagctctgcgagtgcaccatcacagcagcctcagccgatctacatgccctttgcggaccaactttacaacgatcccaccttcggcagcctcttccctgatgttaatcaagacctgaacgtcagtgcagggatggacttctctgaatgggtgaattttgctccgacgccacataacgacttcacctgatatagcacagctcggcgatgatctcaactagctattctcaatcagagagaaacttttgaggatgtcgcatggcagtagccgtattaatggctaccatccactagttgatcgagcagcaacaccatcatacccttagctgggcaggcccctggtatgagtataaggctgtttcctctgtggcgcactccggggaagatacccttatcctgctaaacatcacatattatagcgcccggattaccaggacgggggcattgttttcagactatctatcaactccagtacagggccggtttataccgttagagccctataaaaatcatcctacactggcttgcccaagtcccaattaccttgaccttcatccatctattattcttcgctttgacaactgcaccggtgaattcctttctcttatatggaatctggtatataatgtacaacaatttagcaattcagatggttgatggccaaagtcaatcaagaatggactttcataggacatgaaattgtacgcgaatccatgtgaagtgtcaggaaagactttgaccagagatgatttttaaataaatctactagagacaagcagctcgagacatgaatcacacgtgaggctgtcattctacaaaatgcacgtagcctcgcactcttattattgaatcctttcggagcataagcaaggtttgaaccgcgctcacaccaatgcaacatggcactcgctaatagatgaaatgaatcggaaaaggcagacggtaaggcgagagaaacatgaaaggccccgcaaccagcgcaagatattccagtaattccagcagcgcaagacgtttccgcaacaataatcgtttcattatagcaggactactcatatacctggacctggtctcgtgcaattcgtatcatgtggtcataaacttcatatgtcatagaaagccggaatgggagctgccaaagtcatgataatatttccattgtattgggtcttcggttttatttgcgggactcattgggcgcccagtgcatcggttcaaaatccggattctggtaatgcgcgtggttgaacggggagctgctgtatattagaaaaatttttaaatgagaagacaggtgcctactttttaaacggtgcggtaactggcagcggaagtgaatgattcagattagatctcattgcaagcgaacttagccggatttgaggcccatcatctgtccgacgaggtaatgagctcatcatcggaggtggcggtccagataattggatctgtggttgcggagaggcgatcggcggcggtggtggaggcgtgtgcacaggagcatgatatacttcctgcggtggggagactcggtaagagtctgacggaggctgcggctgtggtggggggacccggtagtgatctggcggaggctgtggtggtgagactcgaaaaggatcggccggaggttgtgacattgaaggggcgagtggaaacgacgtgtccatcatcaggtttggtatggccatcaagctggaattcacatcaaatgagaggtcactggtatcccaagggccgtaattggatgatatggcgtattgcaagttgactaccggctgcatgtttacaatcggttccgctcggtaaagcaggtcgtaatggcctcttgtgtccccgtaagcagctgtggtcatgagaaacaaatgctctagggtggacttacggtcggtagagcaggcgaatggctccaactcctggcctcgtctgtgtgagcacatgtggggtcacagcatcaccttcactccgatcgaggtacaaaatttccacgactagtccagatccctcgatgactccgtcgaccaatgcttgcagacctatcccatcgatttcggtcttaaccgggtctatctgcgttgaacaataccggtcaatgggcatatccattggtaaaaaggccgaatagcgatgggcatttagttttatccatgcactggtcaagaactgtagtcaaaagacaagtcagtctcattgtaagccgcgtataatgacgcccaatctcaaggctgcccgtatggaaggaaaagccgtttgggctcactcaataggggtcactgactctgaaatggcagagaatcgtattcgaattatactcatcattgaacagcgcaacaaggaaggaatcgtcacgctcgccgcgttcgattgcattaagtatgctatcgaatacctcatctgtagcatcggcaaacataccgtacgtaatctcgtctagaccgacttggtcaaggagggtgttcagtgacttgaaccgtgcccgctcgcgttgtagttgaacaggatcacgaagactgaacagattctcaaagtacccaaaggcaacagctagacgaggtgagttttggtctccactggaaaggtgcagagattacctctccagccacaattgccatctcctttcatgatacgcgattgcggatgtgtaacagccagagcctaaaagaccgtcagcaacagttgattccgtcgtttattcctgaatctaagccatacactggtctttgtagcaaaggtgggatcggcattggcatagtccatcgcaattgcgttcgtcgactgtttggaagagacgagcggaccctattcgcggtgtcaactgggcacaagatcgacggccgagaccgggttgcttactggcagctctggttcgtacttgttggagagctcctggaaccgctccatctcttcgggcgacagcgggttcatgttgaagaaagcgggacggtgaccgtagagcgcgtttgacaattgagtgatctcgtgggaaagaaaagcagccggagcgtcagatggaggaaagtagccaggatattgttcttctctgagaggataatgattcaaaggatcaaagtggcttcttggaagatccgataaggacatcgcatagactgagattggagtgcccttctacgtgggtcgtttggacgtgcgtggttgatggggtgacagcgtcgggattcgggaaggagagccagaggtaccagttatcactcaaagcacatggttcatgaggccagtcttccagtcttccctcctgataacctctgtcgtctagcgatgcaggaagctgctggtacaatgccttagcatcacgggaaaagaacgtgcgtagtcaagctatcaagcgactgcaaatctatgaactggcaaatagtacgaaacctggaggtctagagtgtaatgagaacgaatctgagatgatgaaagagacaagagctggatacagaaaggaattggggaagcgagaagaagacagctgcagcttgctgggagcgcgatgagtatctagcatgtgacacgccgtccaacgagacttccccactttgatacaggagaacagagttaagaacagaagaaaggcgggctaacctggagcaaagtcaaggacaaaagacggtctggggattgacttggtaattagaataattgtaaccgtctaggcaagatctttagagcac

SEQ ID NO: 4880 - DNA, 6503 bp, Emericella nidulans
attcattaattattcttttatttgtctctgatttgtggctaggtaggtctatggttcatctaaatacaacttctgtactcctcaccaagaagcggtcgtggctttggttatgaaataagttattgcaaagctacaagtttacatagtccacacatctgtacttagaagggcatcgacatacttagcattgaacacggctaaggcatgccaacaggcaaaatgccagtgaagtgattatacttgtgctgcacgttggttgaaggagcatcaacgtaattcactatccgaaagtagagctaacgcagtacagttctcctcgcatactatgatgacttgacgctcccaagtcattaagaagcgaatctctccaactaactttgttttccgttgagatagaactgattttaccctccgcgagaaacttagtttttccatctttgtttagcctgcacctcgctccgcggtcatggagacagtgacgaggagttgcacatcaaggcttatttccgccctactgtggtgcgtcgtagacatcatacttgtatctggcatcgctgctgcgcttttcaggggcgtcgtagctgtcatacttgtatctggcatcgctgctgcgcttctcaggagcgtcgtagctgtcatacttgtatctggcatcgctgctgcgcttctcaggagcgtcgtagctgtcatacttgtatctggcatcgctgctgcgcttctcagggccgtcagagacgtcgtttttgaccgtagcgtcaatggaccttggtgtcctgggaagtgtcaacaaagtgaaagagagtatattataagacttctctcactcttccacaggggcagcagccactgccgcaattgtggaggcaaagacaaagagggcgtagagcttcatggtgaggtttacaggtggcgaagaccagatgaatagctaaaaggagtgacagtttgctgagtagtattgggcgtttggtattgaagtttggggtagctttagttgctggttctagtccgcggtagaagatataagggattatatagcttgccggtgttcaagaacagccctcaggccaaaatgggcgatgtcattagtacattcttccggccgcaatgagtttcaacaatatcccccgtgcgttttgtctactcaccgctccaagaacattagtctcgcgcttatatgcctggtggctgatcggtatgagggggtggaccagaagttgttatgcagtgcagtcgaggagggccgtgctttaggtatcaagagcagcaccagcggtgttgaacgaagatgagaaagcagcttaatagtattatgacggatatcaggaagatgcagaatcgattgatgttcacatagctcatgcctgtgttttcttttatccagtttatgggataaacatcaaggtatttccaaacaattgaggttgctaatgtagagtcagcgagcttttccgcccttagactggccttctaagagcagtaaatgtagtatgacagggataggaacggagtaccacgtgatacagtcttaagaaatgtagcatcagtctatacatggtttcagcattaattgtagatgatataaataggaatctgatccttttaacctagctatatattgtagtttgtaacatgagcaatattaagtaatctagcataatatattgtcttttgaaaagacataactataaattgttcaaaagacagaaatctttatataatccttcggcaagccagagcttgcatttctgatatccaaaataggaaatacgatatatgattagtggtcacttacggtcgacagaagatattcccacacaacagaacctgtgcagcctgtgcatggaaagaggaacattaacaaccggagaccgatcgtgtctccatttcggtgagacactacaacccatttcactgtcccatcaggtcacaaggtacccagtaaatatgttgcacaatcctcaaccttgcctagccgtggaatgcagctttttagatggagactattggagtatccgcgtcaatgcaagggtttgtacttctacttaccttttgacggcatgcacctgaagtgtctctccattcagtcaactcgctactccggaaacgaaacccgctacaaaagaaagcaagggacttgtctatctgctgagttgagaggcttgcacgcaacatagtagtaggctctgaccgcatgtcccatcgagaaccatttcagaagttttattgtagagatgacttatatttccttgttgtcacttcacgcttgtctgttgtcttcctgcattttgccttgtagcatcgcaagacgccatggatgccaaaaacgtcgtcacctacaaggcgatcaaaccacgatcaagctttaccagctcgtgttcaaccacaggcgaagattctgaaagcctcctagagagaaatgaagtgcttcgacggcgacatgtctggcgggagctaagcttatcgaactacatttgggtagtccatgctgtattcttcctattttcactctcattcttcctttcgggacttcagcagagatacccgacagaacaacagtgcgcggctcaactgtccgcttactgtaagtccccgcggtccgcgtcaaactttatagagccaaccccgtcttttactgctgagctctaacttttccttcctagcaccggccttggaagcagtggagtatgagactgtccgcttccaaggagcgttgctcgataaaaacccctacaaaggcgaaccgagtccagaactggacgctgcatgggacgagatcgtagacagtctgttgcctggacaccccatgacttctgaatagatggtctaacagatatctagtgagacaagtcaaggtcgatccaagcgatctggcgtatctgaaaaagccaccaacccaaaccaagctgcgcaccacggacagagactggtataccggtggcttggaagtattccatcaggtgcgtcgcaacggactgccctcccagatataaaattcaaacgaggcaatatgctaatttcgcagttacattgtgtaaatttggttcggcaatatacatactttgactattattcccgtcttgaaaatcgacctcttcctttcacggattccaatcatacccttcgcctgcacattggtaagtcgagatcctaccatttcggctccctgaccattctatcatttcttcattaacactttagaccactgcatcgacatgctccggcaggtagtgcaatgccatggagatgttggcatcgtgaccggcagctgggtcgaaggctttcctgatccgtatcccgattttagcacctggcataaatgccggaaattccagccgttgaaggactatacacaggaacatctcctcgaagagaaggtcgtgaaaacatcggaggatttaactcttcctaaaccaccctgcgagaatgctggtccccatgatatttgtccatagaggcattccttattcaccatgtgtgacatattgcaggtggacctgcctgggtataaagatccgctgcgaaccatgaacataataagttggcaggatgattctatagtgttgtggaatatgctcagaggagaaagggcaggaggaaactgcatcaactacaccaacgtagcctactaaggatcggatgccatatgacgattgaccctctatctgttgacgatagattccttcatttctgcccttgtgtgtattcctctctcccccactatatatatacagagggtaggaaccttctagaaacaggcgatgtccggtcaatctaccagagatcacgtggcctcatatttccgtatcaaagtatgattgattgttgtgttgttttgaagctatcgctaatgatatcatttattattctgcccgacgcccaaccgctttcctcttctggatcaggcaggagccagtcgatgccatacagcaacgctatacaacgaggttcatcctgggcaccgtgcccgggatgagctctgcctgggatgggccagcagatatgacggatacggcaacagtcagtgtcctccaacaatttcttgataccgttggtattgctcaacagcagcctcgctttgtacgatcaggccgtgttacagacacaaccttactggccgaagctcaatataagctccagcagtcccttcatccaaatctcgttattagggactgctgtctatatggtacaggtgcttctagccgaagaattgaggcattgtggcatcatataacccgtgatattgtatttcgatatagagtaagtgcttatatataccttttattactttgtacaaagggctgattaaggattaggagtacttccgtgaccttcaagatgaaggcaagttttctatggatcagctaagtgatcggatggctttatatgcaatctatatacctcttctcagagtccaaattccatcattcgtacgaacatggaaccataattcagttcggaattgttgcaattctgcgaagttcaattgatgtatgaagtatgattgattgttgtgttgttttgaagctatcgctagtgatatcatttgtcatgctgcccgacgaccgaccgcctgggtcacgggctatcatccaggccatgattgggatatggcaacacttacatttctattgcgaacgggtcgcccctggggacaaatgcaggcgactcatgagctgtgaactaccccattgacgcgcatacagcctcgtttcttggccgcgcttcatggagaaagcgccggttactttcagctccacaatcccgactaggaagctatgtcaaaacgatcgcagaacaactgcaccaacaggtaattgctaccagagccctctatgtttgtctatttgactggtgggttgagcgaagcagtgtcgtcgttgccatctactgatccgtttttcgttgagagcccatacgccaacacctcgggcgactggaactataccacactagagcaagggcgactacaattttaattacccgcgacccgattgagtgcaacttttacaagaggcgctgaagctatgtgcttctcattggcattcgctcatgaggcgaatcatgacacgtctgcgtagtcgtctatttgtccactaccacttcaaaaccccacaacatcacgcgacaccactccctcggccaaggctctcttacacgaccttccactctctgtttgacttcaatgtctcgattacattttcaaagttccaagtgccaattcccagtcggcatggagtggtaagagcatgatctctatttcagtacaatgtctgttatcatcaggaataatgacgttctctatactgttaaggtcaccctttctatccctaatttctatagcagcctacaaacccgttcagcagctccatagttcgagcgtgtgaagaccgaagcgagcgcacatcagcatggaattgacctgcgttgtgggacatcctgtgtcggggccatgtctatcagcagtgacttattgtggtcagtctttataaaatcaatgttagtgcgagtttagatattccatcaaaaggaccgatatacctggatgggtttgatggtggtttgcttcggggtgccggtgataacaaagttctagtcctattataatttgatagctttaattatttacagctgtctatgtgtacaaagccaaagcatttagtcatcaacaggcaaggtggccgagcggtctaaggcgcgcggttaaggtatctaattagaacctcctcttgatctatcaagtttccgcgtcattaatttggcgtgggttcgaatcccacccttgtcatattttttttttttctcacgggttttctaaatccgacttcactccaatccctaagagagagatttatatatcctgtgaccatagctctgcacaataccgctaaaaccattgcgttgttcattctttgaatgcagattgaaggaaaacctggcccaggtcaacttgggctggcggatatttttcacttcggctagtcgcggctgttttattcccaacctcaggcattctttcactttacaacacccggtcagccagccgctgtctcggttgcatccgcgtgagctgaatctagattgcatgattatcttatatactgaaccaacggtcattggtcgaatttgattgtcatggaagccagaaggcatttcaaggccccgcaattcgtcagagcgcacgtaccagcgtacttacaaggcttgtatcccttgccgggcaaaggaaggccaaatgtgacttgggcgaactttcagacctgttttccatcggccaccagtgcaatagtcgggcgagcatcccgattcgtgttaccgcgcaggggcttgaaaggcgaaaattcctgttggtgttcgtatccatactcttttctggtgttaacctctcctcttgcggtctctctctttctttttacaattgtcgttcttctcttctctttggtcgctcttcgtcccctcttccgtttcctcttcccttcattttttactctccttccttcttt

SEQ ID NO: 4881 - DNA, 5652 bp, Emericella nidulans
agcataccgaaatgggtggttgtggctgtggatctggaagcacctgcaactgcagcggtcccaacttgtgaacttgcggtcagaactgccaatgcatggagtgcggagtatgctccctgctggtgtacttaagaggtaccataatgctaacgggcgctgcaagtgatcgcacttgaaattctgttaacctcgttgcgtcttagtcgacctggggccgttctagaataaggctcacctatggctcgacggcctcgacaaggtctctaaagtgtggaatttgtaatctagtcgttataatcgagaaatcagatgaagatcatttaattttgaaattaatccaaatcaatatcctaaatcaataccctaaaccaataccctaaaccaataccctaaaccaatatcctaaaccaaaattctaaaataacaatattctttgatatctaaacgtgaagtagtagatccatctcttggtttatttcttaggttatgccgacttcccctcgactacaccctgacatgcttttaacgccccagtaatcgtgaacgaaatacacggcgagagcatatacataatctgtcttccgttagcatgcccacgattatctagcatccaccactccggaagacgtaggaaggtacataccgtcaacgtcttggcgatggtcatcttctgtgtctctgacgccttcgccaactctgcaagtccctggataaccagtgccggcggtcccgccggcatgagcatcatgctgaaccagaggattggatccgatctcagcagggtggttttcttcgcgaggccgtatataatagagatgctgaggctgtagggaataatcaggttagcatcatcttccacagaattggtgctattttggatgacgaaaatccactgacaagggaaggagtactcacgctggccaaataacaagccgtatcaaaaagatggtcagaatctccttccacccagggttactgctctgaccaccgctcccatcaccgtcgccatcaccattagcgtctttcttcatcttctcaaaactgacccctagctcgcagccaacgatgaaaatctgcaacgtcgtgaacagtttcccaatgttcttgatactcgaggtcagccatgcattgaagacgcctccatcctcgtagctattaaagaacgctttgtgcagttgcggaacaagaccaaggacgctgccgataagcgtgcatatgatcgcaatatcagccatgggcgtatcgggcttgaaaattttctgcccgacatatttcgggaagacgaagactgctttctttgtccagcgcctgatcttgccagaaacggtggaggtatcctggcgtttttggactcgtccatggctgttgagtagggggctttcctcgtctgctgtgtcagcataagggtcggaataacgcgcatcctcggcacgaccattatcagcttcgtccctctcgtcttgctcgctggtaagcattgttggcccgactatatagccgatggtcttgctgatgacgccgcaaagcaaaaaatagctctgcgctctagcaacagcatcagagatcgactcgccgtccttcacgatcaccttcaggctcccaacaccctcaagcgactgcaacaggagcaatggcaatgacgtcgtgttgttgaacgctgaggctggtgtcacccagtcaggaagtctgaggagcttcgacgccagccgcgcgagaagaatcgaaatggttgtgtaggtgattgaccagactaatgatggtcaattggatattcaagaatggatacgggggtgataccaaggacagggacatagttcagcgcattgtccagcttcaactgctcgcctagatgcacaagaattagggctggcaagaggactttgacgcctagactggagacatcgttgatggaggagcgctggatgagcccgaatttgcgagctgcgacgccgtaggctagggttaagaggacagacacgcaggcctgtagggcgcccaggaaggaggtcagtaggcttccctgagccatttcaaattacttttcttatcgcagtatatgcggttagacgacgcaaggtaacggagcacgcgagctcgatttaaacaaacgcctgttactgggtggcatcttgttgtatgtcgtcatgatggcgagggtcttggtatatggtctagatccacccgacttcaactgcacatttgcatagtgacttcagccaagtgcctgttcctgaactagcctatacagtgggcaacataaccactttcccccaagcacagctcgttcttctaggcgtcccgcccagacgctagctcgaagtctgtgtgcgcataaagtggcctcctggtgaaccttgtgtacatctctaattgacaggtgtggagttgcctaaacacactacagtaaactgggcaccggcctccgtgtctcatcttcgtctgtctgccgctctgcactgaaaagggtaccttcatggaggagaacataataactctcgagaatgttgattctcactaagtgggcgcagtgcctggcgacagtatatgcgccaggctgtgcgcacgtgactgacctcgcctaacctttttgatacgaatatatcatgttgagcctcgtgtcacgtgccacgtgatctgtatggcatgatctctggcccctggcctgatccctcgaggagttgtacattgaagaagtgacaactatcgtcatcaagatagagaatcaatcgtcatatggcatcctatccttagtaggctacgttcgtgtagttgatgcagcttccttctaccctttcccctttgagcattcataacacttttattgtcgagcgcgtttacagagtttcttacagagcatcttggtcccatcctttacaaatgattctatctttgtaccaagtcgagggatcaggcaatgattaatgctttatctcacggtctgacaacaaggtctttcatgatgatagcatggctgctacttcattttaccggaaacatgatgagagtgaggatgaatgtggcgcatgctgttagtgcttggacacgatcacagccttgcagctagtagcctcattgcccccgcgtcagcaaccaggcaatcctgccttatctcagattttctgctcttaaaagtccccgcaacattgcccgtcatatatgttctctcctactcaccaacaatctacgctgccggtgtaaaatcatcaaccgaaattggcaatcctaccaaagccagatagacatcctgcaggagatggatagccagaatgtttcgtatgaagagcaggctggatcagacttgtttccccatgcgaagcgacagaagacttcccactataacagcttgtccactctacaacacgatgattacaccattgcttggatatgcgcgctttctatagagatggcggcagctcgggccatgctggataaggttcaccgagacttgcatatgtctgaaggcgatagcaatacttatacactaggaagaattgctcagcacaatgttgttattgcttgcctgccagcagaacagtatggaacaaacaatgcggccagtattatgacgaacatgaagcgaacgtttccacgaatccgcgctggattgattgttgggattggcggtggcgttccaggcaaggctgatgtgcgtctgggtgatattgttgtcggaacaagggtgatgcaatatgatcttgggaaaatggtgggagatgggcagctccaccggacagcatttccaaggatcccccaccagctgcttggaacagctgtgtccagcctccgggcaaagcacgagctagaaccgagtcgagtttcatccattttacggcagaaactcggggcaaactttgaatacaatcgtccaagcttaccagatcttctatacgaagcgacctacaaccatgcgtcgccagcagctggctgtgatgcatgtgaccattcaaagcttgtaccgcggaggaaacgggccacggacgatgtggtaattcactatggcgccattgcttcagggaaccaagtcatgaaaactgctattatccgggataggattgctcagcaactggacgtcatatgctttgaaatggaggctgctggtttgatggatattctcccttgtcttccaattcgtggcatttgcgactacgcggattctcacaagagtgatggatggcagagatatgccgctgctgtagctgcagcatacgcaagagaattacttgaggagctacctgtggcaacatctgcgagaagtgactacacgcctgatgacggtaagttaactacggcttgagatgacatcaaattccggcactaacacctgacgtataggtcgatgctcaacacatggaatgcaacatgaacgccgacggcgcttgcttgactctctcaaattcgaccagatcgattctcgtaaatctactattaagactgagcacgctaaaacatgccgatggttccttagccatcctgactatcaagcatggctcgatcctgaacaattggagcaaaatcatggctttttatggataagtggcaagcctggtgctggcaagtcaacaatcatgaaatttgcatacttgaacatgaaaaagaaagcccgccgcatgcatgccgttactgcctcctttttttttttcaacgctcgaggagaactcttggaaaaatcgatcctgggaatgtaccgatcattgctactccaactgctagaagggtatcctgatctccaggcagtgttggatgatgtcgacctagttcctccaaatcagaatgactgcccttctttgaattctctaaaaggcctcttttgcaacgcaatcactgcccttggtcagcgcccatttacatgctttgttgatgctcttgatgagtgtgatgagcaacaggttgcggatatggtactttactttgaagatttagcggagaaatctacagcgaatggagtgcccctaaggatctgcttttccagtcgacattatccatatatcgctattcgacgggggattcggcatacactagaagatcagccgggccatgctaaagatatggaaacctacgtcagtagccgcctgcaaattggggagccagcgcttagagaggaactgcaaccccaacttctctcgaaagctgctggcgtcttcatgtgggttgtcttggttgttgatattctcaacagagaataccgaaggggaggactggctctgaggaaacgactcgcagaaataccaggtgatttaagcgaattgttcagagacatcctgagacgtgataatgagaatatggaagatcttctgctttgcattctctggattctatacgcaaaccgacccttgcaaccaaaggagttctaccatgccctgtggtctggcttgactttgaagggtttagtcgatccttaaatcccagatgtcagttttcgagatgacagtgatgctatatataacaaatgtgtcatcagctcctcgaaaggccttgctgagataacaaaatctcagaagccaacaattcaatttatccatgaatctgtccgagactttcttatcaaggaaaacggtttgcgtgaattgtggcctggccttggaacagactttgaaagccaaaggcatgagacactgaaataatcttgcagcttatacatgactcatattttag

SEQ ID NO: 4882 - DNA, 5049 bp, Emericella nidulans
caaaagtgcactctagaggatttggcgggacaggaaaaggatgaaagatgacctgttataatcaaagtgagcgtgaggtcatgtcgccctagtcaagaagatattttacaatgactaaacatagctggcttcttccgcctggggcaagtagttaacaagctttaacatctgggggcataccagactgcccaggctagtgccatactgggcctaaaatcccgatgaaagttcactggttagaattatcctcgaattcttattggataatcgtagctccttagtggctagggctccacctagtagagcgaccgtccctggctagtgttgtgcagtctggatttggactcaacttcacttctccctgttcttggatcttcaacggcttcagttttgtctggcatggggcgtcatcgcacggttcggcacatgtgggtataaattaaccactatatacgtcgtcagtatagcgtacatacgcgctttaggctaccatggatagcaatgtttcagagctagtcgagagactagggagtgaagaggatgcagtgcgcaagatggctgtattcaaactccagagcagcattggagacccttcgtttgcagacgtattcatcgcagaagatgggctgacaaggctccgttacttgactctgcatgcgactgggaatactttggcatatagcttaacgagttttgccagactgttagaggttgataagggatgggaatgcgttgatcacgagttggttgaaagggtatgttctatgtctcagccctttcccacttactaacatgaatatctcttggctgaataggttgttgaactcatcgtaacgcaccccttagtgaacattttgcgaggcgcaatgtctatactcgtctccatcgtttcgcatccttcctctgtcggtcgcttgtcgcaaaatgctgtatggggattccgcgcgctgaagcctgcaattgcgatctatccccagttcctagaaatgcttgtcaacaggctttcttcagccgatcacgcgctttgtgcaaatgctttgcaattgatcaactcattgatgcgcgattccataacgaatgactcggatcatgaatggccgaaattcatccaaaaactgcaggatctcggagttatcaaggccgtctattccttgatgcaaggcacggcgttacaggaccacgcgcaccctttaatcgaattccaatcacttacgaagatcctcctgcgcaaatggcgagatactgctttggacctcgaaaatccagagcataggagagctcttaagggcattcatcttgctagtagtcaagagaaggggaatgaaaccggcgccgatatgcgacggtcgaagaaacacagccccgaaaaatggcggcggctcggattcgaatcagagagtccagtcgcacaatttgaagatatggggtttttgggcatgatggacctggcggactacgtccgaaatcaccaagacgaatttcaaaagatgcttcttgaacagtcgacaaagccagcccggcagcgatgtccgattgcgcgcgcttcgctatccgttacatctatattatacgatcattttgaggttgacaaatgcgagactgaagatagcaaaacctacttgatacttgagtcttgttctaacttggattaaactattcaacccctactgtacactggacccggctacatgtggccggattacatagcttttttcgtttgtggaagtcgacgagtgcagaactggaagactacgacaaaatcgtggagctggttcgtatactcatcgagtcagttgttggaggtgcggcccgaacgaaagacgtacaggatgtggaggaagacttgatggagtttgaatacagccgacttcgagacctacaaatggaattactggaacttacttacgaggacgcttgggggcaacatctacgacaggtgcgcgaagagttacagcacgaggccgcccaattcgtcaaggagcaaagaatccggtgcctgttacaaggtgcttggttcccaaacgagaatatatctgagttggaaggggaatcgggtagtcccaagtggagatatgttcaactttctcacaatcggaggatcctccattttggagatttcgagagcatggaaatgaaccgtctggatctcgacgtgcttcccggaaaaagtgaggtacccttacaacccgcaatattcgagcttctggctaactagatgtcagtcgatttatctacagtatcgtcggtagtttctaacgtatcagcgtcctccgacaacacttcctctgctactgccaaaagcgtgcctcatcaacgcgtttcgtctacgaaaattaccattcacggctacgtctcccctgctggagtttcaaatgacaataaaaaaagtagtggtcattctcgcaatgctagtagggcaactcagaaagaggctataatcttaacccttcgcccagtgtcgcccagtgtcgcgtctgaatggctagacggcttgctcatgctcctgaaccaacaaccaatcactgccgaaacaagcaagctgatcaaactcataagtgattatggacttaaaatccgtttgctcaatgtccgatttgacgatgcagtcttcgcaggcgaggcccctgccgttccctcacgagagggactaactgatgattattactatgatatattcggtggatcatagccgccagcagcaataccgcagtggaacttcccaagctctgtagtcataattataagggaggcacatcgcaacatcgctgtctgtacataataccctgatgcgtctagtttaacttcaggcgcaacttaaatgtctgaaggtataattgtgtacctcaagtacgataataataagaaagttgcgccatgatagttaatggttcaaagcttgtatggcagcagggaattgttcgatgcattttgcggcagcagtggtttacaacctgtggctcttaaagtgtctccaccaaagtacagtaattattgtgggtctaccccgtctactaagtaacaggaaggatcgcggccacaacttatcaaaaaatgccagggctcggcagcgaagcgctaaatcttgcatattcatcatcttcaaacagataatcttccttggcttctcatgagaaaccataagacacaacaactgagcgatacaacagtgtgcggattacttcagagcgcgagcgagccgaattattcgcaccggcgatggccaaactctcagatgccaggtagcgcagggacggcagatgtggatgataacgaagactcgatcgaagatgattatgactcatatgacgacttatttacccaacatttcaccgacgaaaaactctctcacctcgacgggataaaagtcgcgccccggccgcaaaacagagccatctctccaataggcaatgcaaaagaccagactgcgaaaaacgccaaacatttcttctggaaatcagtatctccttcaaataatgagttaccgaaccccaccccgtcggaaaaatgggccttgccttgggcacaactatatgctcccctcaacttggatgaactggcagttcacaaacgtaaggttggcgatgtcgaacgatggctgagcgatgcgctcgaagggaaaactctaaaggtacgtactaataaggcttcattgccagtaccttcaaaataaaaacactacgttcttgattgctgatcaaattagaatttactcattctcagaggaccggcgggaagtgggaaaaccaccaccatctcactactatccaagaagttaagatttgatgtcctggagtggaaaactccttcaaccgtcacgtactcctccaaagattatgtttcattcggggcccaatttgatggatttctgagccgtagtcatatatttggcagcctaaccttggacggtcaccatagctcacaggtccctctgaacaacgaccacgctagtcagcggcgtgtcatcctcattgaagaatttccaacgatggctgcacggaatactacagttttggcttctttccggctgtcaattctacgatatctctccttgaatgggccacatggtggaaacacgtacggtagagaagtaagggtaccgcctatcgtcatggttgtgtctgaaactttttcaagcacggagtcctcattcaataatctgacaacccatcaattacttggtcgcgagctctacaaccatccagataccactatcatcgagttcaacagcattgcgccgacattcatgcacaaagctctaaacctcgtcttgaaaaaaagctcctgtcagccctgcggcaatcaaacgctgactcagtccattattgagaacatttctaagattggagatatccggaatgcgatcgcgtcattggaattcatttgtctaggtaatggcaataaaggctactggagcgatcccactgtcaaaactaggcgtacagctcgaactcgcatgaagaataccgctgttggaagtgagatgcgggaggaaatagcgcaaagagaagcaagtctaggactattccatgcagtcggcaaaatcatttacaacaagcgaagtgatgcatctgatgccgaacacgtgcagttgccctctcctccagatcacctccgtgaccatgaccggccgacagtctctatggtacatgttaatgaactgttagatgagacgggcaccgacatccaattgttcattggcacgttacatgagaattatgttccatcttgcaatggttcttcgttcaccgaatgcttggaaggttgcataggattcttatcggacagcgatatgctttgctatgaccgaaaggatcgtagcaagttccaagctggtcttgggattggtaccgtaaaaatcgaaactggtggcgttgatgtactgcggcaagaagagataagctaccaagtagctgcgcgcggcctactcttctctcttccttatcccgtgagaaggcagttgtcatacgccagaaacataaaacaggcgggtgactctcacaaggttttctttcctcccgtcatccggcttgttcgtcagctccaggaaat

SEQ ID NO: 4883 - DNA, 7110 bp, Emericella nidulans
  unsure (1)..(7110): unsure at all n locations
ccagtatgtttatgggaccggatcacgaactccgcgagtggtttggaaagaagactgcagaggttctatgttatttgagttaggtctatgaataatgcagtgatacccagttgttccgagcttcagaaaacagttgtatttacattcaataaccaggcagtagatgctctcctaatgataccctaaaagaggtgcaatgtaagacgtcaagattcgtgaattatctaatatgccgataatattataagctagtccacctgaacagtcgtttataatgtagcagtcgggaaatagtagttatcccataggtattcgtaatcctcaatgatgcttcccacgagatcaagaagtggttttcctctcatcttatccgtgagtcctctcaatgtagacctactaatgtcagcataatgcttcccatctgttaaagagttacgaacctcgtgatgttctcataaaaggctccccgcatcaaccaccagcccatcgaccagcctctcttcttcagctcctctctctcgaggccggtcagtccgcggaggccaccagcgactctctctcgaaagtcggccttggctaattgccgtgagccgtattccatcccaaagccgatcaaccagggcctccagcttcgcttatcgctaccccatttttggagcgcaagtgcatagataaccggccgaatgatgtgaagaacttctgctaattgaccttgacctgtgactctgtgcaaaagcgcttttgggggtttgatgtcatctgccgtcaagaccttggatataagataattcgaaacatcgttgacgtcgggcaaagaaggtagtgaaagcccagtacgaggcatgttccaacttaaatccgagagccgttcgctgaccggggactccattccgttccaatcgctgtcatcttcttctaatgacctgggatctatttcacgctcaggtagcggtgggctgacaagggggcgcgagttcgtaaggcgtagtaggaaaagtcgacagatcgccttgacgacctcaataaagacgacaacacgccaacggaccttctcgccacggcgtcgtgcaagcatctcccataatagctccgtatattgaatagtttggagagtgagagcgacttttttatatagaggcgattgtgatgaccagtacttagtatagcgcgtgtgcggagtagagtttggtcgacgaattgttggcggtaggttagatatgacccttgatatcaaacgatcatgatataacgacagtagctgtactcctgagtggactgaactcccttgactagatgcgcgctgttaaaggttgacgcagaacagcttaccacattctgaaggtatctctgaatcgcgatagcgtcctagcgatgtgagtttcattcttgaacaagcggaagacataaagaagctaacctggtatgatgtatgttagcgacctcagcgcagactcaacctgtcctactgagctcgcattctttgtcaagaagtcttcgtatagcggcaaccacttagagggctgtaggaggacggcaggaaccgggcttctaaacttcgaagcggcgtccatgcttgaatgagcgagggtacatttaaagcagctgagcttagagtagaaatgaaagcgatggacaaatgtttcggtcacttggtaggatgttgccaacaggagatgagatgtggatgggagcgacagcacgtgtcatacgccaaggaatgatgaaagccgaggtaggcacgggctatggtctgttacacctctccgcagatgcaaaggtgatcctcgaacctgagcttgtacgacggcaacgcttgtcgatgaaaattactgatatcttgaaggctggctgctaattatgtaccgtcaaatcaagcctgatcgctatgactggatgctgtccttcccatagtctatcgccgatttctgttacgtatctctagtataatagctgcagctgagacacaagagacattgtcggtcactcatctgcgaacttccacagtccacctgggcgcatagcttctctatagcgctcctgcactttctccctttccagtctgcccgcctcctcgcggtcctcttccagttcctgtgtaccaggcatctctgtacgccagaacccagggggcgttcccgacctgtgatgttgatgcctatgctttccgaatcggttggcaaagaccctggtctttgcttcgactaaaaggctatcacggatcttagagttgagtgtgtctattttactcatgtcctccccaaggtattcttccagaatttcacggtcacttgttgcttttccaggtatatcaagagggatgccgaaacgcgccatggcggagaacttctccccgcaacaaccgggacgcgtgcagccactggcgtgtttgcgctcgtctcttttccggacaacctcgtcataggcataatttagaccattgttgtagtctgggtttattctgaaatcttcaagaccaagttggtgaggcggccgggctctgcaaggcttttcgttggggatcgtttcattttggctcgaacatcccgactgaggctgtaatttacccgaattattctctgcgcgccttgtcttcggatgacgtcttggggagtccgaagttgctagtgttgtggtggacatagcatttgcttcgctactagtcgtcttgaggttgcctctcacgcttttatgtgacgggcggcctggagtggttgcagaagcgttcgtagtcgacttggtctgcaatgttgggcttgttggcggtgctccttcgaggatgttcgatagccggagtactctagacgacgctcgcgcctttgtatcactttggggtgacctcataaatctcctccacggtagcggccgagtttcgtcaccatcttccgcaaacgaagatatcctcgttgaggaacctaagttttctgtccgcttcttatttgccatctggccagcgcttaggttccgcaaattgccgtcgacgggctgaagtacattcgacgcaatactattcgccctagctgtacgattgcggagcggtgcatgtcgccccgacgctaatctcgaggtagttggggagttctctgaagtgatatagtaatcttgatcactgtagaaccggatcttcttcgtgggggtaacgatagtgccaccaatatcgtccagatcttgggttccagacggtcctggctgaggagattgagtcattagagggctagatgatagagtctcactcttgaccagaataggttgcagcgaatcgcccttgcctaagcttccagatagtggattgcttttttgttctgactgctccggagcggcgcgctttcgtttcaaagtttcaaccatcacatttgaaccattaccacctatagccggtaactcgtctgtcgaagcatctgatggcgtggacagtaattcttggtgtctctcttgcagtcgaatttcgcttgcaccatcgcacacgtcctttgtactcctgcagctttgattcccagtcttctcaaatgtagggctgagggggcttccggatggcgctcttttttttggagccctggctgggtcatttagtaaattagctgtgggcctttggagttcaggtctttccaacagattcactggtattgcaaaacctcggtagggttcagaagcctttccataagcacggtggtaggctcttgacgtttaaataacgctttcaggcgtgcaacctcggttttgtggcgtttgactagacctttaagtttcnccgacgcttggacgattatcgtggcttgctggtatagttcggtatatctatcacttatccttctcagatccgtagcgtcaagttcagagagtgccttattcccaaggacatgccctggttcgtatgtctcatctaatcgaagtgcactttcggcggccgtttcagtctcctttgtgagggcctcatcttgtcttagttgctcttgtagtagtgaaatctcttgctttagcttctgaacttcggccgccgccttctggtgagcctgttcagctttttcagttctttcctcggcatccttgacgcgcgcgttgtacgtggcgagctctgccttaagaccagtgtaagcagtatcgaaactatgtctcgtatattgagtaagggacaaatgaagttgctgtaagatgtccattggaagcgctggtcaccaaagaagacaacaccaagtgcttggtgagtcgagatctagaatacaggacgagagtggctgatgacataacgcgtaacccaagattacggcacccctttatcgataagcacacattccaccatgatcatcgcggaccaccgacttcactttgcattactgtgatggactatggacatcacaaaatgcccaaaagacatcatgacgagttatcctactcaccaccgccaaaacgattgcgtgtagctgaagaagcgcgacaggtcgatcacctgtcttctctaagcgacgaaatcctgctccatattctttctttcctgccaataccggcacttctgacttgtcaaaggtctgaacgtctcccagcgttgccgtcgtggaagtttaactcacactgtgctctagtctgtctcgccggttctatgctcttaccctagattctgagctttggaagcggcaatatttttcaaaatgggtacggcctcgagcaagacgattagcaagttcccgacgcacttctttccctccatcaaaccttgaatattctccgagggtctcgacatggctggaccatggtcacctgaataaggaggagggagctacaaattggaagcgacagtatcagctcaggcataactggtccaaaggcacttgccgagtgaccgaggtccagatatcgcagccccctaagccgccaatgttggtcacactctgtgcaggctatatttttacagcggattcgcacgagggactccgagtgtggtctgtggagaggccgaacacttgtaaagcagtccttggttttgagggccctgagtcgcgatcctcgtcctccccgactgcactcactgcaacttgcggtcccgagaagaactgtgtagaagttgctgtagggttttacgatggcgtactcagcatatacaaattggatatgatgagtctgcgattgagtatgcgattctctggcactagatgcattcaaggtgccataacagccatggccgcttcatacccatancctcatggtcgtttcaaagcacatgatgctgtcgctatataaattaccgctcgaaacccatgcttcgagctgggaagacgagacgcatcttattgcctccttaaaggcgggtagcatactcgcgccaatgtcgctttctgttcgccttgcgggaccagatataatcgcctcaatagtctacagtctcctccacattggctgcagctggtcactaggtatccagggagttgcactttaatgacaatggccagcaggttaaatcacgactcaccacaaccgtggatacgcagtatggcgtgagtttacatcgcttgtctggctcaacacaaagacaaatttctggcccggctatgcctactatattgcataaagatccaccaacctcaatttcttactcccacccatatctcttgacgtcgcatgcggataatacactaaccgtatttcttgttgtgtcgacttcaagcaatttatttgtcagggggggacagaggctatggggccacacctcgtctgtttcggccgtgcaaataagcgaccgaggaaaagccgtttccgtgagtgcgcacggagatgaagtccggatatgggagcttgaatccttggtgtcatcctttggcagtcaaagagtcttccgcggcgacaatagcattaaaatcaaacccgaaaatcaacagcgcccacgggaccccaagggcttagggttactccatggagtgcctcaccgtgatcaaggccgggcagactcgccgcctgcaaaaatgccgcataaaaagattcaagcgcgagattgcgttggatttgatgatgaacgactgctcctgcttcgagagagagaacatgggtcacaacttctcgaactctacgacttcagatgacccctttcccacaacacgtgctaagagaaggctgggccttgttgaacttttacattttataaaattgtctagataccactccatagtaacgccagtctgtctttaccaatcatttggattattttatcgaacaatgactgaaccagaaggtcgacggatcttggatggcctggggaccttgggacggtcggttagaaaaccctcacggcttcgcatcgaacgcccactaataaatctgtttctgtttctgactgaagcctcccttcaacctcgctgatatttgtggaatctggctctttggttcttggttacgggacaaatgtccgtcgctatgcgtgccgtcactagctgatcaactataccactatgccaacgccagaaatcatcagaaaccaaagctcgcgtcggctgacaccgctcttctacaggtagcagcattcgaaccatgcccaaaacctcttaatacgccagttcgagcaactaaaccttacacttaggtaattcctgagataatatacatgctggcatccatttacttgtttgctcttggtaaagcggcgttaacggcgttggccttccgagttccgtgcgaggaagcgacaaagcctgagaaaaggaaagagtgatgaagatgagaacgaaaccgctgggaccggagaaataaagactcggtctcttttgatgtgatagttgttagagcctggaggccaaggcgttattctcttgaggaactcaggaacggggctgcgcctagaaagccccccgcaccgagtcgattatctccccgtttatctgcagtcaaagattctttccgcccctgcaaatctctaaatttctgcttgaattttttgcccctccaacaaactcgctctctcattcataaaaacgtctttcttcaatttcaaatccttataccaattttcaaaatgagctttggaggtcgtgtttgctttaactgtgagttccgatgaaaaatttgataggcgacatgcattggcacccaagtctatcccgctgcatttttttttcccacacaggatgttca

SEQ ID NO: 4884 - DNA, 7020 bp, Emericella nidulans
tctacatagctgggtgaggttttcgaacctctgtgggtgaagaactgagagaccggagtctcgcttcgtattcaagacgaggcttggtagacgccttagaattgtcttgctacaagtcgtaaggtgtattgttggcagaagaattctccgcaattgtcgaggcagatccattcggagcattgacgtccaccacgcgcatctgacctgctggcgtagcgaacgcagacatacgggaattgtccataatacgattctgcggtctatgagacagattctgatgttgatgataaggatgttgtgggtttgcccaaggtgtctgttcaaggaaggcttcctcggcggatgtggggtgaacatttgatgacatgcttggtatggtggctcggggtattgttgactgatgatgagacgcaggagctttcgtttcaaaagatatctgcgttaacagttgggattagtctgccagccttcctgaaagtcttagagaaaactaagttaaaacttacgcccatcttttccaggtcctcgtcaagctccgctggccgcgcggatgatagcgatggggcggccggaaaaccaacatatttcgcaactcccgccaatacggacacctcttgattgtatgcagtttgatgcgcgatctgttgggaacggcgtgtcgggaacggaatgtaatgttgagggctcactttgtccgtcttgaaacgatcatgctgaatcgagtagaattgcttgctaatagcactcgagtgatgttcacgaatatcgcgggcccgttgaaagtacgtgctatgtgcctgggcacgctcggcttggcttttgttgagcaaggacttaaggcgatactggaacaaagtgtgttcgtacttgatcttagcgtcgcgataccctttgatacaatcaagttgtcgcagaagctctggatgtgtcggattaggacctttgagcatatccaattcacggttcaacttggatatcctttcgtcataaatcctgaaaaaataaccttgtcagcacgacgttcggcggttctcgatacgaagtagaaccatacttgtcacggagagttgcgaattctcgctccaagaccgccagagagtccatagccgatgttcttttggctgctgcgtgtaacgcgattagttgtgttttagtaggcgcattgaaatgacttacattcttcttctagtttggcggcagcctcaccatcatcagcatcgtctggacggtccgccgcatcctcgtccgcaggtgtatcatcaacctccgcacccatttcaacggcgccgctctcagcatcatcgtcaacgtctctagttttgcgtcctttccgtttaccctttctggttctcttgcttttcgtcggagctgaaggtaggtcagattcaggaatatcatcggccaaggtatcctcctgattaactttgggtacttcttcctcaaccggctccggagtaagggccaagtctggaggtgggtcactaaggtcgcttttgactgagccacgacgcttgtgcggcgggaatcatcttcatcgagctcggagatcaattcatctccggactcagggcgttttcttttcttcccagcgctatcagacaagttggagtcatcaggttcctgaacttcctcgacgctatctacggtacgatcatttttcgagcgaggtttgcttggcgactcatctgccggatgaacgtcgtcctcctccacgtcgtcgtaagtggtcgaatgaactaatttgctgggactgggaccataactggttgcgcttagcacgatatttgtccgggtgcggtagttgttcggagagtcgtcgatgcgctctgtttctgcctctgaatcgttctctgtagcaatcttctctggctttggcgactcgtaatcagacggcatgttttctagcacatcatcaatttcgctaagactgctcgatcgtccgtcatcgagtaacgaatcctggtaaaacaggttttgatcgccattgacgacggtttcgtcggtgccgttaggcgcaccaaccgtagtaggctctctggtttctgctacctccatagggaacaatgcggtcgttttcgcgagatcctatatcaacgtgggtataagagaagtgaaactcggttggtgttttgcggagatgtgctgaagtgcttgtgagggaagaggcgggcggaggggaagatcctaatgcgcggccccaacctaaatcaatcagagaaaaaggtcagtaagaatgttattatgatggctaaattgaagaaacaggacttcagtataataggagagcaaaaaaggacgcggagagcgggagggagcgttttggggggggggactccagcaaaggcggtgcggagattgatcacatcccagaaacgggttcatcgtcgacaggacgtagatcgccagccaggcccaacgacgccgccacaggtctccgttgtagagctgctccatgtgatgtcgctgagggtatgcatcatgaaaaagcaaggatgtaagagctgaatcacgtaccatccaacaatgcgctattagtaaacttgtgctgtacccagcttgccgcgactgagcacgacactccctagaaccacggtcgcggagttaatggcacaagtacgcaaatccacaggtggtacttgagcgtatgtgtatataagttatcaagtacgcaaggagcacggcggtcgaaaagtatcgaagagttcgaggagggaagggcgccgatggagaggacgggcgctttcaggaagcaggcagtacaacagtgcagcgcagcaggagaatggaccgcatggaaatcgaagcgattagatagcaaggccaaaatagaccaataagcagcaagaagaacgaaggatgggagcaaagttggtcgaaacaaaggtcagaagaggaggctgcaagcaatggtggtgctgtgctctgcagacaacggaagaggaggagagcgaagaactgcgctcaagcggatcgcgagtggccgctaattgccggcgttattcccgcacgcacacaccgcctaaaaggcgataatgtcatcgcacttgaaggaaagctgaaatgagctcaatcgactcagactactccatattctacggcctatcacagtatctatggaaactgtcattctttcctctagcacttttgaacctagagtcagagagctgttctgtccgcagccgcgtcctgaaggcggtgtattctgtgactaatcagcgccgaggagtaaaggcggtatggagaaaaagacgagcaaagatttctagataatatcgcgcattaacatgcactgcggaattttcttctagcctttgttttttttttctcttggatatctggcctgatcgggaatctcgcattgtgtctactcaaaattccaaatgggcaagaagtctaagtcacaaaaggaggcgcctgcgacagagagcgcaggctcgctgcctttcttgggcggaaatgtctccgtggatccttcattggcttcactgtttgaacaaagtgtgcgtgataggccgtgtcttagccgtcaatgtctcaggccttcagtgatatgttgctaatttttgaaataggccggaccagtaaaggttccagaagtacctcgtctgggcgctgctccgaagacgaagataactgatgttgagaaggatgaggaggaatcatcaagcgcgggaaatgattctgcctccgaagatcagttcatggaggatgcgccggagtcgcctgatgctgctgaagaggccgtccaagctgtcccggagccgccaagtcggaaacgaaagcgagctgctggggaagatcttgaagagtcgtacatgcgtcgactagcaaaggaggagcagaaggaacagaagaagcgtcgagcagaacggtcaagctcactggaagaggagagcgaggacggtgaaaaagagagcccacaatccgaagacggcgagtcggaggatgaaggtgcggatattcccaaacacgaagctctagctggtgctgccaacgatgatgatgagctctccaagtcgaatcgaaccgtatttttgggcaacgtgtctacaaaggcaatcacgtcgaagtcggctaagaaagagttgatgaagcatctttcgtcattcctctcgacacttcctgagtctacgggtccccacaagatagattcgatacgtttccggtctactgcatttgccagcggcggcaagatacccaagcgcgctgcattcgccaagcaggaaattcatgatgatactacgcccagcaccaatgcatacgctgtctatagcaccgctcaagctgcgaagaaagctcccgcggcacttaatggcaccgttgtcttagatcgacacctgcgcgtcgataacgtggcgcatcccgccaaggtcgaccataagcgctgcgtattcgtcggtaatctcgacttcatcgacaacgaaaccggcaccgaagaaggcgagaaaaagaagaaaaaccgacctccggctgacgtggaggagggtctctggcgtactttcaatgctcacaccaaagcgtcacaaagtggtcctgccggccgaggcaatgttgagtctgtgcgggtagtccgtgaccgatccactcgtgttggaaaaggattcgcatatgttcaattttatgaccagaactgtgtcgaggaggctctcctgcttaacgacaagaggtttcccccattgttaccacgaaagcttcgcgttgtcagagcgaagaaggtagccaagaagtctgttgagaccacaggtgcacctaaggggtcggaccggacactacaaggccgtgctgggaagttacttggaaggtcaagtgaggctcggttgaaggcggcggccaagaagtcgatttcccagagctccctagtatttgagggcaaccgcgcaacagcagatgggtcatcccgcattcgagtgcggacgaagagtcgcggctccaaggccaaaaaggatagtcgaagcaagaagcgtgctgcggcctataaagctgctgggggcaaaaaggcgaaaattggcaagtaggggttggagctcacttggtgtaaactaagatattaggaagaggcatccatgaatatatcaaagcggccgtattcaacattgaatatctggacagtatagttgggtagaactccgtaaagctgcaatacctgagcagcacatgacgtcattccacgccaaggtaaacatcaattagctgaagatactcctatcaatgccgctgaactcttctgtggcttgtatctaactctgccttatcattagcgaattgtctctattgactgaatactgcttcaacggcttctagacgcgacaggaccgctccaactctctgaaccgaaaacgcggggcagtggaacctacactataaccgtacttaacgcatcagactcaagattcgagaaaacagttaaagttggtgcctggcagcttgagacgacctgtcaaaatactcgagactcttcattccagcatcccaatcatcttagacaaacaaggcaccatttgccatctctaaacagtgcacggcagaagaatgtttgttcgccttccatttaggggtcgacatcctatgcggcctgcgccgagcaggagcaacgaaccaccagagggagagacagaatatcaacaactagagaatcagttttatcctagcatctctgatgctctcagggtccggcaccttctgctctggaaggtacagccagaagggcttccagcggaggtggtggacatgattgtggacgccgctgaatactggccgtcaacgaaggtcaagttggataaagctagaaggatcgaaaaagatgtggaccaagcggtgctttgtacgagccctctttgctatgatgagaaggtaagtttagacggaagcgattaatgctccattcttgctccccttgagctgaattatcccctaacgagctgcagagtctggacacaccccaacctaagctccttccgcacaggactgttcacccatgccgaaagatagtcttctcaattctctctcatgatcaaggtggttatactgaacgtcatttggctggtccaaataaccaatctccctatgagcacacctgcacctggtttgacgccgaggtaatccatcaagcgcataagccatcacagaagagtgccataaatggaaagatgaaccccacagatatgaggccacagcattttggccccaatgaccctctgctgcttccaaggaataatgcactacagcgcaaccgcactcgaatatatgaagcaaaacggcataatattatctggcactacctagatgacgttgcggctgactctcaagaggcagaggatatcgcacgtgagacaggcagaggacgggacactgtgggcgggaagcaggttcgggagatggaaatcggggactctataatgatatgggcacgagcacgatttccaggatggcgaaattatgtggatgatgtctcggtgcaggtgttttgggctgtatagtctggaagtttactccgtaaaatagcatagctaattctcgggtagtttatgataatgactcagataaattgattaatggcagactgctagttaccgggtagacagtctaaccaaaaccactcatatcatacaacttcccaccgagctcctagctgcttctcgatggagtattcagccaacccgtcattccattagtactggcactagccttagtgcctaaggcggcgaaagcacgcaatttcgccaagcccagcttgggcctcacctgggcccatattaaaagaatagcgtgcgctcatgtccttcgactaggagttttctctctttcgccccagatcatggcctgaatcgacctgaaagtcgctaattgcgttctcccttaaccgcaatgcaccgtatctcccaccattcgtcgcccagcgccgctgctcaaccctaggcttgaccgtgatgtgaccgccgacgcaaaccggccttggagaaggtcgcccgaggttcgaaagtgtggggccacgttgcgcaacaacgagaaggaaaatcgtct

SEQ ID NO: 4885 - DNA, 3323 bp, Emericella nidulans
gcggccctgaatgtgtatggatgggaggaggcaagcaagccgtccgtgggtgagttgggttacctaaggctgttccagctcttggccacggaccaccaccggcgccgcctgcaataataatgctcagcaccggctcttgttgaggtgtcgcaaagttctccaagtcgacctaggtggtaaatgggaagaaaggagatatacggccaagcaagttgctttggaggatagttgcaggttggttttgaaggtcagatccagaggaactggagatctgggtgaccgtcacgtggtcgggcgtaccttgtagcagctctatgaactcgcagtataagtggtgaatctgcggaggaaagatgatgcgtgagattgggtagaagagagcaacaataatggcaatagtgcaggctcaatggagtggattagaaaatgagaagtaggtcaaggcgaactattattattatccccgttcattgcaggcttacaggttacaacaggagaacgacaaccccggaagaaacaccgggaaaacacttgctggattgatcggcctcgtatttaactatctacactgctataaagcgaggaccaggcgatatgagaggctgacagtcgcataaggcaccaatatggaaaggggtaatcacataatccatccgtagtagcggaaaggggaaacaaccacagagaaaattgacttggaagctccggtctggactactagcaatgcagggctgagcgaagtgatgcagaagagtcgagtcgtggctgtggaaagctggggtcggccaaatcacatcagccagatagccgccagcgaccagggagatgtgatttacaagagcagatccgcttttgaggaacggaatccactaggagattctgattggatgaaggacgagagatcagggattttcttctttctagttctgatgtttgttgttgcactcactctgaactgacggtgaattgagggctgacggagtaactgcagacttcagtaatagcggctgtctttgcctcagctgatataagcccgggcaaatcctgtttagaaggccaccatatgcatcactctctatgcagaacccgtatgcctgtgcaattgataggcttagtgtactccagcttatcttccagaccggaacctcaggtcactgtactcgccgtcttaccatgagtataggacagacaaaaagtgttatggagaggcagtgaactccaatcacgaaccaatgctttcttttgagcaaatatttacagagcccaattatgtcttcgtttatgttcatctggggtagaatgcacgtgaggggtaggcgctccgccaagtgctctccatagtctccacgttcggggcccgaggtcgttcacatgcaaggaactcctcgaccctcgtcgtcttcagcgtaatgtgatctgccggctcgacgtctaccaacttctaagttgtcgttcgtcagcatcgactcacacgacttttcatgcattttacagtctcatccgtcgcgtcttgctgatgcctacgtctcgatggccatcaacggcttggtatagactctcacctgtcggaaggagcagaagaatagacgacgagctccctatgcttgattgggggacgcgatggccgctcaatcaacgcttcgacagaagcaagatcctctcctgactctatatatctattacaccaatctgctccggggcaaattcagacgttcgtcaaagactgctaaaatcctcgcgataattgcccttctcctttcgatcgtcggaactggctatggaggctataactggttccgagaaagagcaaacgagcgcgctcgagggaaacggttactgcggcgtaactctggaataagggggaaggatggttctcgcacgatatatgtaccatacaaggactctttgacctccaaggtcaaaatataccccacgaaacctacaactttcgacgcacaccgaaggctgtttttgaacccgccagcatccgctcggacgggcgatgaagattcattgggccgaataccaccaccaaccacgaagcccggcttgaacctcgctttccttcaccaatttttgagtcttgggagtattatggtgccgcgatggaatagcaaagagacggggctcctaatgagccacggggtcttcttgcttctacgtacctacttgtcactgttgatcgcacggcttgatggtgaaattgtcagggatcttgtcgcggggaaagggcgggcctttacctggggtattgtcaaatggtgcggcataggcacgctcgcctcatacaccaatgctatgatcaagtttcttcagtcaaaggtgtccatcgcgtttcgaactcgcctcacgagatatattcacgatctttacctgactgctgacaataactactataagctgatgaaccttgacggtagcatcggccaaggccctgatcaatttatcactcaggatctcactttgttttgctcagctgcagccgcactctactcttctatggggaagcctttagtggatcttttcgttttcaactaccaactctaccgctcgttggggccattagcccttagtggaattctcactggatactttagcaccgctgttgtcctgcgtaaactttcgccaccgtttggaaaattgaaagctgtggagggcaagaaagaaggtgattttaggggcttgcattcaagattgctcgcaaatgcggaggaaatatcgttctatggtggtgccgatatcgagcgtgtattccttgccagaagctttaaggaccttcagcgatggatggaagggatctacagtttaaagatccgctataacatgcttgaagatgtgattctcaaatactcctggtccgcatttgggtatttgattacctctttaccggttttccttcctgcatggggcggtctaggcggcgccatggagctggcagacacatctgaagtcagtggccgggaacgcggtcgtatgaaggagttcatcacaaacaagcgattgatgttgtctcttgctgacgccgggggtcggatgatgtacagcatcaaagacatctctgaactggctggctacacctcgcgggtgtatagtctcgtttccgcccttcacagggtacatgcaaatgcctattacccaccacatgacgctggctcagagctatattcactagaggatgtccagggaacgattcacattggttttgatggggtacgctttgaacaggttactgtcgttgcgccgtctctttatccccgaggtggagacgaacttctcgagtcgctctcgttcgttgtacattcgggcgatcacctcctcaattc

SEQ ID NO: 4886 - DNA, 4522 bp, Emericella nidulans
tcacaaaaaactcaactccaaagttccctgtacgtcaaaacgcgtcctgttaaatagaaccttgccccgaacacaactccgtggtcccaaccttatcaagggttaggcaagctcatcaacggcaaagaagagcgcccacccagtcgctattgatcattctgcagacgcattctcatctgccacgggcagattgcgccgacaggacaggaaaggccgcccgtgaacttgggagttagtttaatggatgccaatcccatttctgacccgcgcggatttcgctcgacggttacactcggtggttgcggcggggatttgttaggagcttgagcggacagcagcgcctgcccgataatctgatgtccgaaacaggacccgaacatcctgacatgcggatacgaatcgaataccgtctgtacaaatccctgcagcgggacaatccaaggatactttgcggcttcgtatgctgcggctgctgcgccggtaatgaggattccgtctatggggagggcgagcggattggtactcgccgtctctccgttcaccccattctatgattcccgtggtgcggtccgaagactctggaatggcgggagtgacccccgactacatcgaaggctgtggtgtggatggaagatgcggggacgccgagtcgcgatgcggcggcttgcaggagggtccggaactgcgagctgtagaggccgcgggcggcatagacggctggtacggggacgtcgatatcgaggatggcgatgtgtagcatcctgggctgttcgctgtgacttaagaggttgagaatcttctttctctcttctttttcttttttacattttgctacggtggggtgcgcggggatgggatcggatcggatttccttataaggaagttgattacgagggtgaagccaaaagtctatacgggatgttgtatacagaacgacgaagcaggggcagaagagccgtaaagacggattcgagatggcgagatggcagtcgaattgttgacgctatgggaggccactgtatagctagccgggacaccggagtttacagtacggagtatactcaggaccccaccttcagggacaacccaatccagactctcgtatttctttttgtgcacagtgctagttgttctggagaaggtaattgtgctgtgcgtcaactgataataataacggcgacatacgtgtggttgacagtgcctggcattaaacctggggaaagtatgccgtgggcccgtcctctccttaatcaggcacggtacaacacacgcactctcatccaccgcactcgagacaaactcgacagaatgctagaatgcgaccgtcattctcatgatcttcatcaagaatcagctgtcgcacgtcaaccttcccgatctgccctcaagtttgagtgctcattgctccagatgacgccatcagcacggccaatcacgccgtttctgctcctataagcttggcatctcaactaggagaagcacgcaatgtcctccactgtttgcacaactgctgctctctcgccatgtcttcagtatattctacgtgcgctctaccggccgagtcgcttcatccgaagctgagaacgtctataaatatcatatcaatgccccagggtcggtcgaaaaagaaaacgagccagcaaagtcacccttgaataccctcaacacagccaaaatggccactctcactcagacctccgcccccgcccccgctccagctcagatcatccactccaatgcccctcgcgacatcttccccgacggcctgaagacaacgggccagcacccgccgatctacgaggagctgcaccccttcgaggacttccccaagtccatcgagggccgcacgctctggaaggcagaggactacaaggatgcgcctgagaaatggacacaccgattttcggcggaggaggttgaagaactcggtgccactgctgatgcattcttggcctccgggactcctctgactgggatctcaaaggtacggccctaacacattcccagcaggtccaagacagagattaatagaaatagagcaatttcccccttcccaaactctccgccctcctctacgaactccgcgacgacctcctaaacggcaagggctttatcctatttaaaggcttccctgtacaagaatggggcaaccacaagtccgccgttgcgtacatgggtcttggcacctacctaggctacttcgtctcacagaacagccgcggccacgttctgggtcacgtcaaggatctcggcgaggacccaacgcagattgactctgttcgcatctaccggacgaacgctcggtatgttctcaacgtcccggtttgtggagtatgtgatattctaatcatgtgtgcatgcaggcaatacttccacgccgatgacagcgacatcgtcggtcttctatgcattgcgcgcgctctggagggcggcgagtcagacattgtttccacgcaccacgtctacaacacccttgccgctgagcgacccgacgtgttgaagacactgattgagccaatctggtacttcgaccgcaagggcgagacatccaagggccaggaggagtatattcgcacaagcgtgatctacctcgagcgcggtgataacccccgcgtctacaccaagtatgcctatatcccttctagatctgcagctcacatgctaatcgtgacggtaacagatgggacccctactacgtccgctcattaacgcgcttcagcgatgcaggcctcatcccacctctctccgacagacagatcgaagccctcgaggtcctcgagcagacctgccagcgactgtccctacatatgatcctcgaagtcggagacatccagttcgtgagcaactcgcatgtgctgcacgcgcggaccgcatacaaggactatgccccgcctgcgcccaggcgacacctcatgcgtctatggctgtcaacgccggagagtgagggcggttggcggctgccgttctgggatagtaacgaaaagaagaggggaggcgtgcaggttgacgatacgccgccggtggcgctgttggatgctgagtagactcctcagtttgagaaaaagagtttttgttacggcggctggttgtattttagcgatctatgaattaatttagaaccttggttatggttatggtctgggtaggtgtcatgattcataaatacatgaggtcgatcatggtcagagaactaccgcacaatcttgtaattgcccccgctgacaatctcaatcttgccctttgataccatacccgccaaaaactccctcagctcctcattactaaaggggaacccaccaggcaccgcaatcttcaacatcataacgatcctctgcagcggcatcgcgccctggtttgtcaacatacccacgataaactgccaataaagattcatcttctccatggctgccgcttcggctgactcctttgcgacggcagcattggccgctgcgacggcgctctcgtcgatttctgctgctgtatgggacgacgtagaatcgacagctgcgtactcagtgtcgttgttgttgtcgtttttggttgctgggagggattcgagaacacagaatgtatccgctgccccgggacctcagtcagaatacggcggcttacccaaaacaggcacgcgctgcggacaagcgcagctgacatgtcaagctgttgccgagagctcgggaattgtctttgagacggatttcgctctcggccgtgccggaattgaatgcgtagatgactgttgcttgccaggtggagacttcctcgacaaacactcggtcctcgaggtcaagttcgacggtgacttgaccgaacccattgagccacgtgagcttgcgcgactgcttgagggattcgaaaccctcggcgtagcgctgctggagctcggtgatttcagacgggaccttgaattggtggcccttgagctcaggccagaagaagtgcgagaggatctttgcatgaagttcgggagtttcttggtcttgcgaattcgtcatgccctggtcgttacggacgacggtgtcaacacgtctggagtcaaagatatcgcgcagcatgacctcgcatgcttgcagggcattgtcgccgaaccggagcttgaggagttccagaacggacatttcctgctcaaattctgcgcgtttctggaggagccggtctgcgagcatgtcgcgtaactcgcggacaaacgtctccttagagtcgaagatactgatgagactgccgatgacatcggagctcttagacttgcggtagtcgggtgccgcgtcaattgggtccggcacccagttcaggtcgtcaaagtctagctccccggtatcattccgcagagagttctggtgtgccttgttcagctcagctgccagttccactagcgtttcggcgttggatgaaccccgaccatccgcgtcaagcggatctgctagataagccgccaacgattgcattgacggtgtcgtcgcggtcccggagatacctgcgaattggccgcgcaatccgatcctaagcttgggtctccctatagtag

SEQ ID NO: 4887 - DNA, 4956 bp, Emericella nidulans
tcctcctcggcatggggtgtctaccggattattgcatgctctgcgattcggccattttggtttgactggctatacagccctccacgtgggtataacctactcgcagtgctgatcaaaaccaggagacttgcaccgcctagtgcgctgctccggggcctaacggacatactgtatttgcgtccatttgtaacgatgaagcaggcgtgggtattgacggcggcgacttgctgcactacagaattttctcctatttaggaggaccatgtagggtgaatggggttgatgaatgcaacctgcgctgctcgaatcaagaagcttgacgggagtgactttagctgtgtcacaccagacggggcacatgtaagcgagatctgtctcgctctgccaaatcgtctgaagggttattacatgattacgacaggcactaaccggactattgccgaatagaaagggttaagatggctgaagacggtggattattggatatttcgatcaaagggggcgtatgtatattgtcgatcgattaaaggtatatcatatgtgtcctaaccccaggatctacaacaaactgacacggatccaggagctcatcaaggtcaaagggctgcaagttgccccggctgagttggagcagtatcttctcacccaccccagcgtcgccgatgcagctgttgttggtgcgaggatgtgagtttgccttcacgttgccttcggacaatttggactgacattgaacccagaaatggcgctgagtacccgcgagcatttgtcgtgcgtaaagatgacactgtagcagaacatgagctgttcgacatggtcaaggcacacttcgctccacacaagtggttgacaggaggtgtgtacttcatagaccagattccccggactggaagcgggaagatcatgcggcggaatttgcctgttattgatgaatccctgccgcgctcgaagctgtgatgtcagggagtggatgatacttgcgagattgtcctggccctaagatttttgttttggcggctttatgtgcagctataggcatacagtgctttggactttagcattgtcatatttgtgccacgaatctggtccctgagtacacaggaagctctctgactagaccaaatgttagatgctgctcaccagatgcattataatagtgaatccccctaggccctggtcccacggatgtgtgttcatcgagaattacagaaactcgaaaaaaaaaagatcgagcaaatactaccagtccatgctattaaactaagttctatctctttgcgcagtaatgtttcgtgtgctggttggctcgaggctgttcgattatccgttcatcctgcttgtactttccctatctcctcagccgccgctatgctcagtctctcgaaaacctgaggtgtggtgcatacggctttataaagccgccgatttatagagtgccactgtttgcgcagtcaagctgctccagtcatatgcgcatcttgcagtcgccttatacccacacgccgccttcgacaatacatggctgaaggttcactcgaagtggaagagaagggggcactctaatgagagacttgttgatctcaatagaggcaggaagtcgggcaagtcgggttcatagagatcctaggccaggagctggggacaattagggctaagtgctaagacatatatcacggtatcggcgagtcttatcaatactgctttactttacaagtatgtgtgtcaagcttcctccttcccggctataatgcatactggatatccctgaagtctctgatactgatgatgtgcgctactctgtagctgttcgagaacctttcccaaccgcccaaggagacactgaaggcagcagcccttttggatgatacggaggcagcgaaaggggtcattggctggttgccattgcaaagccaaccactgcgccagatggttctcactagtgagctggtagaagacgttcatgcccgcgtagttcccaggccggatatcctgcagtgcgtggtcgtcaaaaaagaggccctctgcgaagcctaggagaaacggatactccatcgtcaacgtcgcgctcctaggatcatatccgtgttggcagggcgctgtgaccaggtagtcaggagcatatgtggctgacaggctgccgtctccgatgactggagctcctggggtaggagttgcttcgaggcgcataaagatggtatccgctattggcatgatgaggacgcgggactgtattgaaggacagccatttatcggggcggtcgccgcagtgcatttctttatcttcgttgcgaggagattctgtgactgggtgtagatgcggtctgtccggatctttgtatattgctgattttcgtgcaggatgcgtccacgtcggaaaccgagataggctcccttcatgttagcccaggattcaggcatggaagcgttgcggagaatggctatgccgtcgatatctaagccaacccagtcggcattccaaagacgctgctcaatactatcgaccgacatactgtcagaacacagtgcgattgcctcgcataagtgtccctcaaattccgtcttctgacgaagacgtataggtggcagctctctatgggacatggtcaaagcagacatgatgcgcaggttcacatcccagtcggtaaaggccagccgagacgcaaaatggacggcaacggtgatactggaaaccagctccctgagtacctgccggggccaattagctgcctcgtacagggccgaattcctatagtcgtccagataaaacctgagccgctcaaggtccgtgtctttgccaattgccaggttgtcctgttcaagatactgtccccgtagagactcatacgtatttttcagctgctccagcccactttccacaaggggaggagggtcactgtcgtggccatgacaggagtatgttgctactccgccatgtggacgaaaacgatacccatcctctggcggacgaaagccaaggatcctcaggatgtgcagcgccctagcctggatgtcagggagggctgcaagggtgaatgagaggaagcccatggatgaggagtattgagaccggtaccaggtggaatcagaatcaatcgggtcgaaggaaagacttagggtggaggtttcgttgagcgcctcaattgcagcaaacgctgatattcgggagaaggccacaggctgtgactggcgcaggtctgagtgatgcagactgacaaagtccaccatggagcagtcaacccgccagccatttctgatggagatttgggctgtctctaatgtaatgaggtcctgaagatttccttccaggtagaggcttccggcgctctcaggggcagagacctcgaagatgacctgggcttcctcatagctgctcgtcatgggcactggcgtaccatctgctttcaccgcgcacatccggagtcccagaatgtacgatgcgtatgtcgccatccatgcagcaccacgcaggacgctgtaccgaacgagacaccgtcgaccgcctaagctgatcagtctatgtaccagccgtatcatcttcggcatatctttgacctctggcagaccctcatacggtgaccctctaggtctctgcgactctccattgttctttttttccagtaccatagaaaaaatggtggtatgcagggtcttctccgcgaaccctgtcttgcccgccagcggggcgagacagcttcggattctctgtagctgcatgatgccgggcgtgttgtctagagatacgttggcggcttcgaatagggtcatcagcactgccgtacagctctgctcgtccatcacagtggccacggccgcaattagagccagcacgttctcacctgctctcgtcttcagcatctgatccgcaatgaagttcgtacatgctccaatctccacgagcttgaagagccatacccggtccatgcgctgttgctgccgagccttgttcagctgggtcctgaagtcttccgatgctggggtatactcggcgatcatgagcatgcagccgattgtatgaggttcgacgcccgccagtgctagttgcttcaacccgtgtgcgccggcgctgaataccagctgcgagagactggggatgtcgatttgccattgcatagcttcggccatggtctagtcgctggtaagtataattttgatgaaaaggaaaaatggttctctaacagtcggcttataaccatgatcagacgcggggtggggacgcgttggcgggcggctaatgtgacaaggctgaaggcattttcacccgtttgcaacctaaaaataacccctttatggcgcgatgaggctgtagatcgttcctttatggaccctaatctggagttaatgcgtggctgttaagttggcggctagagcggcgctgctggcggcagtgaatcgcacggctgtatattgaagactccccccagacagaatccaaacacattcgttaaatatcatggaccaaggtacggccgagacagtgtatgacatttctcccaaactctgctcacagcagtcctggactggaccggctgcagcaggcccaagaccgactatagagctggtccccatcgagcgaaaacgacccgtgcttgaagcaggtctcgtgcggcggaacgttgttttgacatgtccagtgcatccccagatccgcagtcaagtcaacggtaaatatgatgatgacgagctcatgaccgtccgatactcagccctcacctgcgagccctcggggttccacaaggagcgattcacgttgcgacagaatctgtacatcaaaccccgacgaacagagcttcttatcataatccctctctgcgatgagtctgggacggatctgggtcgtactttgactagcatctttgccaatatccagtacatctcctcccagaagagggttaagacgtggaagcggcacgggtggaagaggtgcgttgtctgcattcttggcgacgggcgaggtag

SEQ ID NO: 4888 - DNA, 4462 bp, Emericella nidulans
ctgatactctaacgcccacacgtctgcctgcctgtccatcgccctcgccccaacaggtcgctacctttctttcggcggtagcgacgccctgatctctctttgggacacaacggagtggatctgccggcgcacagtttcgagtaataacggcggtgccgtgcgtggggtgagcttttcctttgacgggaggttcatctgcggcgcgtgcgatgagaaggagtgtggtggaaacgggattgagatttttcacgcggaaaccggagagagtgtgcatactgttaatactggaggtagttcgaacacgggtgtttcggcggttgcgtggcatccatcaaggtactggttggcttatgcggttacggcggattatgggacgcccggggggttgaggatcgtaggggccgccggaggtgggtgggttataagttgaattttacggcgatatctacctttttattgcatctttttgcggtttctgttatgttcatggcgggtagataggtctagtgaatgtctgtttgcctttgatatctcaatatatagatatgcactacaggagtccgatgcttggatgtgtgagtcgaggttatttcttatagctcgctagctatggtcagtgatatacactctagagatgagatccaatgtattttcacaaggatgtatccacaaaataggattgccgactacccacttctcagaagcaaccaataccaaacacctaaccaaaactccaacaatctttagcccaggccaccgaattcgaatcccacaagtcgttagtatatcattattatttggtgaatatgtgcggaggttgatgccgtcaaggaacattggatggtattagttaggattccactcctcagagcccaggatatgtgcccattgggcattgttgaacccatccatatcagtgttcataagatcgatccccccagagttcagatcgttgagatctccgttgatattaatttggaattcccaaggagccggcatatctgtattctgttgcggtcggtgcgtgccacggggtgtattcatggagcccatggatagtaggggattagtgttagaattggtgtcattcctgggattcgaatactcaatgaacgcattcacgttcgtactctccaaccttgacgatgttgtcactgctgaatcttggattgatgtttccagtgcgccagaagaagaccgggactgagcttgtttcggtgatgaagagtggtctgtcagcatgaacgaaggcgtgcaagaagagttcatggtcgatgaggcggagctctcaggagccgagtttgagttcgttacgtcgtgcaagcggggctggggatcgagatcgaaaaggatactacctgtagtggcgggggctgcggaatcgtggagaatatcttgggctttgctgaatcctggtagattattcataacggacaatggcggtactgcagaagcagcaatggaggtagagtgggaaggttgctgtcgtggaggctggcgccgttggcgagtcggaagacagacgggaagattagcccggttagggttgctatcagcgtctgtagcggcgtggatagcagggtcccatgtggtacaatcgcctactttgtcggcattaggtgaattattgagcgcttcggagtatagagcattctgtccgtggaagtgatgaataacatcagtgtccaatgttttcgtgcgaaatgccaagctgtagcaatgtgcttccctcttcctgtgtatgcgctaagaagaaatttttgctcttactccgaccatttggtagtcggatatcttggaatggtgttccttcaatgtcgacttctaattgaacgaggaatgattcggtaagaggattgtgattcttaagggcctcgaggacaacaaagacgaactgcaagaggaacgggctgccgtgtcatcagggcggaacttaagatactgtacaaagacgcgagccgcgacataaacgcagaatgatacaaaagggttcatctagtgcttgttagcttgcgctgtggtaaccaggccgccctgttatcttaccttggtcatatccatcgagctaaccattttcatgatgctagaaatttgatccgcagcgacgatacacctccgcttactttctaagattatctggtttggcatgccgtttttctcagctttgaagatagcagcttggtggagacaaatcgtggatgtgtggaccgctagattacagaacaagacattcggatctgcaataccggcaggaagtcgcaagtgactcggcatcgagagtgcaaagtgaagtaagatattatcatgagacctgtgacgctgccagaaaacgccattgagatcgttgtcattatcttgaggctcggggcgatgtagatgggttaagttccgaccaagtaggcacgagacgaaggcaacgcttgcgaatgctgatagttcctccaggtcgctgcctaacagcacatcgctgagacggggagttttttctggtttgccgttggtgaatgcttcctcgctggcgggaagatttgtcatgatctatggttctttgtcagttcctttggtatcgcttagttgtgcggaggtaactgacatctcgctcatcaatacaagtaggccatccagtcccgatacttgcatatctatcaacgttgaatgccatccagaaaacccttcgtctttcttccttctccgtccagtctctcggcaatggtaagcattgctttacctcaaggccttcgccatccaggcggtgcagtccgagcatgacggctagtctagcggctgacccagcacttagccatgccctagggaaatacatcattttgtattcatagctgccgataagaagccatgcttgacaatgcgtcaaagtgaggattccctcaccaagacccttcatctgatccaattcggcgtatttccgagccctttggtagaagagtgcatgtagattagagtacttttcgcagacagctgatgcgtgtgcccaaatgatatattgtaagcatgctggaggccgcgagtttggagcaaaatccatggctgccatgtaccgaggacggtgtatgattggcaaaaacgggtgtattttgtcgaaataaatcgcgttcctgacgagagtgtgagaggtttgcgctcgggaaacgagagcatacatacagctcatcgatgacctcccgggccgggaaaggctcctccagacccaaactgatcatatcccatgcaaatgtgttcgctgcatccatcctttccggtgtaaagggcatctgccccgctgccgttgggccttctggtggagataacgaattgttcatgctgcccatgacatgcatctcggtgccggcaggctccttcgacaggccaacagggaatgcatgctctttaggttgtggtacagtgacgttatccggctcttgggtcttcaacaacgtctcaacctgcgcttgagttcaagaagagcgttagcaccgattacaggaccagtagactttaacgcacctaacctggcttccaactgcttcacatatccccgcttcggaccactcttcttccgcgcctcatcgtatgtgcattcatggcctagacgcgagcaagtgccgcagctgggcttcctcccatcgcatctaagcttcctccgccgacaaacggcacatgctatgcgtttcgggcgcgggacgtagctgttatcgccgttattgatgctcgcagctgccgcgtgagaggggggttggttcgtgggattttggtcgttatgcgcagcggggaattcaaagttcagttgttgctgggtttgaccgtctcgatagctagccatggcgtgtcgatgtcgtggggctgcggtctcgattcggaaagttcaatcaaatatgcggaatcggagtcaagaggcgctcgacctcggtcacagaaaaagtgtgaagaggcctggagaccccgcatcagggagatttagtgaagtcaacggctcggagaaaatagatagctattagaagatataatgtcgcagcctcgaaggaatcttcgataggcagcactgcgccacgacagctggggcttgggtcgggtccgattgtgagcgggatacgagcgccacgtctgcgtctcgtaagtcacaactcgcaatctttgagtcataagccagcgactctaaggtattcactaattttatagccttgagcacttttcaagagtagatgcacgtgcattgcgtagccttctatggacggttaccagggcgagatcgtattgcccaacaatgcaagccactagatttgatatgagcccgtttattacggcatcattgtcaagctgatgccttcaaaggaaacgtcatatgcaggcctttgtatttctatcgttgcctgtaatgtacaattcaacgccgttgcaaaaacaaccggagcgatttcggtcccaatagaatcgcgagagatccaaggtagacaagagcatatcccct

SEQ ID NO: 4889 - DNA, 4144 bp, Emericella nidulans
caaagtagattttgaggtcatccggattgacaaaaggagtgacgcctaggaaattagcatctgcatgatataaacgaataaagagcataccgtgacccaagttggcaatccatccttgcttgcccttcttgaacccagcaaccatagtctccacagcctgtttgatagcctcgcggcctccgtagagaacaccagggtccgcgttgccttggattgtaacccgtccgttggcaatcttgaaggcctcggccgggtcatgtagccagtctagcccgactacattgtatccggactcgcaaaggtcctcgagagcataccacgctcccttcgcgaatactgtcatcggcacgggttcaagtcccatctcttttaaccggcgcggcaggttcgccgagatgtgtctcagataggggagtgagaagtcctggaaggacgccggcgacagctccccagcccatgagtcaaacacctgaacgagctgggcacccgcagcaacctggagcgccaagtattcaacacagatctcggcgatcttctgcagcagcgcctgcgactccttcgggtacttatagatccatgtcttggtctggataaacatcttactaccgccaccctcaaccatgtagcaaagcagcgtccagggcgcaccgcagaatccgattagcggcacccgtccattcagcttcgttcgcgtaagcgtaatagccttgtacacgtaatctaattcagccttgacatcgacgtcgcgcgccatgaccttctcgtattgaccatcggttggggagcggaggggctcggggaaatgagggcctttcttgtcaaccatctctaccgtcatgcccattgcttgcgggatgactaaaatgtccgagaagatgattgcagcatcaatgagaccctcataccggtcgacgggttggatggtgatcgttgaggcaatttcggggtcgcggcagcattcgaagaaatcgcggttgcccttggcttcatggtattcagggaggtagcgaccggctacaagagtcaaaactgttagttgaccattcgtctatatatggtgtattgagcacagaaggagcttgaggagaaatggagagtagcataccttgtcgcatcacccatatcggcgggcggtgcaccttgtcgcctaaacattgttagaggagaaggtccaaatgaggagaatagatttagcaataccccaagcggctctcaacagtaaatcattcttcaatggcgcgaattgtgtcattttgaaggggataatttggagagaagaacatggcagcagaactccgacgatattcttgcttcgggtgcctcgggccgtctaccccgcggtccacaccattccttcgacgtactgtataaatctccattataagatttcgagccatggatgctgctcaataccgtgaagagtttgaggcggagcgcgaaaggctagcgcttgcctaccagcagaagattcagacagaattgcagagagcccaggaaatcgcagagcagcgtctccagaacgaactcgtggaacaggcaattgagctcaaccgcaagtacatacatgaagtgaaagacttagttgagcgcgagcgcgagggccgccttagcaagctgtctgagcttacctcaagcgtcagcgaacttgagacactcgtcaccggctggagggaggtcatcgacactaacctcaaaacccagcaactccaggtggctgtggacgcagttagatccgctcttgagcgctcaacagtccctcgacccttcgtgcgagaattggtggctgtcaaagaattggctggagatgacccggtcgttgaagcggctattgcatctatcaaccccgcagcgtatcagcgcggtattccttcaacatcccagatcattgagcgtttccgccgtgtcgccgatgaagtccgtaaagccagcctgcttcccgaggacgccggtattgcaagccacgcggcaagcttagtattgagcaaggttatgttcaagaaggatgccgaggccggaagtgatgacgttgagagtgttttgctgcggacggaaaatcttctggaacaaggaaacctggacgatgctgctcgtgagatgaactcgctaaagggatgggccaagattctgagcaaagactggttggcggatgtgcgcagggttctcgaggtgaagcaggctctagaagtaagtcacagttatacccccgtttaaccatataatggaattacgctaactaagttccgcctaggtgatcgaaaccgaggcacgtcttcagtgtctaagggttgagtagatagataccatccgctgtttcttcgcttggctgtaactcttacctgtgacaggacatgtatcttagttatattttcgtctctagataacactagtagatttcttttgtaccccggactatgctattgacacttgtagatcttgtagtgggcatattggtttgttctgtttgcaacttcctgtcacgggcagagtccagacaggaggcgatagccaaattgacgatcacgctactattcttgcggctttgccctttcttccctatcatgtcttgttcctatctcacgttcaagctcggcttgcctgatgtattcgcttctccgtagtgcgttgctctcctgctgccacgattatatcgccgactttgccttcttctgctgataagtcgccgaaacgcggataatacacatgtccgtattttaatgttgccatacctacctgatgatgcgagtgcagaaccaatgcgcctattaaatccggaatgatcaaagtcttgacaaactccttgtgaagcgcggcactgcagatgaatcaggagcaagctacgagggagtcactcgggagtagctctcgggatgaagagcgaggcagcagaagtcagcgacgaagcgccagctctagcggattccttgtcgattcattcttaccacgctcatcaaagagccttcgaaccagcggtcaccactttcgtcgctcggaaatagaaaatcgggcaaatcttggaaacttagaagccgaaactaccccgaagaaacgatcccgatttcgatggagtcgccaacgagagtctacaaaggagtcggacactgtcagccaggatgctaatgatggcacggaagtcattagctctcttcgcttgccgcgagatgccacgctttcagaatcgcatgacaagagtgcagcccatcatagtggaagtcgtgcagagagtcgtaatgacccagcagctctaggcttggataaagattctctacagattgtcaacttagcattgaatttgagtgagtcgagaagaaagggcaatgttggatatcaggcttcaagtcaaattcctcgaggatcatgggcaccatcaggggactcttgtgcttccgcagcgggcagcattccgcgtcatgactcttatcctggcatcaacgctacgcagtccttgggagatgaacgcctgagatccgtcaaccttccaatgtccatgttaacgaatgatgtgctgaattcgctgcccaaatccgcaacgtctgaacccacgccgcaaggattttcgggggggacgctggcccgagctgcaaatgctcgtcgccattttgagctacgacatgaatatcttcgccttcttccttctcttccgcccctcaaaccttatagcagtcattctacaaacgattcacctcgtgctaattgtcaccaatcacatcgtgcttacaacccactccaagcaatccgcaatcgaaaggtcaggtttcgtgagcgctgtccaatcgatcccgaagcagagggatggaatgatgttgagaaagttcatagctgggttgattcggttgaggcagcgtacagtcaccaggctcggaatcccctagaatgccttaagctccctccttataaaggcagaaattcagagggaggattgggccgaggtgtgaaggatattgacccatctactgcctccccgccttccagcttgcggcgtatcagtcgtacaggcagtatcaagtctcgcaggcccaggtctgactggctaatatgccctgatgaactgcttgcagatgcagcttgggtcgaggatgcgcagaataagagcagaatcacggatagggatggaaatatcttatacccaaatccgtctttcttcctt

SEQ ID NO: 4890 - DNA, 4488 bp, Emericella nidulans
cagcatgacaccagcaagtagcccaatgaccattggcccaaatgcatgacttgccgggcataggaacggcggacctccaaacgccaggaaactccgcctctgcaccgaagacatcttgctccatcgagcaggcatgaattctaatgcgtcaggaccccagacttcttcattgagatggcaggcttctacatttgctctgccaatgttgctaatctgattgttaggactggagccgggaaactggaatgcacgtcgaattcgccgcgtaggtgggtagaggcgtagtgcttctttgacgaggaattcaacagagactgcattgtccggccggagacgaaattgggtaagtgtaggatcccggacgaactcgaggagggcccgcttatagtcttcgttatcatggcagtggagcacaatgaacagccttaggacaatccgccagacagtctcgaagctgggcaagatcaacttcagagggtttgaaccagggtctagaatgttgatgtcggtcttgtgattcgcgaagacagcggtgagacaagcttggagaacaatattatctttgaactccaaggctctttcttctttcattctcacccaagtgctgtttgtgatttttccgaggtcggcaagctgcttgaattctaggtgggcatcctctcccatctgaaagaggatccaaaacgattcccttagcaccaaagcttgcacagtcggggtaagcgatactttgactcgagctccatcgcggttctcttcgattatgctttcaagcatacactgaagtgcgccagcaagaccatgccagtcaacagccgaaacctcaattaatcgacgcacattctcaacaaaatccttcgcctcggcctcattaccagtcgtaaaagcattttttatgccgaatgcccctattagtggctggttaggcaaagctctagcctcgagacgagtgagttggttttttctggcatcggggaactgggagccatcaattatcgcgcggcattccgcagttgttctgaattcggctggctttttgcttgagcgataacagcggcggtagaagaggacaaagaggacgaagaggataaggtaaagagataccgtggaagccatgcttcttgccgtcattgtagctaatatgctgccctctgtgttcgcagtggaggagaggagatggagggtcaagaaagcttggctaaatgttgaatctcttaggctcagaagtgacagcggcctacaggtatggaagaaacaggcatccacgccatcagagtctgcaggtgtaagtcactactttcacttaggacatctaccatttcggtgaagttcagagcattcaactccagcagcctttgtggtagtaattcactatgatctagcaattgtgtaaatagccaatgaatgcatgagattcagcctatatccagggcaaagccctggattcttggttcttatggagtcggtcattgcatccttgcgggtgggcaataacagccagagtatcggacaacttctacaccatgttaagtaatatcacctaatgctcaagttccatgctttttcgatgacaaactcccagatgaagtgcgaatggtgatatgtgaagccgtactatcttcctcttgatggttgtggccagcatcattccaacggggtttatccattgggcactacctgggcaatcataagacacgttgcaggcttcattgttgagagttgttgatagtaatcaggtcccaacactcaaagagattagcattataggtcatggttcctaaagccattcaagctaaatctctctggactccattatggaagggcctactttttaggcgtgggcccaggcaaaatctgaataccatatagtagtccattcttgctggatcaagacaattctggaatatctactaggcaccaaaatagaatccaagcgccgcatacttgtgacttgttcagcagccaaaagccctgagctgactgcggaaggaagttcacaaacctatactgcaaactgttccaccgtgagtttagagagcccagtattatatgatccaactgggtttgaacaacctggtaacacggttgcttttcaatcgtaaaacaggctagatgtcgttttattcatagcccaaggtatatctcagtagccctctaatacataatcagatactttagcccaaggtgagattaatggcgtagagcttcctggtataagggtagtttagacactcggacggcatatatttgcggccaaaataaactgggatcagggcgttcggtagagtttgttaccaccttttttcaagatgcagctgtggtatttgctttagttgtgcatctatcctcacggcaatagttaccaccaaggagcctagcaatccagtcatactgggttggcttcaggctggtaatttcttagtattgaaaaggaagctgctcctaacaagataccgaaagagaaaaaaaaaaaaagaaaaaccaagtaataagccccgtattgcttcgggagcattggctaggatttgcagcttgcctcgcttccacagacatttagtacaggtatacaggaagatttgctaagaagctacgagtctagcagccacagaactgtgtttgatttacagctttcacttaggagctaaagaataatcacacaatatattccataatttagttctaagacatactatcaacgattctaatcgccccgtaagatcaacaaataatattaccccaacactcgttccattcttccccttaagcatcaagtttcagaaccattcaaagaaggggagacgcaggcgccgttccgaaatgtatcgtatgagcttattgcaatcctttaccacttgtccaataccgaccaagttatgcaaaaatgcaaagacgaaattcccaatactaatacttgtccaataacagcaatgacgaaacgaatactgtagacagacataataatcatggaacatgccataggccttcactacacaagaattggcatagaatgactggcgatcagcaagaggtgcatggatgcaatatatgcatctacgtaccagacgataaaggatattgtagatttggcccagcccttagactataacacaacgatactctgagaattgctagcccactcgccctcaggcgattgctctgtattgggcctcactgcggtactatatatgggaatactgaatattggcaaaaggagatactatcatgacacgaataggcacactgccgaagatacgagcacggcccgtcgtcttttacgtcaactgccgctgcgggaatgggggtgcgagataacaggaagagattcgggggactgaggagtgtcagaatattgaggacgggacttctatacttagaggagccggcggggatgacagtacagcgtacagcgcggctatcctcaaagaggcaagactaactagaagcacgaaagtcagagtcataacctacgcagattccgagaccgacattgacagtgggccctgactgtgaatcattaccggccaatcagaggttttccgcacagcctcggatagaggatccaatgacttcattcaggtctgaggacactatccaacctccactatctacaccgtatattgcagtaactcccccaaccttacgaactgctacagggctagaatgcggacaagatatccaaaaatcagaacctgaccgtgtttcacaacggtccaccctgattaactcagaaaagactactgcttccgttcagcccaacggggagatcgatcgaactcgatctcatcccgggccctggaagcaccggcgttatgtccaacaatgcaagtcctcaagctgcatacgtcccggcagtaaagccggtctcaaaatgtacctccatacaattccaattgcagcaagcaaatcgctaatagaaggccgtcagcctccaaaaccaccttccacttcggagccggcctcctctccggtctcacatcctccatcctcctccaacccgccgatctcctcaaaacccgtgtccagcaatccgcccatccctcctccgtcttctcaaccgtaaaggcaatcctgtcttcacctaaccccgtccggaatctctggcgcggaactctcccttccgcgctccggacgggcttcggctccgcgttatactttacgtcgctcaacgcgttacgaacgagtctcgcttcaacatcgctcaccaattatgatgcagatgtaaagaaaataggaaacgggtcttcagcgctccccaaactctcccacagcgcaaacctcgccaccggagccgcggcgcgggtcgccgcgggcttcgtcatgatgcctgttaccgtcctcaaagtccggtacgagtcggactactacgcgtaccgcagcctatactccgcgggccgggatattgtgcgtacggagggagtgaggggtctcttctccggatttggcgcaacggctgcccgggatgcgccatacacgagttatatgtcctcc

SEQ ID NO: 4891 - DNA, 2701 bp, Emericella nidulans
gcttgcactgattgttcagaatggcaaattcttttaccaggtggctcgagacccataccttgaaaacattgcaagctcaattgaacaaacgaaaaggtagactagaatacatgacccaaaatcttcagcgacatttgtccatctcccctcgcctcgggaccagttccttctctgccacagcgcacagcggaaagggagaatcagagtctatactgcaacaggagaccccatgagcggtgagtgtacaagctctatacgcggagcagagttgagaatattagaacacgcggctcatttttgtgggtcaatatagaaacacagtccctctaatcttaacataacagggatattcatctaaacacaaaccttatactctctcaaaggtttcatcactcaaccaccgacaacaaatttacaaccgcttaaccaatgataagggtctcctcgtcggggaagttgtactggggaacctccaggttcagaggggcgggtcccttcctaatacggccggagatatcgtagtgcgaaccatggcaggggcagaaccagccgccgaagtcaccggactcaccgatgggcacacaaccaaggtgggtgcagacacctagataggtcagctgttagttgctgcaggaacccatatatatatatattatcttaccaagcataacgagccactcggccttctgcacacgctcctcatcgggctgggggtcacggagggtcttccagtcgtactcttgagcctccttaatctcatcctgggtacggtgacggatgaacacgggcttgccacgccacttgatgataacctgttgaaagctccggtttagccgcaaggcctgcaaacgcaacacaagaaggcccaatgagaatataaacatacgttcttgccctcaggaattgtagcgagaccgatttcaaccttggcctgagcgaggacgtcggcggaggcggacatattgacaaggaagtctattgcaagagtcgccgtcagccaggtatttgtggtaatattcaccccgtaagctattttgcgaatcggatttcaagcaagtcgagtatcgcagcctccggtgcctccatatatcacgatgctcaggaacacttaccctgaacagtagccttggccccaacggcagaagccaaacccatagtaccggcgacgaagtaggaaaagacctggttagagcgaggagccttcttagaagagtacttgctgaaatcagggaccttcagggtgtctttggcggtaaatgggctgtcgaagctcgagctgtaccgttgctgggaggcgacgacggcgcgggacgttgtggacagctgcttgcgggcgcaggcacgcagcaaagagccggaagtaaaggagagagccatggcgagatagcaattgcggatcaattgcagaagaacgaccgatggaggcggcgaggagaggggatgggacgttacgacacagagaggagcggatgaggaattctgaggttgaagccgacggactcccgaagatgaaatatactcgggcgctgattggccggccgtacccgtacaaacacgtgactaggaaccaactctacatcaaggcactctgtatgctctgagttctagcaagtatatacccccgaacttatgaaaggatcgaaacacagcaattccttttcgttatgtggttttgtggtcttgattgagcaatcggtggtgttgatactggcttgtgcagtgtcatacgatattatctcatcaaaccatgattatgccaccagaatttacaagccaataatacacccataacgcaaaacccagaataactcctaagcctgctcctatcgttttatgcaacatttattgatctgccatttcaacatcaccgtcatcccttgcctgcgagtcacccggcccatccaccagcatcataacagtcggaggccttgatccgcggggtactgaagcctctttcgtctctgacgggctgtccttctctgtctcagctaccggtggtagagacccgtttagcgtgcgctgtcctttttcgatctcgaggtccttgcctgattccttcgctcgcttctccttgaactgtttatatgttgtcgtcttcggtatgacatcggcgagaaattctaggttgtctatccgtgaaacagcggttgctacagtcgacaccattagatttaccgtaaggctctctgtagaggaacctacccaagtccttgtactgaatagtctttcgaggtttccgttccgatttgacaacattatgcccttgttccacgagatattggatgaagagttcctgaatccgtttagtcattgtcgaggcgaggggataagccacagtaccgtagccattgcgacgacaaaggtcgcattgttcgagcattgggcaatatcatcgtcgagttggattatcttcttaatacgagagactaacaaagccttagcaagtggatatatacggacatcaagggtacgttggacgtactaggaagagagctttgacctgtgatctctggagacgcacccaagccggacgcggttctggtatctttggtaggcatggcgacgcaactaaagtcgcagcagtcgtagcagggtaatgatttattttcagagacttataagcacgcttagttcgaactgaaggacgcggtaattctggagatcctaagcttgggtctccctatagtgagtggtattaatt

SEQ ID NO: 4892 - DNA, 2706 bp, Emericella nidulans
ttaaaagaacaaacaacggaaaaggaaaatcaaaagtcgagagctgcgaacgacatcttttcataagcagaagctgaagctgaacattaaaaattgtggtggaagtgagagtgcatcttaaagtttggctggaaccggagccttcgagtgcttgcatcttcggttctctctgtgcctaagtgcccgcttgcgttctgacgacaccatcaacctcccgcttgcggtacatctacctatctcaaccttcaccaaacgctctcttgttctggccgctgcaactctgcaatttttattgatccactcgagcagttgagttccgcctgagctggccttggtcccggcagtcatactaccgttgtgccatctcgaattctcccctccaacaatttccagttccctcccccactacccttccagtatcgtttccggcagcttaacgacagagctaccctattcttctggtcccagagattcgcttcccttctttcgcttccactattctgcgatcctgcgccgatcttatctttgtcttactcttcatcctgctagctacttctccaactgagccccggttcactttagttcagggtcacgggtttctttttgaccgggatcccgcctatatcgaacctttggtttttttgccagtccgcttttatagcgctcgccttgatgaagtgcggcgaactatccagatcccctccttccccgaccttttaccaggtgcgtttctaactttagctttagcgctgcaattctgctcaggctctttgaatttgcgggtgctgacgaggttgatccttagtgatgattttgaattaattgtccgccaaaaccccaatcgggcgcgcgtggccggtgggaaggagaaaggtgagtaacagcgatttcagcgagcttacgcatccattcagttcgagaggacaagcgagaactgacctggggcatcgatcaatttgcagagcgcaaaccggttgacccgccgccgattgtgcaaattcgggtgagggaggaggggacttatctagctcagtgagtgacaggatcttttttcgcgttgctggcaaccagtgggctaattcagctgcgttaccaggcactacctgcagagtccctattttttcatgtcctgcagtctttacgatgctcaggaggacgcgccagcttccattccaccgtctactgcattgactgggactctggtttcgtcgctgcaccgactgaaggatgtagacaacacaggtaaagagctaattccacggcgattgaaggtaccgggctgactgcatactagatggcgggttcttcgtatggggcgatttgtccatcaaagttgagggcgattttcgactaaaattctcgctctttgaaatgcgaaagtaagccgaactcgagccctggctggtttctttaatggacggtaaagggaggacgaagagctaacagggaactcgtcggtcaggacggacgttgtgtttctgaaatccatcgtctcggagcggttcaccggtaagtctttacgctacagtcgtcaagtcttgagcactgatcagcaacagtttcgccgccgaaaagctttccggggatggccgaatcaaccttcctttccagatccttcgcagaccaaggggtgaagctaaggattcgaaaggagccgcgcacattgatgtgagtggtaaattgcaagcggactgatctggggtttacgctgacaaacaactgcagaaagagaacagcaccccggccggaagagtacccccaggctgctattccgcgctctccctctgataggacagccatgcaaatccctggaagtagctatcccgcacccccctaccagcccacgagtagggactattcctactacgcgcccgtaaaacgccagcgaacatcagtggactatggtgctagaggcatgtacgatgcggacgggcgtatgcgtcaaatggaaacatacccgcagacggcaaccttgtatggccaaccaggtggctatccgacacctatgatgggatacccatctggacacggtggagttcccgactatgcggttcgtcaacctcaaaactattggtggcccgccaatgaggatcacctcggtcccaggagcgagacagttccaaggccggggaggagtggcagtaatgtacttacttttgttcagatgtcgtacgggcttcccccgtctgctcaggtaccccagatgcaagacccggccgctcagagccggtccagtcagcaggcaacgatgcagtcgctggggatggttaatccaccgggcacacctgtatgaactctaccagacagcttatttgctacaaggcgctgactggccatatatttttgggcagactcccgattcggctcgaacgatgatgcagcaagcttatcctcgaccccaatacgccgccagtactgcagtccttccgccattgcaacagagtcgcaactatccccagggcaccaacggcgcaacgcgaggttattatgaacagtcgccacaggcagcacctatactcccatcccaaccccttggaacaagcgaggctgaacgctatggcgtcccgacaggtcacactgggtatgaccacacaggctcagcgaacgggactcctcggtgaggattctcgtttgtggaacacctgctcttttcgtttctaagcaactatcctaaaaaatgcttgcgcgccgtcaagaacccatagt

SEQ ID NO: 4893 - DNA, 2467 bp, Emericella nidulans
cgaaggatgtggactaagatgcaagatgcatccttgcttccttcgaggccatggtcccaatgcacagtgcgatcgtcgcactatctttgtgtgtatagatacccactcctggagtgactcattctgcaaatcgcttgagtaaggaggatggcatcttggatttttactgtaatcgacttggaaggcatatgggggcgttacaattcggtgttctccaggtttatctctgttaacaaactatacacataatcagtttttaagtctgcttttggcgacgggatgaacgtgattctttacctgcagttctgcccttaataaattgacatgcgagtgtttcaatgtgctagccttcaaagctagttgatctactagcactacatattagccaaggggcggtgtttccaccagaagcttcatttgcaagctcggacctctgaacataagttgagtttccgcccgccaaatcttctccgcatccacaaataccgcccaaacaccatgcgggacgagaaccaaaatgatccttccttgaataagaatacaacccctaaagcccatttttcagggtcaaaagaaggctctttattttcaaacgatctcgacggtacccaatactcgctatgcgcaaccggacacgacatagcccaagctctcgttacgcgatgtcgcaccctcctctcggaacttgactccttcaaggacctcctggcgcaaacacagcggaacccacaaattgtcgaggtgcgttcgctgcgctcgaatgttgtctctgagttgaagacactggagaagctccagggccagcttaacgaggcccgcgctcaatgtcatggcggggctggagaaacaaacggaaacccgaacgtgcagcaggcgaatgagagcaatgagaagacagtagttgctgatacgacagccgagaaaacagacgcagagtcgaggactattcatgcgctgaagtcgtccaacctacccttctacgaggctgtttggacgattgcgaaaagaagttgtacggggcttgttgcgtttgggaaaaggttttactgggatggagaaggggagcgaacaagtgggaaggatgggaagcataaaaaagcgaaggataagaataagaggagcgtgtttgtggacattgtggcagacgatggggaagagtgggttaaggtgtctacaatctccgagacgaggctgttatttgaaatggcgaagaaagggtgggaggcagattcggacgtgaattcggatggagaggagcggacggttttgcagaaccatgattgcggggatgacagtgacgacgatgatgagattgaattactcaagctggcgggggatatgcggaaagctgcaaacgttgttcgagtgcactacaggcggccgaggctgcggtttgtgttgccgaaggtagaggaagggtcaaaccctgagattgatgatcttctaaagtctatacgcggctatggcgtggtagtcaattgcggagaggatgtatttacctcgcaatcctatactaagcctagaagcgataaccccgtggtacaggacagtgttgtttccgttcaggatgagattcgaaatcttctgcctaaccggttcaaaagattcacgtctaccctcaatgttgactgcaccttattgctcgccattgtatcagacctttctcattgcaagaacattgccacctccccgcagcaccacaaggctatcaaccgtcagattgagatagaacgtgagcgtcctctgctgtctgcggaactatggccggcgatggaatctcgccagctactatgcacaggtgacgctgcaagaagaatgcgcgagattgtggaaacaatcggtacagaaacggagaggaaacggataacaatcttgatgggagacccgcccttcactgttgcagactccgcgtctctagtcacagaactccagaacctgtcagactatcaggtaccgccgcggctgaggcttccaattagggtagtcggcgcaagcgcagctatcaaacttgaaaagtcaaagctgcctccgatagcccacaaagtggaggagatattgtctgacatcaatgccagcgtattcctgtacggctgggtcactgatataatgactataacgagtaaccggacggtggtcaaacaaatcgaggctatgattgaaagtcacagggacgatgaagatatgaagggaccgttgatctgggtgtgtgacacggcacggagtttgatagggaaagagaggggccgaaaaaattaaataacccctatatgtgaatcggagagcaaccagaccaacttatcatagcgtcgctgactggtcatttccaagtgttgttggtagtgttgtattcgattgacactttttagacggcctttgaagtgtcttccggtagccagaagtagacttccttgtccgccgaagcgatcctagtattctatagtgtcacctaaatcgtatggtataacat

SEQ ID NO: 4894 - DNA, 7161 bp, Emericella nidulans
  unsure (1)..(7161): unsure at all n locations
aacgacaacagcatgtatatgtcggagctcacccgtcccagcgtctgttctgtggccgctttgccgcccacgttcatgcgcctcaggtgaagatgcaggggccctgaatatcttgcacccgagctagccaagagttacattttgacatatgggcaaggtgacgcccatcatacggtgataaataatttaagatcagtctcacctcaccccatcctctttccatgcctaaagctgatcagacagcatggcacaacaaccggtagcaagatttacgcgtgtgattgacctcgacgagcatgatgataaggagatcaaacgagcgatccttccacgtacttctcgaaagtatgaccgggctttaagaatctttgacaggtaggtccctcttagttgtatagaagcacctcacttaccgttacagatttcttgagttacatccagccgcttgctttcccccagatataaaatcatacaaagggtttctagaattctatgcaagaaatacaacaggtcggattgaggaacagcctataacagaaacaattgagaatttccgccgggatttcgagacagctttagcccgggcaagggggatccaagtccccaagagcacatctatcaccatgaaagaggtatgtgttgttggatctaataacttcatatgcttataaatataaagtatatcatttcagatctcaagaccaaacttgggcttccagatgttcagatgtccagagatggactatctcctaatgatttgaccattctcctgacccagctatggtgccgggacttcaaagaataccgcggcaaatttcctgaccggaatagagtacagcttactgcatcaatattactctactgcttctcttctgctagaacaggggaggtacatgagtctacagctcgccgctctattgcccggcagaaagacggggacaacagtaatgatgccaatctccgagcctattctatggcagcttgctacaaggtcagaaatccatctttgcagagattttacagtactgaccatgtacagcattttatcctcactatagagctggttgaaggtatcccaatgttagtcttaacctatgctcgggagtttgtgaagggttactggagattgaggaaatgggagcccccagtccatgctttctatgaggtgtataaagaggacgtccctctcttctttaacctcatcctattatacgtaccgcttttttctgctgacagagcctttttttattatggatcatacaccgagatccttgaccaactggactctatcaagctcagtgatttggcttcgcaagacaatcatgtcatctcaaggatccactttcgaaaagatatcttggacactcctgtctttcgaccttctagtgaacttgacattcaaagctctactggtaaggccaggggcgcggatgcattcggaaaagaatttgcagcactagggtgtcgaagtggatatgaacagaatgttactgcccgtgcatgtcgtcgatgggcactcatggaaactggcaagtaagatttgcccatgcatttaatccaggtcactgatgtactgtagacaaaaaatattcccagaccgctcggatgaagcatgcatcccacactgaaccacggacttttggccggtcttacgcgcatcctgtctgcgaggtggatggtcctgcgacttatctcaacatcgcgtctcgtcatgagcatatccaaaatcgacgtagcatgggaatacaccataacccaaacctatggcaatccctccctgcgaaggcggagttcgaattccaggaacgagaagatataatggccctggatgaagaacttaagtcacttactgctaagcttgttgacgcaagggctgatggcccggaggctgagcgcaaaatccagttagaacggcgtcacgtccaaagtcaaaagataagctgtaccttgaggagcttaaacggcagcgtgagtttcaacaggactcgcacgttgggagtgtttataaacaaaccctcttctgttactatcgacgagctatgccggagcgggaccgccttgctcagcttttaccatccaagtcaagtatgcgaagcccagcagggcgagacgctatgatagacttggaaaccatttgcagagaacactctccagttgcctatcgaaccaatctacaaccaatcaatggtaagtgtgtctgtgggaaagcaatagatgagtaggtaacctcctgttcatatttaaacatgtactgacttgagagatttcatcctcatcgccaatggcttcaactttaccgttgctatcatgagagattctgtcaaatgagcagtgatggtttgccgagttctgctatgagtgtgcaatatggttcaacagctggaataagtggcaacagcactgccaggaccacctcagcagccctggtggattgcttcgttgtgaccccattatattccgaaattgcccagtcaaaccaggctattgccctttctgtctagggaacttgaatctaagccctattcagcgaatggagcaatatctggatatgagtaagtggtatgatcatgttcagggtcaccttagccatcggaagctattgggcaaatatcattgtcagcacccagcatgtacagaggtatatgggtcgttgatggaactagcgtgccatcttgaggacacccactgcttcaagcctcaccgtggaaaaaagcgattattggacccatgattgatcatggtgaggttgaagacatcggtgatgatcaagagagtttgcatctcgatttatatgaatgatatatattgttattcctctacagtgcctcaaagcgaagatgaactgagcagatggaagaatcagcatactaatgattaaagtgttccgtaagtttgccacgagccattctggggtagacagggtggtttacaaggcaccgtacccagggccgggggtcgaggcaaaaagaatgggtttattccgcccatattagggagctgctgttgagaacgctggccctctaaaagattcataagaaatcaacctctagtcctggttattgtggcgctgatatgaactaattctttggaacctataatgattcagaaggctcataggaccgctgccttggttcctcaatattaccatctgcatcgcgactgtgttggtgtattgccaaccttcgatagctgccagcaggccgtggatatgactgccgggggcggatagaaattgcttgtctcctaccaggtattattatcctttctgattggcgatggcttgctgaaaaacgtgggtagccttcaagagttcgtcgttgcggctcccgaggagtgactgaaatcacttgtcacctccctggaactatatgcctttccggtaggtaatgcctggcttcatgagttataaccgtgtcttgccttcttgaattagtttggcttcctgttaaatcatgctgagaggcaagagtttagcttcgtctgtggctctctaggggttcccgtctccttcccggaattgttcgggttcccagcaggttaaccccctcgtaaatatggataatttgatcaggatcccgcctcctggaatcttgtaagctgtgatcgcgtacaatgctcctcaggacatgcgaccttgggatatacccctcgtcggattgactggttgtaagtcagccactgctgatcagcgtcaaaactaacaagccttaccaaactggacatggtgggggccacctaggttctgattgtatcatcgtatagtcagtcaagcatctgtgatgaagacgatgtatacaatgcctgcaatatacggtcatattacccgtcgtgtcatggcatattgggcatgtttcaagcgcgtcatctgtagactgtgtttcccgtgtagcaggccgtggtcttggttgatgcgatagcgtatgggtatattcacggtgatgtctggaacagataggacatgtaagaggtacttgtccgtcaaattgcaacacgtggtgtgcagtaagacatctcatatgcatatgcccattacattcccgacaagtataagttgatcctctaagcatctcgtgacacacaccgcacgtttcagatgtatataccatgggataccagatagctcttgctgctgcccgtgcttgtgcttcctcctgcgacatcctgtcatagaaaatgtccccttcccgctgtacacgttctctgaagtttcgaaaccaacgggcacgttgggctgctctacattgatcgaagccaacgccgtctgacccgtagagtgcagtaaggacctgatttctggaaggcgcagtcgataaaaactggcctgagcatcgactacatagaatcagtgtcgtcagtgcaatgggagaaatgaagagcgcataccatgtgggacatgatgggggataattatccgagtgataactccactccactatgcattcgctgtgaaagcgattattacaacgtgtacaagaatcagagctgccctgaatctcctcgtagcagatcagacatggttcagaatctccagaggccaagctcgggcttgatagagtccaggcattttcagtattccgctcctgctcctgcacggcctctccgcgagtttgatcctctgagcgcccaaggttgctattagtggtgtgctgggacattatgaaaagacatttgagggggagggaaatagtttcaagcgttcaaggctgagatagtgattgctacttataagttcctgctatagagatgtacattttaaaatgcacatttgtaacactattgcagccttacctactttaaataatgaatctgtatttattccacgatgtcccttcttgcgtttattacctatcagacaataaacccaaaaaaccagtatgcaacctggagcattaatggcccctcaaaacactttgcatcctctcagtaattgatagaccgacaaattgtgtcttgatatcacagaaattcttatatctcacagtacccccaaatgaataagagtacagcaaaaaacagcatacattatttatcagcgacagcaagagtggctacataacaagaatacctaagccagacatacttctaagacaaatttccttctgtgcagccttcagcttctctgccttcaaaacagagtgttagcccactagatttatctgcggatattcataattcgattaaagaggtcccgaaatgaagggtcctgccgggtagatctttcaaaaaactcatcccagtcctcaagaacatgttcgtaatgctcgccggtctcgaaattgaccattacaggccagcggtgcctagcattcccattggcacgccttggcactatttgcaacttttcgaatttctgcatatgccaagttttgaggatgcagccagattcgatggactctctatcggaggcaggctgatcccagacttccctagggtttgcgtttggcgtcgtcatatcagctggtccaagaactttcatagcatgatctggaaatgacagtattccgtataaacttcgtctcctttatttgtgaatatcctttctatcggcacttctgctccttcagacccggtaaggacctcccngacattcagaatgaggccagatgggaatcggacctcgtacattcgttatcgaacatccaaccctcctgaagggaagcaaaaaattcttttcgaaagtatcgaagttccccagagttattagtgccacaagcacaaggtaaagattattagatgttctattgtggcggaatttgcttagctcatagcctaacaggaatggcgaacattgatcaaatgtctgagcaaattcaagccattttgtgtctttgaagatatgtttccagaggtgtgagcctgtgacaaggatattttcaaggtcggttggttgcaggaagtctttaaggtatagccaaacactaagcggaaggttttccagaagcttgtatctcggttccatgttgatgggaaaggaatgagctgttgcctaaggatataggaggccagacaaggattttatagataaattgtttgccctatataatattataatttacatctttacatttcgaactcatcacatttctaaatcagtgtcacaatctacactcttgcagttcgctaaaaatagtacaatagacgattttagcttccgggagcccagagcgaagcaaaatctgccagagaccctttggacaacctgtagattttatctgctctacatttatatactacgcgatgtaaaagctcgtaaaggagtgactaatctccgcctttgaattacctgcctcgcctcggagaccatgttgactgtgggtagcagagattctttgcctcttttgtaaaactgcttggctgggatatcgttcaaagctagcttcgttgcgctgagatccctgggtagtttggttcgatgcatatggatgtagaggtcgagaaggaggcgcccagggggtccatgcttgctgatagggctagcgggacgcttggtagctcgtttgatttggccgatatctagatgactcatggtcagccggattgcggcgttcagtatggggttcctggggcctgctctgggagcgagctttggttttagggtcattcatcttacgaccgcggtctctggtcatatctttccatataccgtatttggcgtcaagttggtccaggaactcggcaattatcgtacgtggggctggatctgggatatgaacacgcagacctccttccagcttgttccaagccatggtgatctgattataaacatcggcaattggccaagcgagcgtttcgtaggaattcctgggcaaactctcggggggttcgtccggcgcgaacatctttgtaaccgtacgacatctcttgcaatcgattcatggctcctgcagttcgtggtttaaaacgggccgtcagggcgcccaaccaacccttttccagtgaggaatctcgtaactgtttcttctcctcctgggttagttcaatgatgtaccattcaagggccgagcctcgtaggcagctgtggatattgactttcacaaccagctcgcctttgaaaagcgccacatcacgaatacgatctgtaaagctgtagatatctcggtaaaatgttttagaacaatcacttctcggtcaacgcgccgtcatcatcaatccgatctgggt

SEQ ID NO: 4895 - DNA, 2961 bp, Emericella nidulans
taaggtgtagggcaatagttaagtcatgagtcccgtgaccacgacgcttgccgagcatcaaagagttggccagagccgtcgtaccggagacaatgtgttttgttgtgccaccagcaaagtccaagccttctaactggaagacctaacctgatgcattccaggtccagcatgcaacggggtcgtagatgatggttctgcagataaagacgaaaaccatgcagggaagcatacgaccacgctctgcaacggcaccaacggcaagtgcaacgctatcgtgccattagccttaatcgaactgcacgttgttggtatactcacgtaatcgcagcaaacattccctgaaagacagcaaacagaagatcggggaccttggttgagcccactgaaggagcgcccaggacacccttgaacccaaagttatccaagttaccaatgtactttccggcagtgtgggaaaaggccaacgaataaccccagaagaaccattggaatgagaccacaccgatagacatcaatgaaagccatatcagggagagggcggacttccgacgagcgagaccggagtagaagaatctaatcaagacagaccgttagtcttagtagtgagggagggtatggttgtttcttaccctacacccggtatcattagaagaactagcgcggttgaggtaataacccatgcaatatcaccagacttgacgctatcagtagaacccagggattaggaggtcgcagcaacccacactgtagtagatgttgagatcctccctgagggagtcaccaccgttcacgccggtcccattgtaggcaacagggtaagtcgacattgtgaagctgtagtcggcgaaggtaatatgcgccgggtaccgtcgagaaggagagaaaagaaggtatcacagttaaggatcctactggtatcggccggccccgtactttctggaagggacagccacgcaggagtagatagggttaatatagagcgaggacgcgcaagagccccagtcaagccgcaatgtcagtaaggcaatgtgaaaaaagaaagtaggtgaaaaagaaaagaggaaaattgcgcatgaggcggggacaaacgcagatgataaataacaatagtcggccctatagtctgacgcgagaagtggtcctgataccagtcatattgtcagcgacgccagctccgtctccctgcagcagactctcacctcgaagtcacccaactgatccaccatcggacgctaggcgcacgccaacccacggctttattgcgtgggatggcttttaggcgtaacgaatatgagccaagcctaccggggcagtatggctatacgagctaacacgtcgtggttgattcgatatccggctcagagcccgggtctgtggacgtcatccgatccagagaccgtcctccggtgcaccgggagatagcagcgactatcagggcagattctctcgatcgtgagcctgacagaggcacgccatgagggccatgcgctgtcggtgattgggtcacagggaaagcacaggcctgtacagagcactcacagaccagcttgtcggtaacggacgataagagcacaaggagaggatgaggcgctagtcagagcactctaatgcgcgagataacttgagattgcggtttcactgactgatcggcgtaaataatgagaatcccgacagaatatgtcaggataaggcgcttaacaacagaagtcctggcatgctggcggactggtgaaggctgtacctaggtactagtcccaaccgggactagcttctaacatatctaaccgttttggaactgacagattcgctgattggtcgatctgcgaagcccgggactggctggagataggagcttgataacgaacaccccggaccatcaactgcatttgcctgccttcaatctacctgaggctcggacattccagagcaagatgagcagcactatcgaaatgaaagaactttggcaggatgatcgttagatagtgtaaagttgacctgtaatagcaatgccggtcaccacctaattagagggagaagaacgcccgacaacccgggatgagtgcagtccagaatctggctgcgactccaacggtccaacctccaactcgtccagccccaactctgtgcatccggattatcgtgccagagaacgctctcgacgccacaagtacctgcatggggtattcctcctgagcgtgatcgagcatcgtggccagagccgagtcctggggcccgtatgaaccttccagtagaaccccggtctgggcgccctagctgttatctatgcgcccccagccaatcagcactgcttgatgttccttatcatcttcgtttcttccacaaattgttattgagtgctcatgtctaggggttgatagacaagaccttggccttcgacaatcctgccaagatcacaatactccgccagcgatctgtcttctgcttctgagggtctatgatgccatggtgatggacactcatctctagagtataccaatgctcccatctgatacccaaaatcacccccaccggtgacttcagagcgaggaatgaggacactagaacatcgtttgtggtgaacatttggatttagcattcgggttgcgtttcccaggtctgcaataggtaggagcgaattctttccataagcggttacgaaataatcgggagtgccgaagaagacagaatccttgtgttcactttgggactgagtcttcacaatgcatgatgctcgacttcgtttccgacaaaaatcattatggattgaccgcccaagcagttcatagtttcttttcccgacaatctaattattatttgtaacatccctgatcttcctcctttttgaacctctttcttccctttaaacattattggtaacaatctttccatcttttattttttctccatttattatttaacattattacttacctcctcatctttcttaactgaatcctatat

SEQ ID NO: 4896 - DNA, 2092 bp, Emericella nidulans
cagaaatgagatcagtagaattcgtacaaatgggattgtcttggtcaatcaagacgcttctcgcagagaagtctgccttacgcggctccaaactcggtggccttgccctggaccaagagaccgacgataagaccaaacatgcccaggacagagctaaagatttcgacgacaagaatcttaacgaacctgtaaaacattagtcgctgcccaccggaaatgcaagaagaggcggaactaacaagctgggatcagcggcgtcggccagagcagcaccgctaccgtttataccaacggagataccgcaaatcaggttgcaggcgccaacagtgattcctccccagaaaagcgcatagccggtgtagtaactgctgggtgaatgaatttcgtcgccggttgcgaggttgagcttcgaggagaagacaatagccataataacaccgtagatagcgacgacttcgcagaaaatgatcgaaatcaggttcttggttcggattctgggagccttgacacctccaccgacaatcgatgagccggtcaggaagatacccctggagatggtcgtcagaaacctcgacctcgccgtttattgagtcatatcataccatgcagcgcccactactgatagtccaatgcacattgcaataccaatattcgcccagacatacggagacacggattcgagaaattggccaacctgaccgggttagcggaatgttatcggaggtttagggtcgaaacaggcatcgcacattgaattgttcgccctcttcatgaaagagcatatctgcagacttcattagcggatctgccagagtgtcttagcagctacttacagcctccgatcaccagcagtgacacggttgcgaaaccaaacggataagagagacccatgatgacccccaacttagcagaccaggaaagctggaggatatcaagtcaagaagtaaggtctcgagcgcgcgaggaagagtcggataacgtagatagacagcagtttggcggacgtctggtctctgaaccgggctgagctggaaagcaacaacctagcacaactcgcagcccacaggtaaggtcgggccgcatttatccgtggggggcggcgacagcaaccacgggccatgggctgcgctacgtatcatactggttccccagaccgtcccatggactagaacatcctcttccaatcgacctcccagatacatcgcacgccgctggcctggtcgcagcctttttcaggctcccttgttttaacttcttctccccttttctttcttcaccacttttctatgaccttaccttgtgcttaaatactccgtctcctatttcgtgcctccaccgcccgacctcccctgactttacatttgacctcttgtccccatggcttcagcatcaacggccgggtcgtattcgaacccgttaaagaaattcaagtgcgttaacttggcaaggctggttgtgtttgactttatgctgactcgaactaggctcgtcttcctcggcgaacaaagcggtgcgcatacactcagtttgcattcacaaacaggcgcacgatttctaatgctatattacagtgggaaagacgtctttgatcaccagattcatgtatgattcgttcgacaacacataccaggccacaattggaattgacttcttgtcgaaggttagtagaactcgctctgcttaaggacaattagctggctcatccagagcattatggcgattgcgctccatggaaatgctaacatctggtgttgtagacgatgtatcttgaagaccgcacagttcgactccaactttgggacaccgccgggcaggagcggttccggtccctgatcccttcctacatccgtgactccagcgtagcagtggttgtctacgatatctcaaatgcgaaatccttccaaaacactcggaaatggatcgaccatgtgcgcggtgagcgtggaaacgatgttattatcgtacttgttggcaacaagaccgacctgagccataagcgagaagttaccacagcccagggtgaagaagaggccaagaagaaaggactgatgtttatcgaaactagtacgaaggattggccataatgtcaagc

SEQ ID NO: 4897 - DNA, 5831 bp, Emericella nidulans
acatgacaattcgcgaacgcatcatacgatataatcaaggcactatagggatcttgtggtactatcggtatggtacagaaatcagtggcggttgcacagccgtggcttgtaggtgacagctcgggcatcagaatgagcagatcccgtactgatcgggcaggaatctaggggacgactcgtcggcgatggtagaatgctatgccgataactccgtggagatgtcgctcatgacgaagcaatgatagtcatttttctgttccacggcggtcgattcctcattctccgcgagagcctgctggagatgtgatgagcaggggtagttcatgaagagctgtgccctaaccctggtcggtctccacgactaccgttgcctcctaggtgcattgcccaaaaaggcgacaccaatgctccattcgtttatggcagattatgatcgtgttgacacaactgcgcccgcaatatatcgctagtatggttcactagtgatgttctcattgtaaggtcgcatggtataacccacctgctaggccacacagcatggccacatagtatggttcacagtatggtcatagtatggtaggtaagcacgataccaacaatacttgtgacaacctgccaccactgtttatcccttcagccggactcgacttcgtccggtcaatgttggagagcgacgatctcgggttataaacgggtgacagttgattaagaccccgaacaagttcgtgagaatcctgcagactactccgcagtaaggcttgatctgcatgtttagtacggagttatgaaaactaatgaaaatcattccatgtgcagtcaaggccttgacaaaaattaaggtccacgaacctctggaggcccttggaggtcttggagatccacccgtggacacgcaggccgttcgccgtaactgaggcacgacaaaacaaaaggagagcgtccagtggagtggcgtgggcgcgtacgtgggctaaagaacagcgcgaatgacttccccacgcactctgacaggccaattgcatgcaagactggaaccctctggactggagaccgtagagcgcggccaatggagccaagcagtggcccagatagcgcaggatcggccagtgaaaaggagtcaatcacagctgccgaggaagcccgacaatctgcttgtgcgggggaattgaatccctgggaaacctgatgcacactggccccattaatatcacgaaagtggtctgaaactttcacactacactctcctggcgggtacctacggcatggtcgtggaatgatgaacggatccagcacggggactctgaccccggcccaggctgcgcgactgcatcagctctggatgctgctgctgcacttggccgaagcctcgtcgctgggcgccctcgagcagtttgtgcgcgtcaacagcctggacccaaccggcgcgatttcaacgccgtcgctgagccgccgcaattccctctttgcaagaagcgagaccgctcgcagtcgtcgctcctacgagaaacgagcgtccgtggcgtcgacctcgcttccgtatcaccatgtccgtctcctccagacgtttggcgatgccggcttcacagcggcgcagatccgcaatgtccgccacgtcctcaagctcatgtcgcccgaagacgtccggtttgggattctgaccgcggcaaaacacgagaatccagatacgtttgtgcttcgattcctgcgggcggccaagtgggatgtgaaccaggccgtggtgcagttgctgggtgcgatcgtctggcggctgaaggagatgcaggtggataacgttctgctgccccgaggggaggcgttcgcgccgccagcgagacggacgtttcgaacccggccagagcagaagacgctcgagcgttcatgaagcagctccggatcggcaaggggtttgtgcacggcgtcgaccggtcgagccgaccggtcctcattatccggatacgccttcatcgcccaggggaccagagcgaggcggctctcagtcagttcatcacgcacctcatcgagtcggcccggttggtgctgtcgccgccagtcgaaactgcagtaggtccctccccgttgttccagttccggctgacaaggccagacagtgattttcgacctgacggggttctcgctcgcaaacatggtacgttcgatccacaggcaagtttctcgctaacaggtccaggactactccgccgtcaagttcattatccgctgtgtcgaggtctactatcccatgagcgtcggcctcatcctgatccataacgcgccccgaatcttcaacggtttgtggctctcgttgcttccggctgtctcttagagacgagactaacaggagcaggtgcttggaagattatcaagccctggattgacccgaggctggttgagaggatccacttcactcgctctgtggaagacctggagaaatttatggaccgcgaccaaatcatcaccgaactcggcggcgacgaggattgggaatatgagtatatcgagcctgagccagacgagaaccaagctatggatgacttggctgcccgggataccctgctcgcagagcggcagtctctcggggaggacttcattgcggctacctcgcgctgggtctctgcagcccagactggagatccagtacagattgacgaggccaccgcacaccgcgaggagatcattgagcaaatccggctgaattactggaatctagacccgtatgtccgagcccgcaataacctggatcggaccggagtgatccaggagggcggctttgtcgagatgtaccccatatcccaaccccagactccgttggccgtgatccagacggcaaaggtgctgcaggtcgaacatgttcgagggagggtcaaggtcgtcaatgtctgatgagttttgatgcgatatgattcatgcccttcgtcattgtatttactactcacttcttgtattttacccaccgaagatatccaagaccgttaatgaggctggcccattgagcaaattgagaatctgactttggcgacctgtcgtttcctaagtgatcttgatcatcgtcaagcacacctatgggatcagtgagaaacatgctagtcctgacggatacacaaaacagcaggcaatgaaggaatcaatagatattctatctgaagacctattattttcctatctttttcctctcaattctattattttattctttccatttacgcttattccatttttatttttgttcccattatttgggattggggtagagtggtgaaattgacagagcccacgctatcaactatctccgtacatctacttagatcctggctaagtgtataccaaaaatagttaaacaacacttggctcaacatggaagtgccaaatgaaatccgaaactagaaattggagtcgagtcgccaaccattcgagcttggtccaaaggaggccaatgccatgtcaagcactcgagaccagcttagcagaaactgactccacgacgcaaagcagagtttgatcctattaggcgtcatgatttcctcccagcaacaggtccctgactcgcccgtaggaagggtgaatgaatcttcagatcatgaagaacttcgcaggtaccggagaggggctgcccttttacgaaaatacagtgtctctccatcgtgcctagtaccatggtaccaggcgagcgccagagccccagcaacagttaaaagaggcaggaatatataaggaatgaagacgaattcagtccctgaccgcagagagggcagctttcagacatgtaaagtgactcactctcgacaatggccgagcctgtgctgtacaagcttcgacactgctggccgcagctccgaagtcagaggaacatggcctacgcgcagtgctgcttttttttctttcagttctggatgctactcgttgtaaccggaaatcaagagcggtctttgtattggaggcaggatatctgtaatggtagctagcgactttctgagagtaacccctcctccatcgttgactggaattctgaatcggctaaacagctatatttgaactgtgtacacaagatagagggatccagacttacaattaagcggctgctagggaagatttgtgccaggtatgttgcctagcaggatcgacccgttgctttacacacatagacaacgcaatcatttcaaggaaaaaaaaaaaaaaatcaaattgacgaaaagatccgtaatagaaagagttatgaaggtcattaagccataagacagcagtataagagagtgtaactggtcagggagaagtccctcactggacaattcgtacggttagtgtttccgagagatgtgacggccacctacgggtacagtacgaaaggcaggatagggcagaaaaggtattttctgaacgttcgcacgcgttctcggtaaatattattcacacaccaggtatctatgaaattacgaagttcgaaggggaagactgtcgaaacactataggcaacatgtctgtacctataccgcccgtactcggagtggggtaatacaggagactgattaactctgaatgaactgagccatagctagtagttcctagcaatataacgacgatctgaagagtatgaatctcgtgattggattcagagctagaactttgtcacaatctcctaaatgaatatcgccaaatctggacggaataaaccaatccaactctcacaccagaatatgttgaaccgaaccgtagtccatcaccaacgtcaccactatcatcatcactatttattccctaaggctttccagtggtatagcagactttgaacctccaatgctcgaagcatatctgcagctctccatcaggacttacatcactctcgtccctggtctcggtggtggcaggggccggattcacgagattctgacgcttggccaggcctggatctgagcgcggtgcataggcagaagcaaatgcctgctgcagggcattgacggcctcaactggcagagtgacaagtgcgccgtttacggtgattgcagcatcggaaggcgaaggctgagaagggtaggcgagggagcaggtggcgaggaccagaacagaggtaacgacggacgagatatcgaagcgcatagtgaaggtaaggtcgaagggcagtgatcttcagtaggtccactttcaggtccaagaaagaagatgatagcaatcgttgacggcaggacagaaaggcgtgaggtaggaatgaaataccagagggtcaggatcgaaggagattttatcaacgtgaaacatatatctgagccgtaatactcatcttgggacgaagcaggtgcgcactatggcataatatacgataatgcacgggactgatatccgtatatagcgcactgagattacctgttgcatagcctgcgccggagttatatttgagcgtcctgcctcttcaccactctcagaacccaccattccgagctagcgacagttagagccgagtatatctaacaatgcggatgctgatatcataaaatggaggagaacaatgtttctacagagtacaaggtttgacgaagacggtggttggctggaacccctggaagtcatgtatagcgtcgtcacctagaaacgcggcgcagggagagaaagacagagagagaattaacttttcttgggtgagtcagggtcaatattaggttgtacgggctcaactcatgcgtaatcctagaatagttcgagactttggctgctatatccgatgataggctaaatgcattacgaggtctagaaggaaggattttgttgacagcagagagataccatttgtacacctccattactaagtataataaaaagtaataacagaatagacagccttgaaa

SEQ ID NO: 4898 - DNA, 6663 bp, Emericella nidulans
ctagggacactcaaggatccctcatgtcgcaccgacgtctccttctcagggctctgtagatatggagcaagggcagcacatgccccatctactatgtccgtatatgcgtggtcccgtatgaaaaggtttatgagtgctgattaaagcttttttggtgttcagatcagagccaagtcaacagagttgatccaggggaccgctttcgaaaacgcatggctccgaatcccttggtaccatcgagtatgcccttgtctcatgttacttcagagattcagcagttactggacccgtcttttggcagccctcggtcgagtggtattgtactacccgactatatcagaggattaccagcccggctgcaaaaagaggatattgactaccttgccatgaaggggcactgacagtgccggatgttactttgcgcaacgaactgctcaaggcctatatccactatgtgcacacgtacatgccccttcttgatctggaagacttcctgcaaactattgtccagaatggcggcatccgtcgcatgagtctgttgcttttccaggctgtgatgttcgctggcacagccttcatcgacttgaagcaccttcaagctgctggctacccctcgcggaaatcggcccgcaaatccttctttcaacgtgcaaggttactctatgatttcgactacgaagttgaccgtatctcgcttgttcagtctctgttgttaatgacctattggtatgaaacaccggatgaccagaaggacacttggcactggatgggtgttagcttgtctctcgctcacaccattggcctacaccgtgatccagcgaactcgcgcatggacgttagacgacaacgaatgtggaaacgcatttggtggagcacctatacgcgtgatcggttgatcgccctgggaatgagacgtcccatgcgcgtgaaagacgatgattgtgatgtgccaatgctgacactagatgacttcgagttccacccattctctcccgaaatcgtgagcatggttggaaattcagagatccttcagagcgtagctcatcaacgagagctagcgtcgatgttcattgaaaaggcgaagctttgtctttgcgtcagccatgtcctttccgcccagtactcagttctgagccataagtttggtggaacgatggagactaccatgatgctcgttccgaagaaatcagcggcggagacgttcgaggttcggcgctgtgaccaggagctggaggattggctggcccatcttccctcggagattcagtatgcacctgcagcaccagcgaagttgagcgaacgccaggaggtcctgcactctcaccgtgctttacttaagatggtgtacttgactacgtcgagtgccctgcatcgaccccaagttcttcccgccgttccgttcccctctatggacacagagttgcaagatatgtctcgcaacaaggttcggttcgctgcaatcgagattacgaatatcgcccaagatctgcatagtctggatttaactcgatatttccccacaaccggtgtaacggtgcttcttcctgccgtcattatccatcttctcgacatcaaatccagcgaccagaacgtccgaatgaccagtttgcagcgcttctaccagtgtatgcgcatccttcagcgtctaagagaaatctatgcttcagccgactttgcaacttcattcttggaggctgcgatcaggaaggccggaatacagcttacggtgccgcctcaagagttacagaaacgctctaataactctggagcttctcggaatacgactttgactcctcctccagattctcttgctcaaaagatacccgatctgacctatcccaagactggctcgatgggaggaatgacactcaatttggtagacgaagctcaaccagccttcgcctctacaccgccaccatccgacggtagcgaaaatggaagcactaacaacatcaacccgaactatcaccgcgatgcattcagaattcccaatattgacgacactgagatgagtttgagccagctcatggatttggcaaatgatgccgaagtaacgcaaaacgactttgatgccctgatcaactttgacgatgctggagcggacttcttctcctctgaaaacggcgtggagaacatgacgggtgacggaaacagcaagaacttcccgttcacattccaggacatggttgggtttgattctgggaacaagagcgatgcaacggcctcaaacggagctgatgcagcgcaaacggaggccccaaatcttgacatggatctcggtctcagtctgaatgcctgagtgttcaagcttgatcatttcctttgcttggggcaggtcagaaaatatgcccggtattttctcttgcatataattttcttatatatatctgaaagcatgggcgatggagttgaggtttgggttacgaattatggttcagggtcttgatttaagcttttacctttttttttttttttttttacctttatacttcttgatccggccaattgttattgctgggactgttttatcactgtctttgtacgaagtctagcaccaaaagtaagacatgagaaatgacgaccatactttgaacttgccttgatcgtagctgctctttttttcataatatttctagagctggtcgtactagggccttggctaaacaacccaagccttgaatcccgcgacgttggtggcgtttatgcggcctcggcattctccgtctgttcttgttaagttgacaagtcatttgtttacattattcttatcatttcatattaatttatattatatcttatgagatcaaccgactaagtctgcgcaggtctccaccccgcttatgaacagtaaactgactaaaccattcaggaaggtcggcttttcaacaatgctgctaccgccgatccgcccccctcccctcatctgtcagcgctccagtcacgaaaatgatgcgatctgcaaggtcagctcagcaagcaaagtccaggcccgcaagctgagtggttgaagctggcttggcttcgctgtattcctgcgcttccgttgtcaccatcctaattgggacggcccgcatgctacctccttatcgttgagagtagctcggtgacatcggtcaatatggagtcgagaagctggctgactgggggcgggtgcttgctttactcgctagtcgatcgatcgatcgtcttgcgtgctattttgtattataaaaaggtctgctgatcccctgtgttcccctgatcctcgctattcctaaggatccacgagagccctgagaaggacagtcacaatgtctcgtctttgtttgatctccctgctgtctctggctgctgcatcattgggtgcagctgaagggcacccaaggttctctttcaacaagcgacagctaccagcggacgcaactggtgtcaagaaattcaagactcccaatggtgtgaccatccgatacaaggagcctggtaaagagggtgtctgtgagacgacccctggtgtcaactcttactctggatacgttgatctatcgcctgagtctcacaccttcttttacttcttcgaagctcgtcatgacccggcaaacgctcctatcactctgtggctgaatggtggccccggaagtgattcgcttatcgggctttttgaaggtttgtactgcctgactgggttacaagaagttgatgtactgatgggcttcttgtagaactgggaccgtgcgctatcagcgagaacctgacgacctacgtcaacccatactcgtggaatgaagtctccaaccttttgttcatctcgcagccattgggagtcggtatgaaggaattgtgtcttgtttagtcgtgcagcttctcactgggccataggattttcgtatgcggaaacagaggaagggtcgctcaatcccgtcaccggtgtggtcgaggatagttctttcgctggcgtccagggtcgctatcccaaaatcaacgctaccctgaccggtaatttctccaacaacgtgcattgtcctagtttagagctaaagctgtactagataccaccgagctcgccgcgaaggccacttgggaagtcgtgcagggctttctcggtggtctacctcagttggacagcactatcaagtccaaagactttaatttatggactgagagttacggaggacactacggtcccgcattcttcaatcacttttacgagcagaaccaaaaaattcgcaacggaaccattgatggtatcgagctcaacttcaactcactgggaattatcaatggtatcatcgatgaggggattcaggtacgggatagacaagccgctcagcaatatctctctgactagaaactaggcacctttctaccctgagtttgcggtgcacaacacctacggcatcaaagccgtgagtactgtcttttcagcaaatggacgacataacttacaagctgaaaacaggttaacgagacagtctacaactacatgaaatttgccaacgagatgggcaacggatgccaggatcagattgccctctgcaaagcaacaaaccgttcttcttttgccgactatgctctctgctcggaggcaactaacatgtgcagagataacgttggtacgtacttctacctgagactctgggaaagtaatcagctgattatcttccacagagggactcctactacaggctacgagcaactcgaggcgtatatgacattcgccacccgcacaatgtaagccgttgatcctaatccaggttctctatactaacataggaaaaggacccaacacccccgaacctcttcgtccccttcctccagcaagactgggtcatgaatgcttcttggcgtgaacatcaactacacctcttccaataacgaaatttactatgccttccagcaaaccggtgatttcgtttggcccaacttcatcgaggatctcgaggaaatcctcacctacccagtccgcgtcagtctgatctatggcgacgcagactacatctgcaactggttcggaggccaagccgtctccctcgccgtcaagtacccgcattccaagcagttccaggccgccggatacacgcctcttcttgttgatggcgtggagtacggagagactcgagagtatggcaatttctccttctcccgtgtctatgaggccggccacgaggttccttactatcagcctgctgcgtcgctgcagctttttaaccgcactttgtttgggtgggatattgctgagggcaaggttcagacctggccgggctattccacgaacggaaccgcatggccgacgcacactgaatcgtttgtgccattgcccacagctacgcctagcaagggtctcttttgaattactgagattctgatgataaagtgaaagggcgtatgattgtatatgctgtatctaataattatggaacaatacatatgattgtatatgattctggactgcttttcatagcatgtcaatagagcgtgccaacatgggaatgcggaactgtcgccactcgccaaaaaaagctatgtaaaccaggtattaattatgaggtgagaagctatggactaaggcgcttcataggccaaaacaactggccatcgtttaacagcatagagtttggtatcaaacagaccgtgtaaacggatgtggtatcgagtgagaacatagctcatcatccaagtgtcagagctggctaaatttgtgcaatgcctaagtcaaaccgagtcgacactccgaaagaaagtacaacatgaccactgattccagacacctatggctggttcatcaagaccattatcaggcatcagagggactccgcttttcaggggtatgttgctgctgcggtcgtagtgtgacatcgcctacctcgatgccagtgacgtccgcgacagtctcgtcagagaactttaggtcttcttccaggtcggtgtgatccttgatcttgaagaagatgattggtgaggcgattagaagggagccacagagaataccccagcaagaagcgaacatgttcatgtatggcgtttcgttgaagtcaaggctagacaatgtgtcagtttctcctgcttattgattggataataagccacttacgcccatgttatagctgcacctgcagactgaattcccttgtagaaaccggcaaagttggccaattttcggctgttgtttgatagacatcccataaacctgtaatacgattagcgtgaagcttgggttttaaagtcggacaataacttaccagtaggcacaagtctgaaaagcagcatcgtagaaaccgtagaacatgtacaagaacatgggcccaatgtagccgctctggttccagtccttgctgcgtcctgcagtctcccgagtgtatgtcttctggaaggcatatccaccaccccagacacccatggtgatagtgaacaggagcacccagacaagcttggcacgagcgggtctcttcagggatttcaagtccagaatcaagccgaaacagaaggcgccaatcatctgcatggcccagtataggatactgttgagagcagcggcgcggggcacaaagtatgagccgttaatggcgttgaagtgataggagtagaaccagttactagccaagaacatggggaagaaagcgacgatataccagtcggtcagaagagtctcgtataagccaagcagttccgacttccaggatgggtttt

SEQ ID NO: 4899 - DNA, 5225 bp, Emericella nidulans
  unsure (1)..(5225): unsure at all n locations
atacggatgcggtatcgaggctcgtcgatatcatcaaagagaacgagtacaaagttggcaccggctttgctggaacacacctcctcggccatacattatccgcctacaacgcctcatcaacattctacaacacccttctgcaggaggatgtccctggatggctgtttcaagtcctcatgaacgggaccacgacctgggagcgctgggatagcatgctggccaacgggtccgtgaatcccggcgagatgacgagcttcaatcactacgctgtcggaagcgtcggcgcttggatgcacgagaacattggcggactgagaccgatagagccgggctggagacggttcgcggtggatgtaaaggttggcggggggttgagcagtgcgcaggagaggtttctgagtccgtacggttctgccgagagtagctgggaggtcagagatggcaagttcatgctgggtgtgaaggtgcctccaaatagtgaggctgttgtcagtcttcctggagcccctacccgtggaaagaaggaggttattgtaagatcagggatgcatcggtttgagagtacgctcggttgaccagactcgattgtatgtctgtcagagcttggatgatatatcattcgaggtaacgcagacttaggcttcaaaggaggtattcccaccgtcttaaagactacgagcgcttgttaactacattatataatacccagatgtgtatcttggccctgcttttcctgccagcttaaccctacttttcaccctaaggtcatgactagtctctatactagttaaaataacttctggaactgtataatgggtacttaataagctatcagagcttacagcggagtcaagggcgaggcttgaagaggccaaagaacgaccacttctctcatccagcaatgactgctccctagccatcgcgctctaggattcatactatataagaaacacgcctggtacgttgaaggtaagcctcttcaagccatcctaatctccttgaggaaggttaatcctatatggactggacgtgttggagagagccttcaagaggctgtctgccgataccctaaaaggctctatgccgcaccagcgtaagtagtgtaccggcatatggattgtatactaatatttacatttgttcacatgttctgggaaattctaactcggagccatgttattcacgtctgaactggcgtaaaataaatacctcggcgtggccatatttgacctttatattagataaccacctagcgtagttcagtttccactcgagttgtttcacctggggcttgtgccgctggagaatatgttccgcccttgattcgtgggtggctagtagatggtcattatatcgattcaagcttgcacccaggcccttgcgtgctatgggacggtttataacaccagggtcatcgctggcaatttggcgcagcatcctcagtctcgtctttgagaagtaatctatctgccagtaattcactactattgttgaatcttaaggagtgctgacacactgatggactcagatttaagtgaaagatctaagagcaaagctgtgaatcatctattcttatctgccggaccaacgcttaagccaaccccttccccttccaacctcctcgcaaaaatcatctgtgccattgcatcctccgtgcgcaggtacatcttcttcccctgcacccaccagaacccaatagcgacaaccagcattacgccaaacaccgcaatggcgtagttcatatccgcgggcttcgggtccggacctcccgggaagaagaaaaacacagttgtaacagcacaatagacaatgctaatccagttgactagtgcaccccaacgcccgagcctgaatgggcccggcggaagcgtgtcccggccgacatatagaagagcggcgatgggaatgccgtaggaaaccgtgagagcgatagtgctgacactgagaatggcgtcgaggacggtgctggcgaagaggtagagcactcccactagcgcgatcaggaagccttgcatccagagagcgcggacgggagctttccaggttgtgtcgatgtgcgcgagatacggactgaaagggaggccgccgtctctagcaaaaccccacgtcaaccgtgatgccgtggtcaagatactgatcccctggcccaggccgttgaagataaacagcgcgagcaaaacagctgcgccctggagaccgacggtctcctgcatcagttcgataaatggtaggtttgcatcaacgacggtattaacttcttggatgcagaaaagacagatcagcatgaagatgaagcctgttattgcgccgaggaggacagcaagccagatcacacgcggggcgttgcggcgcggagacggcatttcctcgaccatgtggatgacagcgtcgaaggctgtaaggccgtacgcggcctgcacgagccctgtgaaccagacgacgccgtcgggccagccggtgcggttcatccattgtccgaaaacgaaggaggcgggctggaaggataaatccgatctgacgccgactgagatcaacagggcaagagagaggataacaaagagcgccgtgaaccagacgccgacgaaattgttcagccagggaagcacctgttccgaccgacaactgacgacattggtcaatgtcaggacgaagacgacagctatgtagacaacaaattgaagccagcccttgtccgcaccgtcccagtctggatcaaacatggttttcatgcctagcaagaactcggtcatgaaggcgacttgcgacgctgtcaaggtccaccacccaaaggtgttgatccatgccgtcatgtacgagagaaagcggccaaagggcgtgtcccagagccggcatacccagtatgcttgtccgagggcagttggcatgctgctcgtgagctcgccgagcgaaacggcgnaacaaagatacagacggttccaggaccaggccccacaggaaggtgatggaggcgccattcgtgaggccgctactgagngccttagcaaaggttgagtatgtgccaaggacacaaaaggccaaggcgagcatgctccagaggttaaatttgcgcgagagagcctggacgtggcccatggcggccaggtcttgctcctcgaacgctggtgtcgcccttagggggcttgacgtgggctttgtccatggcgttctgtggatagataatctcaggtcatctctgagggccgatggagagctgatataaaaggcatgcagcgaaatcaagctgtcttggtgcggaaattttcagattttgcggggatcgggcgaggccgtcatgtgggtctcggccatatcagcatatctcaagcaactatgccaatgatgacatctttcaatcacaaacagctacttcctgcttttgattggagacatgcatgtggtgctggaagtaaatgtgcagcctaaactctggtcctgtgcaaggccaaagctggagatcgtcgctttttccccttccggcaggtctatgcgttggagacatactaaccttccattagacgcgatcgccaacatgttctatcgctttcttgatcgtaactcgatcgttcttcgaagagattcgcggggaaatgttgcagcggttacaaaccaggggacgattatcccggctaagtgggcaaggcgtttctcctttgcttccagccttctttacgcaaaagtcagtgtggcaatgtcgggagccagcgagtatcaaacgcactctcgcttattgaggaaattcagggctggaagagaacatctctactatgtgctcatagctgcattggcgggccgtcctgagcgtcctggtcagaaactggattgtccaaagatttgagcgaagcttgctcgattattgctagacgcttgcagggtcataaggccaaacaaaggataggcctgtcggatacggatgaaaggtaaaccaagaggatccgaaaatggggagctcaaacggctatcaaagagacatcctcgacgacggggtcgaccaccctcgccaaatctatacgtgccggttgcttgtcatctcgctttccttctcccttaagtctgaagtgttcccagaagctagatgccgtatcaagccccataggtactagactgggagccatgacgaaaatgagaattgaattggcggttaagaccagatcaatcggcgtcatcatctgagcgctctcaagtcaagatgcctgtgggattagagctgcaagttgacagcagacaaccgttgaacttcgcagagagaagcagcctcagcagcacagcaccttgctgaggtggtggcactcatgcatccacgaccatcaagtttctcgaggtatttcagggccaaaaagcccagggtgggtgcagtttaactgtttggttacctgtctccccatcagcattccttccacctatagtggtatttcataataagactgaatttcatgtccgcgcagtctcagagtcaccttagtcaggcgagtccaaatctctatcacgagtaccgcccggtagaagtttcgactgcgctcgagaagccgcctatggcggatgctcttactctgatggttcccgaggcagctctgctcaatagcataagctagcgtatagtgacctctattatcatccttgcagtagccgtcgaatgttcgatatcgtcacaatcaagtgtctgcctagtatagttggcaattgtctatcttcatccgagccgtccagtctgaaatgctcgagaggccgtcagtcgctgctcaatcagccaaggcccggccttctcaaagaatgcaatgtctgataatcccaaattatgaggtcgagcaatatcatcccagttataccaatccaggagcctactctttatctgacagcgaggtcctgatatcgaaatcggccgattgtcacggtcccggtcagacgcgccgggagataccttccaagaacgatcacatggcgccacgactagggcaggtatgcatttgatagttctgcatcaaatccctacagagagtgacacaaacgatcactgcggtgtccagggcagcaacgcatagaagggagaatgtaccggatcaaatttgggatctgggatggtcgacattgtgtgagcatgccagcggaagagaacagtcatcagcgttcgttttagaatgcaaattcgatgcagaggcacccctcttcttccctgaggtcatattggcctattggaggacgttgcagaacgctacgatgagagtacaatc

SEQ ID NO: 4900 - DNA, 3294 bp, Emericella nidulans
gatgctgggcctcctgcatccgcactcgcggtctgtctggcatgtaggaaagaatgtgagcagctcggacacggcttcgagagttgtggttggatagacagcggtgaaagcttttgtccgtggttcaagatccttataacgtcatgagaccagtcgtactcagttctaccctgactccagaagcagcctgcccatagttccctgctaatccaaccatatctgccccctacttcagcccacagcctgacagccctgctcgcatcatttagaagcagccccccctcgtacatgtgttcccggagcatggctcaaacactcgcagcctgttcgatccataggaagaaacttgaccccgttagtatcgctctcaacaatcatgcctaactgaggatgcgatgtgaaaccctaccctcccttgtgagaagacctcatgtcaatgatctagagcatgtgcgagggcgcatgaacatggactttgcaccgaattgttggtctggacgcacacctcgcccgtacccgaagatcgacggcttagggaggtctgggttctccattccatcactcaggccgaaagatctcaaaatggatagtgattcctaggtctatggtgaccacccactggtttgatattgtgaaggcatcccgtgggatgcggtacgtgttgtattcaaacccttcgcggctggtgtatgagacggagacaggaaaggccgccgtccaactggtcatctcgtaaaagaaagcacgcagaagagagagcttgtcttgctcggggcaagatgcgacgtgtcttaacaagactgtcgagttgttgaagaacgcactgggtggcggatgggttgcggacagccgtcgcaacgaagatggaatcaacgaggcggctgagatgacagcgccagtttcttgttcggcgaggcagaacaaagctgctctccgggtatatgccggctaggtattgtagaagagctgtgaccagttccagttgcggttttgaggccacatcgcttgggccgcctcaagtctgaagaagtctttacagtaccggccacctgctagcttcgagcagttgaggttgagcgacgggatagcgggttgagaagggcaagagcttgatgaagtggttcactattgagaccatgcccatcataccgtcaaatagggtttcgatgtcgccaaatcggcctactcggcacagcccatgcaatcaccaagatgagggttgacgaactcagctgtacttgttgtcatccgatctagcaagccttttctgaggcgcagacttccccggtcctgcatgatgaatatgtctggcaggctttgggcgagaggacagccacaaccagccggtgtatcctcggcactttgtcgattgtggcagcagaaccaggaacacaggcgaaatcttctggtgtaaatccctacatagctattattggactatctccagtctgaaatgaggtatacgaaaagcccaaggcgaaagagatcagcttaaggcgaggtgtctcgccctcgactctgaggtccccgaggaggtctatcttctattacattatgctaagacgcaggcctacgtgccagcacattcaggcgccaggagtaactccacacgatcgaccaagtcttgtagtcgcatacataccttcactgttgtctgtgggggttccggctgtactcctgtcgttcaggacatgccctgtcggcgtcatgtattccctgtactcgtgatgctgtttcaaaaaaaaaaaaaaaaaaaaattccggcagggatatctgggcagggggcgagtcgcgtaacgacgggcacaaacgacgtacaggaatgactatattagctggctgccgcatccggcccctcatcacagccgacatccgctttatgatctacaagatgcagcttcagcacgagaagatgtcctcttccctccgcgaagccatcaagcgagccactgcctgggtcgccaaaaaagcccgcaatgacggccactggtgtggcgagctcaaggccaatgccacgctgacggccgagcatatcagtctactgggcgcgctgggcattttcatatccagcccgaacgagtggatcaaatggctgctcgctaatcagcacgacgacggtagctgggccttgcagccaacttgccgggcgagatctcgaccagcgtggaggcctactttgcgttgaagctgctgggacagtctccggagcatgcaaccatgcgtagagcccaacaatttatcacctctgctggctggatcgagaaagtccgcatcttcacccgctttaacttggcaatctttggcctctatccgtggagtgcggtccctgaactgccccctgaagtaattatgatccctacgtgggttcctttcagcatctacaacatattctcgtgggcgcgttccactgtcgttccgttgacgatcgtacgccatcacgaggccccgctttcatgtcaacagcatggtaccataggtctgaggcactactgcggcagccattattgcgcacgcgaagcaaactccctcgagtgtgaacaaatgggtcgtcaccaacgcaatcgaatggatcatgggcatgcaaaacaaagacgggggttgcgacgcattcgactacgagatcaacaaggagttcttcaataagatacccttctcggacatggatagcatgtgcggtccctcaacagccgacgtgaccggccgtatcctcgaagcgcttggtctgctcctcaaaatcggcaccgagaccgcatcctacgaggtctccgcctcccttgagacacgcatgcgagagacagctacaagggccatcaaatgccttgagagcgagcaggaatccttctgtgcatggtccggccgatggggcgtcaacttcacgtacgggacgagcaacgagctctcgcggcttggcctctgggagacaaaatttaacgttacgcgcaagaccctgcctcatgagcttgagccgggaggccttgcctcccaggagaaaacagcaatgcggtgtgggtgggactaccaaactgaatacagacgcaccgcaggcctgtagccgtttttttgcagggggacagctaacataatgcccgtttcaggaccgggctgttcatgttagcaaccaattaatcgtaatattatcctcctcccccgttggattgtaattgttcaatagttctctttagaaccttccccccccggtcagttaagacagccttcccggatggtgccaaaatgattaaacttcgctgtggaacctatttttgacacccagggtaaactctccggcccaatttc

SEQ ID NO: 4901 - DNA, 4686 bp, Emericella nidulans
  unsure (1)..(4686): unsure at all n locations
gaagtaagaggaagaaagtcgaccccccccaccctaatgcaaataggccctggacgaaaaacgaagaaatattccatccaatagaacaatgcgtaattaaagggaaggagagaatggagatagggaatgtatatagggggctgatgaagaaaggagtggaaaaggaatagaaaaagtgataatgtgagggcgttaagtttctttcggcaatatgcctaaaagcaagccttggtcccgtcctttttggagcctgacccttctaaaagtcccgaaacctccccgggcctttcccctgggagaggggaggcgctcctcttatctccttcttaggtcgcctggtctccaccctgcttcttcatcttttccggtttggctctccaacttctttccggttggtcctggctttgctgcagcaaggtgggccgccattgaaaagtcaagtcaggttaaggagggcgtagggtaaaaaaaggcgagaaacaggggtttggcgcagtctattgagcgggaagtcgcatccaagggggacttgaatcagagcccgttgtaaagcggcaaagtttccccctgtcgccatgagcgccaacacctgaaagcgcaaaccggccacccgagcggtggccggcagcctcgtagccgcgatcatgctatgtcgatgaatgaaagagaaatatggtaagaatcgaattattaggtcgaaagagtgcccaacgggcaagacgaagcgcgaaggatgaggcgttgcggatgaggcgagagaaagcgatgtcggcaacggctgcttgaagggaaaaaagtcgagctaccattgccaagaatcgaaaattcggcccttttccgccgccttcaccttacccggaccaccgccgctacaattcattcaggtcaaaaagtggtgtccggggtgtcaaatcacctgttgttttcgactacgttctttctttggtcgtccagagctccgccttacttgaggggcggcctgagaccttttgctcgtttttgaaatttgcagtcttcttacccatccgccctcgcgaacaactagattcagtatgaacacattcacccacagcttgcggcgagctcttccatcggttggtcgtcagtaccatccaaaggttcccttgtcctgtcagatacgatctttttcctcgacgcgccaaaccttcaattcgccgtcgaagcagatatccagtgagcaagaaaaagcaggtgcaagcacgcaaccaaatgaatctgtgaaagaagactcgccattgaaagcaattacaaactcaattggcgggaacgggggtgctgtcagcggagacttctcaaagatggcgtcggagttggaatcagttattctcaggcgaccttacagcgaccaaactcctccgcatcacatccacgtctattcgcaccgacacaatacgatacttacacttacacgaccaaacggtagtcctttgatgtcgtttggcaccggagtcctgggcttcaccaagtctcgtcgaggcggctatgacccggcataccaattgacgtcgcatctcttcgcacagatccaggaacgtggtctcttgatggatatcaaagccatagagattattttccgtggcttccaccaaggtcgaacagccttcaccaaggcattgttaggaaacgaggggaggaatattcggggcttggtttgtcgggtagcagattcgaccaggatcaaatttggtggaacaaggagcccgagagtccgtagactctagagtttctttttgctgttcttacatcgtcgttgtacgaagtattatgcctggcgcatgtcgccatcaggagaccgccgggtttgaagacgataaccattttgccacagacggagttgtgtgagtattcgctcgtggtcaggtggaaaaggtcttttttgtagtctagtgtggcctatgtatattatcttgattttcctggttcagaagcctaaacgaaaccccagtacaagttatcaacgaaagaatccagaagcctagccgtccgtatccggtatagcgcggatagcttcacccagctgctgcacggaagctgttgactgaacgactgctccttgtatttgtcaatggatgtgtcggaattatcatagcatcaaaatcttgatcacctttgctcaagcacacgattgcattctcagactttcaacgctttcgctagattttgggctgctcgcggggcagatgcgcctgagcctccctactgttgatccaccggcgaacgttcctttttgtgagcttgacagcggcggcttgatgagcgccagatcttctccaacgggccgtcgtccaggaccgcttggatgcaccctctaaatccttttctccgggctttctttcggagcactgtgccggggcagtgtgtgccagtcgagaatcatgtacgcctcccctcttgcgccgcttcagactgtcgaggatttagtttactcaggatgcattctaggttctgctcgtccccgtcagtgaatctttaatcggatcacgcgatcgtgaatcgtcattactttactccgatctcgtcgtttctgaagagttcttgggcagccataccttatccatctcactctgccgcacggttgacactgagcattatcgatacttgcaaacattccctgggcgtattggtcagtccaatgactcctctcagagtcaggaagtatgggataacggcgtagacgtactttttcgtccacccagtcgtcgacatcctcatgcttgagtgacgtggtgatataatcgctgcaattgccgttctaccaccattatgggccattaaaaccagaaacataacaatggagcattgaggtaatgttcgtactgggtaccgcttcatatctgtaacggtgcataccccgggtctgaaatggatatcgccccctgggtctattccagccatgggcgtgtccagctccataccgtcactatgctactgagtcgagccggaagatggggtctttttgaagtgtatgaaagtaaaattgaggctgaggtttacagaatcaagggccaggtgaatcaaccggtgaacccaggcataaaagaattcccctcatttgatttcagccgcacgcctgacacccggttccgtcagttagcccgcgtctgtgataaagagactactattgatgaatggaatgattggaagacggttgttgtggcgctggtgcagccgtgcgcagcttgaacaggctttgatagccgagggcgtcttggagcgatgtactacgttatgcaggaaacttagcaagaaaatattctcttaatcctgagcacttgagtctagatcattgatgtttcaaataggcgtggggtcctgatactctgcctttacgcaggtgtactgttgaagggaaggaatgaccagaacgtccagcaactttcaccaagagagctttcctagcctgtagctacagtatcctatgcgccgtgtcgtagatcagagggtggccactaattcactttcgcgatctagcaggccggccttcttaaggtcaaaagttgacctttcagtatgacaagcattacaggcatatagccactgggatagctagggtttgcacaaggctgcattccggctgattacagactacgtaataggcttctgacattttatgacgtgtttcaatgagatcacgggagagtttgggacacttgcgcaccgtgtacgcgggtagtactgacttgggcttaaagtagcctttgtctgaatggatctaagccttacgatgtgtagctcagaaacgagccctcacatccccagccgggacaacttccaacccctgtagattgccttcatcccgccatctcccaatatactgcagaaacgagatcgttccctcagaccacgtcacccccctagccctcttcgccttctcttccgggtccgtaacattggcactatccccgtgcccattaaagtacccgggcgtacatccgtaagaacagaatagaacggcggagcccggcgagggatctccgccgtgtgcgcctcttcactatcacgggtgacctcaatgatggctcgctgctgttgcccaaggccctggccacggccaacgcgccgctctccctccccaatcatataggcgatgtgctgcgcaatgaagccaagcatgaacacatttttccccgtaatggttgcctggcttgtgccggagaaaaacaggttggggaatccatttgtcgcatagccatgtaatttcgctgcccccttagtccgccacttctcgtctagagattgaccgtgtctcccagtaacatttatccctgttcgagcggcgggactcccgctcccggctgtgggtgcttggttaccggtcccaaagatttcaacgccgaggaggtacactttctcgcctacgacaagacccgtctctgtcacgcgcgacggacccttgccgtccgtgtcgactagatgcacgtttgggcggttgaatgtttgcagtaagtatcgctgaattttggccgcttgcaccaggatggataccatggtttcagcttggcggccgtatcgggatcgtgaacgagctcatcaactctggcacggacactttccatatgaggtangtccagggcgtgataggcatcaacgtgatgctcaatcccttttgacgaggattttgggacacccggattgggcctgccaacgattggccagtaccctggc

SEQ ID NO: 4902 - DNA, 6973 bp, Emericella nidulans
ttcaagcgtcctggttgtgagccatcctacggatattaacggttacctaacagggaccgagagacatgctacattccctacacacaatggccaggagaaagtgtctaatgcgataattcttcgttaactgagtgcaatcaaatgccgaatatgccacgcccatctgaaacgccaacttggagagcagaaaagaaactgtcaagggagaggctctgtcaaagcaatcaaaagaaaacgcctgctgaaacgtaaaggggatcatgtagccaaaagaccaaggtgaagtcaacgtgcatgcaccgcacaagcacaaacatggacagcgagaggctgctaggatgttttgtgtacggggcactctctcttccgttcaaaccactccacaatacacctcttatggaacttacagagacactctaggcggaccagcgactgcccgacttcgtactcttccatgcagatcgtacattcctgttctgcaccgtcctgaccaatgcaatctttctcggtcgcggtgaacgcgagcatccgcaccgggagctgggactgcgagacagggcttccgctcggcgggcggccgtggttcgctatgcagtcccgaatatgcgcctctcgagcatcttcggctccatccgggccaatcgctggtagctcgcattcgcagattggacagatgtcgcactcatctacgggccgcgatgatctcgacaacccgcgctgcctacttgtggactgctctggttgagtaggcggagcgatcaaggaactggacctgggatagtgaaatgaatgtctcgatgcgttgaccggtgggagttgagagcttgattctgggccataactcagaggacggccttgaaacgacggggagtacgcgcctccgaaaccagtaaaagctgggtagtcgctggatcccacggttctacgagaaggtctagacgcgaacgtgtccggctacagatgtcagtctcctgcatgacttcaagacgtaggtacttacaatcgagccatggtgttggcgagatggagttgatagcgaatgatatgaccggtgtcgggaccagcctgaaccagatccaatattatcgtgcgggcgcacaggaggatacccagccggcggctcaggattcggatcgggaacacaagggttgcagagtctcacttcttcaccgccaccgagggcaggattcaaggccgctggtgacaatgaagaatcgtctctttctagattagcaatctgcgtagcgcgttgcgcaagagcagaagcgcttgaccgatcagaactcgggggatggacaatatattgcctagggattgtaatccgatgcggtgaacatgaagcgcaaacgacccgaccgcatttccggcaatggtgctttctataccagaagctaaaggtcgtctgacaaataggacattctgtcacctccgtgtctggctgccaccgcggtcgattgtactccacatactgattatcaccccgagaccatgagctctgccggcggtcgcgaccctcgcggggcctctgaggaggcgcttctggaggcgacgacgataagtcaattgctgcttcgtaggtcgaacccgataaaggagtatccgtctgcgtctgagatgatgtattcaagataggcctgctatccatttcggctctactgctcgacccgactctgaggggtctcgcatagctcgtatcagggacctccgggttgacaagtctcctcttccggtcagggcctgtgagcgtaggtctccttctttccgcacgtctatctaaaagagggccaacttcgcgtgttcttaaactttccgagctcgcatggaacccgagtccgggggtcggtgtaagcgacagtgacgggtcgggcgtagacggtgggaaattcgacaacgacgacatataccgtacaaacgtggtcgggagatgcgagttcagagacgtattatttcctaaagctccaggagagaccagtctccgtcgtttgcccagcgggcggtcattgactgggtggcgcgacgattccagggtgggacggccggggatgcagaaagcgccgataacgagtaaccgcacaactgacggacgggagacgatctagagataaatacagaggataaggattggagagagaagaggagagaaagggaatgatggggaatgataagaataattgaagagcgtagtgagtcgagacaggtcagttcaactgcaggcggatagtctcgtgacagtcacccagcgaccgcaaggccgcgaaacaccgcgctaatttggaaccagagcgaaatatgaggaacaaagaagattgaaaacaagcaaagagttggattgagcggaaggctgaatccagggagtttgagcctggaacggcgtgcctggtcttatcaccgccgccacaacagtgcccgagaaattgccgcggggctcgcaaaagacaacaaaccaaattgctaccagcgccaagatgtcatctgaaataacagcaagccatatataacccgaatcaggaaaatgatatggtcaaaagtaccaagtggccttgcaggcgcagagatcagaagactcgatcatttgccatgactcccctgcgattgaaagtatgtactctgtaccgctctgctgagtaattacctacatagggcgcccgatccaaagagcctcatggaagaacctcatttctacaaaacgcgtcttacgagtattagatacattatattcttgatcagtacacaagggcagctccaataatattcttttccatagagccaagtcgcgcacaaataaacaggaatggcttcgtaaggtaacaaggcgattaaaatagaccgggatatcgcttcttctgaataaaggtaacaaggagattcgtcatacggatatcaacacatacataaatccgatacgctgctaagccaacatgtatatcaagaagaaatgcgagagcctatcatgtgtatcgtgaggaagcgcgagacggttgcgatcggttcccttcactgggagtctcattcacaagttcggcagcgctttcggtaaacgacggttcttcagcatggccctggtggatattgtcccgggtacgatgttgggcaacatagcctacactagaaggccgctcgatgcgagattgggcggttcgttcgtggccagatgatatggacgctgaggtagaagcaagagagtaatttcgatcgcgagagggggagctgtttgcactgaacggcagccgcgcagagggttgcacgggacggagagaagaatcatcgccctgatcatcttcattgcgatctaacgctccctgagacgctcgcctttcgcttgacacagaaggagtcttcggtgctagtgggggacactgggtatcacggcgggaacccatgcggcttggaagctctatggttccgccggcatcaatgagcggcaagctgagctgcggagactcatgttcatcatcttgtctgcggtctgattcgtgacgcacgctgtcattttccggtgcggatttatcgcgatgagcagtgtcttgttcaccaggctcgtctgtataaggctcatggacttcttctctttccgggataagaccagggggaggcgctctggtacttcggaccacttcgaagcctttccctttatcctttgtctttccgctaaacaggtttcggaagaaccctgtcgcggacgagacagggcctgtaggatccgccggtccggtcttcaattttctagtgcccgtatgtgaaagcggagggccacgaactcggtagtagaagtccacttcacgaacagcatagtccttccgcgaccgccgcggttcgtcgtagtccaagtcgtccttgggtgccggaatataagccggagttggtgtacctcttctggagattgagggtccctcaatggcatcgtcgtccatgtctgcatcccggagaagtgtggatgagcgccttctaccagaatcctccgagaacccagtccgtttacgaggtctaggtgggcggtaatacgggtcgtgcggctgcattgcaaatatcgggccgatcttcggagaattactccctgtcgtttggtatccagagccctggaatcccccaagggtggtaggtgtatataagccggcgctgttggttcggctgtgggatctctctccagcgtcatagatcgcactgcccttgctctcgttcagagtcgcgcggttcaatagtaaagcagaactgccagaaagacttctaggtcgagagccttcaaactgagacgagagtcgatcgtccgtatgtgccagcattgccgcatcagaagccatgctttgccgcgtaacgacgtcacgcctcggaaggcgccgtgacaattgacgcataccaaagacctggaactttgttaactatttgacatgaagtaggacggtcatcaacgtaccttaacaaggcctccgcgagtggcaccggcctcgttgcctcctgcaccaagcagtcgagcagtaacttcgacaagggtctgaagagcgttcaggaagaagccgaaaacgagaaccaggccatgaagcagaagaataacataaccaatccaagcacgagccgcttgcgagatacctagggacggaacaaaaacaatgctaagtagtatcgtcaagaaccgcacaatagaaatgcaaatgtggtaaaggttcatagaagacggagaagggaagggtcggaatgctataatcgttaggacagaaacaacctcacagattgccaaaaggacaatctgggctattcctgacgcttgaactgcgccaattgccacaccacgggcgaaggatatgaatattgggatcacggcataagccgccgcatcatccgagaaagtattgtataacgggccgtacaagagtacggtgggtaggtcatcaaagaggtatgatctcgggcgagtagtgatgattaaccggataatccagatggaaaagcatattaatatgaagatgacaacacctgctagcgccacacaataggcaggagactcgcctggcgacaattagttggaagaaagaaagcgaaattagcggtagaaggaaaaaattatagacgattcggatgacattgccgacagtgaagggcatgtttttggcgcgaaggtcctcttccggaattctggcaagctcacgatatagccagcggaacgcgaaagcgaactggatcagaagtatggttatccccacaatcgaacagagccataccatcatccctggccataaatcgcgcgccccatccataccaacgaatctttccagtctatccaagccgcgggtgccgttgacggcgtaaactccatcaacaaccgggtttctttcagtcccgaagaagctctggttgaacatgagggatgaccaggcagcttgactgattactggctgataatatccggggtaactcagtgataaggcacctgtaagatcatcacactgtatgtactgaaggcaatctccgaacccgggagtcacgaggcgcaggacatcttcatcgcggccgtaattgctggtcccacggaacgggtctgtcgttccccaggggctgtatatcgcagcagaaatagtggccaatcccactagtaccagtatggagagcggcacaaacgccagcacattttttacggttgagcctagatccggggttatgctgacagatatgcacccaagtctatcggcggccgcatcgccagatatgatcgtgaacgttgtgtggagggttgagaagtggtaggacgagaccatgtcatggtggacagagaaggctcgcaatgtagaaagatcggtccttttatcaaaatcacgttagcatgaggtctacctctgagaaacagcctggagaaaggcttactcgtttacataaaacacgggccctagcggacaatctccttgggtcacggaatcgcaaaacctcgatggttcggaatatggcgtgaagctggcgacttggatggaggctataagcgtcgaataattgttgttatcaacatccagatcgatgatctttccaaatgttgaattcgggttatcccactgggggtcgtcgggcgccggatactcggcacttcgattagcagtgccagtcacgttgccgtaaactataacgtcgagagggtacagcgagtttgtcatgttcaaagtaacccagacatcgagtgggacaaactgcaattgtcggggactcgaatcgacaatggactcatccagacaattttcgaattccagcaaggcagcggaggccgacgacataaccgagagtatcaccaagatcatccaccataaacccaacccaaacgatgtgcgtcgccgcgggcgtcgtcgaaaggtatctctccattttcgatgttgtctagtagacggtctgcctaaatgttgctttgattgaggccgatgggagacggtcgaagacagggttcctcatgccatctcgcgttgtaatcgaaatccatcgcgacctttctatatgaatgggatgacccctcgggaggccagccccgtgtcgaaaattcaatccacggtgtctttggcaaatccacaggagcgtgattttttatcaatgacggttgcctgataagctcgtatccgctgcaccgttcagacgacgatgaaccgacgtcggataactgtagaagaggttttattcaatccccgataaaaccctatccggcaatctcaaactccaactgcagatatcacgtcgcttactcctctaggttccgagcttgacagcgtaggggaggcgcagttccggaaacagtggggagacacaggctcgatcggcgaagggaggtaaacacggtaacaagcgctctcgggataaggataggtcacgtcgaagttggaagcgctacttttgcagcctgagagacattattggtaagagaaaaggaagaaaaacattaaaggttggaatgcaaaaaactaaactgtggacggagactgctgcggcagcatgtttgctagaattgctg

SEQ ID NO: 4903 - DNA, 3643 bp, Emericella nidulans
gggtagcgaggtgatttacaagaattcagtccagtgaggtttttagtgaagttttaagaaaccagggggttagtagaaaaccttcccatttttcctatggcataaaaccgttatgttatcaaatagatggggctatgaattcgaaaggttcttggataatcccaaggtaattatgtgtaaaggttttattatctcacgggtagctagggcgggccggcctcaggatatggggtgatttgcagaaagtagactagcttaggccggtgcagttaaagatgaatctgccgtatgtgcttccctacagagcgtttacctgttagagtggtttcttacatgcatcgtttgcatgttagcaagcagcaatctgcaggttgtagatccagcgtaggtcgacagtggttgaaagcgtagtttctcgtgtagccgtcgcggtgctgtgccagggccccatgcaggggccacatcgtgcactggttagtgtaggggtcaccatgctaagaaatataggcacggagatagttgattcgggtcaggacagtgaccgtgtcagctctacaggccttcagcagaataaacgacattggcttcactggcctcgctactcgcactctaaacaaagtgcgcagcggtccagattcgaaaacaatgatgtcattttcttgggctaaagcaggcggcacaaaaaccaaagctggaaaatgacaggtgttcacggatctatctctcaaggtagtcgttaaaaggtattggaaactaacgcaaaaattccttgtctgtagctggtgccatgatgatctgaaaatgtgattgatagctgtaagcgaaaatctatgcttgattttgatgccgcgttcgaccttgatcaagaggtggtagatgtgtgggagtattgtctcgatgaggaagctgtagcgcatgattgccggcgagaataagatagcattatctagtgatctctggattatttgggccggtatagtgatagtagttaattgtgaggcgcactttgtagggggtttatgaccgacacccacgtacttgacatctgaactccatgagccagcaatgagtaacgtaccaggtagtaccatgcatcttgatattattacacacaggtcgtagacttacattggtgcattcatagatggaatcgcattaaattaatttcgtggatatgtttcatcgcacacgtcatgagtgaggactggaatctgagaaatatttatgatgtgcttgtttttggagacaggtcttatataagatgcgcaggagctgtatgctttgttaagctactactcttatgtacttggctgtgaaatggaaggcaaaatagttggtagaatagatcatctaggctactcgaccaagttagacagttaagcttaaatatatgtgaacgatctcgcatctgtcggatcaccaccaacgtacgcctgcttctgccgaaatgggcacaagtctcgcgacgtgccgtcgctacctcgcgtaacatgaagagtatcaggagcactcccttctcaattcactccgtcaactgtgcaagggttgcgttaggaatcggtccggctcaccatggcaatgacgaatccccggagcttcaaaaaatcggaagaactcactggccccagcgtccatctccagcacctgtttgtaatactcaaccattccgcccagtgggatcgcctcgtccgcaagtccatgccacgtgatcatttttccgccccgggctttgaattcagacatgtcatggttgttatccgcgagcatagacgcgtacttggtcttggagtccagaaggagctcgaaaaactcatcctcagaagtatgatggagcgcgaagccgggtttttggcgatgaggtaggatatccagtttccgttagaggcgccctggggctgtgacaggtactgttctgcaacggtggggatatagaatgagctcagaggtgcgtctttgtttagcccaggttaaccggcttccctggacttggaccttggaccttggccctgaccaagctgcttgcaccaccttggcgccggaggaggacaaggagtgttgggtgccgttgcatttatagtgcttcccaacaaaatcgaatgcggccatgttctgatgatgccgtatttggcaccgtctagtcaatcgcaatgcttgacggcggcgctaacgaacgcatcaatctcgcagggggatggatatatctgattctcattcgtgatctgggttggccagtagctcgcggggataaggctctcgatagtgattgctggggaaagagccaagatgccatcaaaggcatcagagaactgctgagccatggcatgaccctctcttccaccgccagagcagccgctgaagtaggtgtactcggcgggtctgttatagtaagcggtgacctgttttccaatctcggccatatcgttcgttgccctgtaggcataagtatgaagcaaaaaaaaactaatttaccttgttctcgctacacaaggcctacgagagatctgttgcgatggtggtggttgctccagcatcactgggaacacctccatccgtgaaggccgaaacaaagccctgagcaaccgcataggcaaggtagattggttctaagcctgtgctataatcaccgctgtctaggctctggaatcggccattctagttgttaagtggtagccatattcgagaggtgacgatgtcgttccagccgaaatgggtatgggtgactgtcacgttgcaggagctgatcgtgtactggcctccgtcgaataaaccaggagcaatgctgagtgctgtgtaattgtgtatgtcattggcttggagatctaggatggtcgcacccgaaacgtcgggctcctgatggaggcgggagagcactcgagggcagtcgctgctccaataagcaatgcgctcagtgagtataacgaagatgtccatgtatctccaaacaggcccgtatccagaatgatgtcagcgttttggatacagaaggacaccatcttgccggttttgtcgtgctaggagtatatagattcgacttgggacggaagtaacatgttagcggatggattgtgactgaacaaaaaaaagcttgatggtggacaagtacagaaaagccgggtgcaaagcaaatgcagaaataggtcttgtgttctagatattccacgagtggaatgctgttgtggctgggaagattataacgatcaccacggcggtgcacgaggggacgtaatggtacaggcggtacagttgcattgaagttctgtcgtagtttttttttttttttttttttttttttttttttttgacttagccgccgccagtttgtgcgccgccacaaatgtcaaccggtcgctagatgctctagcagggaccccttcatcagacttgacatgattcctggcacaattcgcagtcagataacatcgaattccccagctaggctggcagctgttgaggcgatagtaaatgaattcaggctcaaggagttgcaccggcgtgcgattctgacaattgagccgcgctctttttgcaagctggacctctccctcttgctccatcaacttctgagatggcaatgcgcttttggtggcatagtggtgattggtctgtcattataatgcgcccacatcgaagatagaggcggaac

SEQ ID NO: 4904 - DNA, 5355 bp, Emericella nidulans
  unsure (1)..(5355): unsure at all n locations
agggctctgatcaaatcttctctgacgagcttgagattttgggctcattcgtagacgacagcgggtcgtgttctatttcgggagactgctcaaatgtacgaggcgtaacagcattcttcgtctcaggtaataacaacgccaaaaacgcgcccacgatcacaataccccagcccaggatcagaggaaaccaggggttcatggtcattagccacgaacttgcggcgctggaaacaaaatcggcagccatgctcgcgacgccgaatcggaagaacatcacggccctagattcgttagccgagccggggtatctttgcgaacaaacttagcgagtcttacctctcttcctcagtggtaacgtctgccatcatcgtaaagataacggcaatagtaacgaccggcccaccaccgaagaaaaacgtcaaacaggacgcccacgtagccctcagcgggaatacatcgtcgaaccacataaccacaaacataatcacgcagttcaggataaaccccgggatgccgagacacagcgttttcttcctcccatagcggtccgccagcagcccgtatggcgcggccaagatgacacctagtcgaaacatcagcataagcgccccatccgcacctcacactcagccaaacgaggtcaacatactcaacatcccctgaaaaaactccatatatcccgtcactgccgcgatctcgctctgcacctccttgagcttacagagttcctcgggaacctgtctgtcaggaccaatcttggtgggatcagcctgcgcaaagtactcgcggcaagcgatcgactcatagatccttgtcataggacctcccgccatcacgaatcctacttccacagcaaggaccatggccagtaacgtgatcattaatcgcgagcgaatcgcgccattgatgaccacgctttctttgccgctgtagccattcgcgcgcgtggacgactgagaatgtgagggatcgtgacggatgatctgattatgttcctgaggcagaaatgggacgaacaggatgggctcgagagtgtcccggtcgacttcgcgcacatctaatcaggctcgacattagccatgctccagtcactttgccggaccaccacgcatacctcgttctgtaatctcagcgaatgtcagactagcgctcctttggaggtcaacattgtcggaataaaccagagtactcagggctcgtaaaggttcgccggaaaagaaatcggtctcagctcgctatccatcattaagagttagtacgtgtatatagtgcaatgcgggacaagagatcaagacgagacgtttttcgagcggagcgtcgactcacattctcaagatagccgagaaggtcggaaacagcttcccgttcattatcggccaacgttgtgtcatagattccttctctggagcgaccgctgagagggccaaggcaggcggtgatatggcaccagcggtcggctgttgataagcaagagagacaggcgttcacgatggcggccatgactttagagctgaagtcttgcacgacaaaggtaaaaccgcgcgagcgacgtcggtcaaagagcgaaaagaggctggatggccgtcactgagcacggaaagcatacaccggcgaagttgtcccttcctttcagttgaatccttgaacgagccgtcaaataaaaggctttgcagagattggatattccgtggcagaattaaagtagaagacaggaggtacagatgggggtgaaagagagattaaggaagcaggaaggacggggcctagctctgcatgtaggaggagctgggtgaagactagaaaaacaaaaccacggcgagcaatggaaagaaggaagatatagcaatcacgaccggctcccgattcctattccggtgtcgcggactttatccccaagacgccctgccaaagttaagatggcaataatggagaggggaggagtggaagggtaaggtgaagatgcgggagttaagtgaatgaccaagcgggtttagtttgggatggaggtctccagctctggcggctggtgacttgtcttgggcgaatgacggcacgcatatctttaagctggtcacgaagctcacacccaccactactgaatcatactctgtaagctttccggagtacttggtttaaacaaagccctttcgataactgtcaaggttatgcgcacatatttcagtaactaaaagaagaaaatcgtaaatgacaaacggtatactaaccgatgatgagttctgtgatatcgatcggccttatcatacctatcacatcatatcgatcttcgttacactgctatcgagtaagccggtccgaaagatacctcgtgcgtacctagtactgataataggcacttaatgggcaagaatattagaaatgaacctcagttttcaacagtctcctcatttcggctcgtccgcaatcagaactactctgagtacgttccggtagtcgtcatttaaataggtcgatctccattgcatattggacgcctcaactggcgagtcctactcgccatgagccctgagttttgcttctgggaggtacccgtaggtaggtaccgctgctggcagatcagcctccacctttgttatcgaattacatttgcagatgtcaatggaaggcaaatgttagtcggcccatttgcttactcccgcaaaattagagattgatatatattcactccgcaggcgctcggacgattttcgatcactgcctctgtcggctgcagcattcgtattccaaacttgcagtaccgagtatgcctggcgctgatcccgaccaagcaccaggggtcctcatctaaacggctaaaacaaggcagtatcacctaatatcgcattggattggtgttttgaattgctgacatgatttctacagagaccaccaaccaaagaggcctccacttgctggaatattcagaaattgtcgtgcaagaaacgtcccactctattctcaagtgctgtctagaggcggttgccactaaaaccacgtgaggagcacaacgtcatgcggagcagcggagatgggctcatgaccttgaggcctttgagccttgaagcccgtcgtggatctctgcagcggctgttcgagcggaactggacgctgagaggctcactggttttagctcggggccttaaaccatatggccccgcacactaaacactaatggaggattagcccattgactggagagcattttgcgatgcgatcggccgaagggcaaccatggccaccgaatttgttgcccaaggcgtatgggttctcatgtagtagaggcgctctacggtaattagtagtgttagtagtgggtggatgaggatactcagactggagttgaggaacctagtcgacatactccgtcaccgggaataaacataccagagcgggacggttggaaatctggctggacaagatgcatgttttgggtaactctggtccctgacctgaccgcgatttttgagacgcactctctcgacgtcgggtttctcagacaatgttgctgactgctgactgcatcctcaggcttaacagtggttcgagcctggtatgcaggtggcctgatgcaccattcagagtcaaccgcttcgtgttctcgaaacactcaggtcttctaataatgcaaaaaaaagcccatcatggtcagtgacggaaagacattccagtcgcccccaccgcttaggtcctgcagctgctggacgatgaagatcgcttgccatctgactgcagattgacggacggcaaaatgcagaataatcataagaacaaggcttcattccctcattccctcttcgtgcttttcctttgtctctcctctcgcatcttctgcttgctttcaatagcccgagcttgaaccccctttcctgatccgattacggagtaccaagtaactgctctctgatcgagtcaatcccaaaccgcaaaaaagatccattagaggcagctagtacccgcccttcgcccaccgaacgtacgataaacgcatcaggcgacgtcgatactcaagctatttgccgatcccacgaggtacatatatacccagagcttagaacatcaattccagcaattccacgataaccccagttctgctctgctttgttttgcgccattttcctttctccctttgactgtcctttcgaggaccgccttgccctgtgtttttccgccagggactaagccaatgatggcagcctcagtgtccacctccacctcgatttccaacccccttcatcaggctgattcccgtctggggccttttcgccgcctgagccaactgcgtgcctatacccaaactcatttttccgctccccactcttcgtccacatcctcgaatccttcaacatccaacccgcaacagcgccctcgtcgccacagtattagcggtcgtcgactgtcttggttctcccctcacaatacgacgcgcactgactccgctcaaccgacggctgcggatccaagcccatgtcccgacccccgtgctgaaccttccagaccgaatcgatacagcgcgatattattcccaagctcccgtggtctcgacatagactcgcgatctgatactcaaccttccgattcctcgatttcaaattcctcgtcagaatcttcagggcgaccgacaactgaagccatgggcaggctgaggacagcgtccgaatcccatcaaaattctcgaagtgaccaatcgtccagtgcaccagcgtcaactagtattcataactcagcgctcgattcgccggatccagtcattacctctaatagcgcttcgtccgggtcatcggggtcaaagtcgaaaaggggtgcaacgattcgattcttccctcatcaagacccgagtcaaagctcgcgcccgtccttaccctttatccctatctcgcgaactcttccatccgatacctgcaacattcgcgtcggtcgatattctgagcgagatggtctcccacagcccaatcccagcgagccatcggatgcgcctgttggattcaagtcaaaagtcgtgagccggaaacattgtgaattcatataccaaaatggccagtggcatatcaaggatgtcggaagttcatccgggacctttttaaaccatatgaggctaagccagcccggcatgccgtctcggttgtacaccatcaaggatggggacattgtgcagctcggaatcgacttccgcggaggagaagaaatgatatttcgctgtgttcgcatcagggttgagtgcaaccggtcctggcagcagcagccgaacgaattcaagtatgtccgcgtcttaagctcttgtgagctataactaactattgatgtagcaaaaacacggaaagtcttattagaaaccctgggaagggtccncaactaattatt

SEQ ID NO: 4905 - DNA, 1667 bp, Emericella nidulans
aaattatgataatgttatctgtatattacctaaatatataagtaacgtaatcaaccaccgagcggcagataccatcaagtggtggattttcaccctgaccagctcgagcatcattccacgcctatttcttcaactaatatatacaatgccactatcttaagagacttgccttcagatggccatgcaggcctataaagataaaaaaattaagtcaattctaaaggctgctaaagtctacatagtatctgaaaaaaccctatatatatatctaaaaaaaaaggaaactatacacagaagtatatataaatagttataaactaactaaatttaaagaagaattactactaaagtaattattagatataaatatataaagatttctaatttaacgtgaatttctatatagaatagtttaaatattattttataattaattacaagatctaacagcagctcttaaaattaactagtcttatagaatttattaaatattatcctaagatatatatataatatataaaatatattttatattagcatgcaaagtaggaagatctaaaggttatataattatagtttaagactgtataagcaactatttaagagtatagtatatataaagataatatctggaattttattaagacaggctttataataggactctgctctactttaaaagtaattattataattaagtatagtaaaagattatatagagttattcaggataattataaataagttacagttatcaagataattaggttaaaaggtatatatttactactagttattatattaaaagcaagcttttaacaagctgcctagttccaagaatctaagcttccttgtaactagtagatttctactagtcagaatagctagataactgataaaataggccttctttagctaaaaaaaatctttgaactactttctaagtaccatataactagtataaagtatttacttattcttaatagctatagcgattatttaactgctaagtttaatactttctataagaaaaatgtaataatctatctctatatacctgcctatgctttgaattatctttaactacttaatataggtatctttagcctgcttaaaggggtatataaaaaacttcttaaatattatataaaagtaggtaataattatattaataaagaagactttttattgctataccctgacatatatattaaaatatttactttaaaaaagatctgcagcagttttaaaggggtaggacttaagctatttaatctagaatatattcttttaagacttaccttctaattatatatacctatacctatactattactagttaaagacttagttttctctactttttagactctataaaatacttgctagatagattaaaagatttaaagcttataaaatagccttaatagaaaatagcagctttttaatagtcttattatatatatttaatatcttaagaaagtagtataaatattaatataaacctagctacttctagagcaagaaactaagaatttataagctaaaaatagataataatattaaagaaaggtaagaaagtatactagactaggtaataactatcttcttaatatataagaaggctaaaatcaggttcagcagctagatatacagtttaatatata

SEQ ID NO: 4906 - DNA, 1669 bp, Emericella nidulans
tagtacccgtgttgtggcacaggactccgctcctgtgggcagaggatgccacccacgacgggctttttggcctcaagcaatcaaaaggccaagttttgacgttatcctagggctcttcgaggaccatgaagatcgctaggatgatgggcggtgtcttggtattctggctgtcagtatcaggggttaaattacagggcaaatccccggagccaatcattgccacttcaacggcccgcggtactgtcacaccaggaatgaccttgaataccgccgttggtcgcattgactcatgcaagaaatcagttactgaacagaagactggggtttgatatattattcatggccgcgaaggttgggcctttacagtctaggcatgtactgctgaactatacggcgggcatcgtctagatcgtggccattgagcccacttcttacaaaatgattcgccaaattccagagctcgtcgacatcaagatatttttccttcagatggcgaagcagaagggcagccaaggttacacatacgcatgtaccatgtacatgtagttggagccttattcaccagggccacgcaggcactcgtccgtctttgtcccgagtactaatgcagaccgtagaaacagcccggctctggacaagacgttgacatcttcctaagcgatgccgtcctacgtactcagtccacagagcttggtctactgctataaaccctgacctaatggggtccagggttgaatcaagctcaccgcaacttgacctcaattgtcatagcttatgtcttagatggcatgagggagaccaggcctcttggccacgataagtgtcaaatagcatagagccatgtttcaaacatggctttgtcactgagacaagtcctgttagtatggatttcagaggttggagaatgataagtggccggtatccaaccccaagaccactcttatcggttgttggtaggtgcaggtttctgaataactacctatcagatagaggcattgaccctaggcactgcgtgtagattatgctactatacctcacctgatcatgcatgctcttcctacgctgaaccgaaggcgctgcggggtagaggcaccaacgagtttttagtacgcttgtcatcatgtatctgctcaacaagcatgttcgtaaatacatgtcaatggttcatgcaccaacacaggaatcaacctggaaattacaagtcagatacctcctgtcgattcagacttcagcatcgtgcagaagtgttctacagtaaaaatgtagattgtcaaacagtgggtaaccactgcctctgatacaggagtagctcacttattcttatctttacattttagtaataagccgaccaaaaagcaagtcgaatgacaaaacgggccgtgccttctacgtatcgaatataacgaaagcgcactaggaactcccacccaaaacaaatacctatgtagtgcatatatcaaggtaaaatacacccagtccagtctcttacttcccagtcttcgacttcttcttcggccgctcctcctcagacatatcggcgtcggcatcctcgtcctcatcaacaccagcatcggaagcatcatccatctcagcatcgcttccgctcccgctactttcatgcgcggagtcgtactcctctgcaacatctgagtccgagtcagcttgaaag

SEQ ID NO: 4907 - DNA, 1791 bp, Emericella nidulans
atcattctgggtcctacgcgcttggcaacgtggcgccgaacattcaggccttttcagacgcttcgctgctgcgacgaagatcctggggacgatcgagcgagagtcaccgctgaaccccatgtctacagaggtggcaaactaaccagcgtgagaggtgagatcgagctgcggaatatccgccatgcgtatccatcacgaccagaggtgatggtcatggatcaattcaacctacgcattcccgctggcaagacgactgcctttgttgggccatcagggtcagggaaaagcacgattatcgggttgctggagcggttctacaagcccgttgccggggctgttctgctagacgggcacgatatcgagtccttgaatctgcagtggctgcgtcagcagatcgcccttgtcggccaagagccgcagctattcacagcgacaatctacgagaatatcaagtacggcctgataggctccgactttgagaaggagtctgaaagggagattcgcgcccgggtcgtcaaggccgccagggttgcttacgcgcgcgatttcatcaacaagttgcccgacgggtacgaaacgaatatcggcagcctggcactctctggcggccagaagcagacgatcgccattgcacggacgatcgtcaaggaaccgaagatcctgctacttgactaggcgacctgtgcgctagacacaaagtccgcgggcctggtgcatgctgcactgaaccgtgctgcagaggggcgcactacgactgacattgcccatccactgtcgacgatcaataacactcataatgtccgcctgatgaaaggcggcaggatcggagagcgacgaacgcactggctgtggctacacaagaacggggtgtatgcaaggcttgtccaggcgcagagtatgaaagaatgcggcgactatgattatgggcgtgataaagagcttggcatcctgtggcttgaggaggatgactctgacctcaatgactacggcaccgacgggggcgatggcacagatatgcaggctcggctgtggaagcgcgagagtgccatgttccctggcacggccgggccaaagtcgagacgattctcgctctggacgctggtcaagttcatcgccagcttcaacaagaaagagaagtacattatgggtttagggctgacgctctcgctcttcgctggaggcgtgcagccggcacagtcggtcctgctggcaaaggccgtcaacgccatctcgactcctgtcagccagccggagaagctgcgacatgatacaaacttctgggcctctatgttcctcatgacaggtctggtgactatatttctgtttggcacccagggcacgctgttcgcgttcagcgccgagaagctcatccgaagagcccgaagcagcacattccgcgtcctgctgggccaagatattactttcttcgatgaagaggataacaccgccggcactttgacgtccatgctggcgaccgagatcaaaaacctcgccgggatcagcggcgcaacgctggggaccctgctcatcgtgaccgtcaacctgtttggctccctgatcgtcgcctacgccctgggctggaagctagccctcgtctgctcatcggccgtcccattactcctgctctcagggttcctgcgcacctggatcctcagccgattccaggcgcgcggccgcactgtctaccaaaagtctgccagcgacgtcagcgaacgcgtcacggccatccgcaccgtcgtctccctgacgatggagcaggtcatctcaacgcgtataagaccagacagcaag

SEQ ID NO: 4908 - DNA, 5912 bp, Emericella nidulans
ctggtcgcagaaccccgtcttcctcttaaaatgggttgtgtgataagcccatttgcctccagggtgcgttttgtgcccgtcagatacgcgcataagacaggcaagtgagaccatgcaaacgcggctgtgacggaagaggaaaacctttcaggcttatctatttgcttgaattctactgcctgcttgatatggagtgctcgggcgtcaactgtcaggaccaagaatctttgaagattgtgtcagatcgtgcctgagtcgtcgagcaggtcgagtcgttatgcctgccgtggagaattcagctagacctaaagcggcctcccccagcgctgtctgaaacagtatgcctgagccctcattttcgttgtggctgcgatccatcctcagcacatactaccttgttgctttcaagttccgagtctccccgtatctggctcgtccatagtcctcgcaaaaatcccactagtttgcgaactgacatgtcctggaaaagcagatacgcaataccgtaaagtagaataagaaggacgatgtcgacacataagacggccaacgaaaggggtaaggcgccgagccggatgatgatgacgatagtatgagcaatgtttctgacaatgggtcgcaattcctgtggcagatgtgccgtggctaagaactcgtccttccagcgacctcttagcaggccaaatgcgaaccgaaactcgtgcacgggaagagtaacaaagaggtaggcaataataagcaatgataggctttgtgacttcgtgtttgttttcctggacgatgaagtcgcccctgccctggacgggacaacagcacttggatcagtcccggaggctgaagcgctggcttctgcttcccgtctaccttattctccgcggagtgcatgtaggaggccatatagagggttcttccgacgatccacttagcaaaccttcccgaaactatatataccttgttcacattaaaggcgatgatgaccaagggcaagacaatggcggcagatactgagacttggaaaccatgagttcggtggaatacaggaatttttcaagcaaataatactcacacatgatacttgacacataatctaggtgcaaaccgtcaggctgttttgggaattctacaatgtcgatcgcgaagaatgccgccatgaatgaaaggggtagcttccgattgttagatctacatgttcatgatgtagctgaagggatgagctcacaaagatgatggtgacgagtgtgaataccataagcgtatccccttgcctcgccgtatcatcggcctgtctccgtgaggatcgagcttcctgcacgttggcgtgtttttgtttcaggtccagtaggtggttaagctgtgaagagtcagtggaagctaccagtacgaaactgagatcataccgctttgtatgtgtcatttgcatgcttgtccattcttttgatttccgctatatattgcttgactatgcgccttggcctcgagttatcaaggtttctgagtttctcaaaatctctgatgaccttttcttgatcgaggaataggaccattaatgtgtggagctcatctcgtatgtccttgatcttctcaagcaattccacgtctttatggatgtccagggaatcgtactttctccgattacttccgacactttcgtctttagcaacttggtcacggaagcgtcggaaacgttgagcctcgtcgtcagtctgcgtgaacgtcagcgtgccgaatgcggtactcctaaggtgggtgtgggaacttgccacctgtccaattgcaacttcgtaaaactccaggaattgaagattggggctcgtgttgataatcggatctagacaagatgtcaggcatttgcaaataatgatttcggccaactgatggggctccccaatctgggaacggctttgcgtgatattctctagaacatccgttgtgtcaagagcagaagaagcttgctctttgtcctcccctttgctccacctctctgggaagcttgtaatcactgtatctatgccaggtgttagcgatgcaagttagtgtgacctaagaagtacaaggatactaacgatcctccagaaccccagagccaaagttggtccacgaccatcagcactggctcgccaattaatttgccctcgtcgaacatgcgtccgacgagctggctttcatcgcggtctttcgtgctcttcaatgcatgatagaaatattggtcaaggctacggcgaatgtgtagctgatcaaccggacgtcgctccaacttattctgacctcgttgattatcactcgggtctggtcgcgtcatgtacgctctcatgagcgcctggtgttttccattcggcagaggggcgctatgtaaaggcatatccgcgaactgctgcgcgtagtcgttcatttcccggaaggtgaccgcgtactcccaatgcacgtacggcatctattgctgacttagaggcctcgacagcatactgcggaacatatggcataccagaagcacgaagccccctttctttccgcctatggtagtcacaccgtcagaacaaccctacacaccggttggtttacattctatcgatgggcttacctatttcttggcatacgggcctcataaactgagcgtgcggtgacttctgagtgcccttgtgaagtcgctccatccaaagctcatctcggagcactaggtcacgcttaggagacttgaacttttcataccgcagcattaataactgtgagagtaggttaatacatggactacattcaaatttttctattaggcatgcctcaacccagcgcatctaggattcggaaacgttagttatgtcagtgtcatgggaacctgtagaacttacattgttcacgggaagatgcaaccatcgaaaccgcacatcattctcttccattctggggccaaatatttcctcttgaccgctgataactttgtcgatactaggttcgctgttttttctctggcgctgaaaaattcccgaagcaaatttaatgattgcgcagctgaattggctgtcgacggcctcgttaccacatattgattctgtatatagttcaggtgaccgacttaaaccctcaaataatttcttgatctgggacagctgctccttgacctcctcgctgaagttctcatcagagatctcctttagcaccgcgctaataccacgcccttcgatatcagtttttctgaaatcggcgtcctcgcttaagagtttctgcacggcttcgagccggccatgtatggccgccaagtagagcggcgtccgctcgtcgttgtcaggcacatccgcccaagcaccgtggctcagaaggaccgatactgagggaaggtgcccttcctttgctgcatggtgtagtggagtgcggccctccttgtctttgatattaatgcctgctcctcctccgcgcagagacggatgcctcggatcgtctgattcttttggcagattcaatgacgcggagtcgtgcccgtgcgatactgtcgctgcagtcctcatatttttggctccagccttattcttcccgtccttatctttctgcgcaggtttgaagccgcctctaccgagtagaatttcgatgaccgtgttgcgcccaccggcagccgcttcatggagtggcactctccctgcctcgtccatctcgtcgactttggcgcctttatggagtagaagagacacgatcccagtatgcccaccagcagctgcttcatggagtggcactctccgtttttcgtccctctcatcgactttggcacctctatcaagcaatatcgagatgattttctcgtgaccattttttgctgcctcatgaagtggcgttggtctttctttactctttttgtttacaagggagtagtcccaatttggctgattgaccagcatatccagcagtaactcatagccattgacggctgcctcgtgaaccagtgtttcccaaggcgcatcctgcttctgaaaatcgagtttcccaagtagatgcagaacgagcctctccagcttgaaatacagtgctaccttaagcttgctagtgaattctttgggggttggaacacttggcttgttataatgcaagaacacccgtagccaagtttggaaccgcttcgtctgagggtcgcatatctcagctgccagctcccaaaagcgagaatcatcggtacctgtatctcgagcatgattcacccagttagtcgcagtatactgcaggtacttgtgctgagagagataggattcgactttgcgattatcgcggtcctgatcttcagttggctttagtagtaagggcgacttttcgaacttttctgatcgaagataccctatgcacttcttcgcgaggatgagctgcgcgtcagcagacggtcctgaacttgaaagccggattgccacgactctccctgatctatgaccgagcgcaatcgtccaggcctctgatgccgtcgacggcacggatacagttgcaatgacaggctggaaacccggcggaagccacagtgcattatcaccgttccacgtaatccaagacaagtcgctgcttaagccatacccatggcgctccggatgctggccttgaccgtaacttggatccaaagcctgagacgaagaaggggtttccctggtagttttacccccagcacctatctttatacggccgacatccgtatccaggtacgacgtggccttgtcaaaccgcattgcttcaattgtagcgtcaagatcgaatgtatgttgaagggagcgtgcctcgatatcccagatcctgactgtctggtcatttgatgctgaggctagaaggcgggagtcatgcgagaatgaaactgaggtgaccaaactactgtgaccctctagtgtgtgtttatgggaacctttttctgtatcccagatcctgactgtccggtcatctgatgctgaagcaagaagccgggaatcgtgggagaatataactgatctgacccagtcacggtgaccctcgagtgtatgctgcaaggaacctgttcctgtatcccaaatcttgactgtactatcatcggatgctgaagcaagaagctgggaatcgtgggagaatataactgatctgacccagtcacggtgaccctcgagtgtatgctgcaaggaacctgttcctgtatcccaaatcttgactgtactatcatcggatgctgaagcaagaagctgggaatcgtgggagaatataactgatctgacccagtcacggtgaccctcgagtgtatgctgcaaggaacctgttcctgtatcccaaattttgactgtactatcggatgctgaggcaagaagccgggaatcgtgggagaatataactgatctgaccaaatcactgtgaccctcaagtgtatgctgcaaggaacctgtttctgtatcccaaattttgactgtacggtcatccgatgctgaggctagaaggcgcgagtcgtgagagtatgaaaccgataagaccgcagcctcgtgaccctctagagcctgtaaacaaggactccagtgatttgccacatctggtttagtttctatccagttgggctcctcctttccaaatagcttgcggattagactgtcggccgggctgaatacaagggctgatgcgtacacctggagtggagcacacttgattgcagatatgttctgaagaaaaaaacgatatgagtctcgaacaaggtctaataagtcgctgtcagatgactttctctgtcctggtcagtcgcaacatgatatagagcgtcaaaatggatgctgaccctaagcaaaagtactagcctccacatcgagcgtaatgcggacgctgtttcttgtatgagacttaacacctcgagccagtagagtgtggtacttcgaagaaagttgtcaactgacttggcattatcagggtcaatctggtgcttatggcaagcgtcactttcgtaggca

SEQ ID NO: 4909 - DNA, 1332 bp, Emericella nidulans
tctaattgtcaaagcttggtttacttgactacttgatgttgcgacgccatgtatcagtctaataactatagtgtctgtcttgtcctttccgcccctctttgatgagatttattctagtccttgcttctcccgtcagatcattttccctctcgcactctcttactttgtcttggcaagcacaagcgaacttttcaacccgagtttgattgactaattctacgttcaggttccctgattctcgggttttccttagaggctgttctctaatttagacctcgtttgtagcttctttctctattgttatttatgcactttaccttggcccaaccatgagacccgtctctcagagcgaacgcgatatggagagtcatacttcagagatggccagccaggactctccgctgcgccgaaaattctccgaacctctacacacgaagtctgactccaccaaaacaacaccatccccagcaccagatgcttcaatatgtgcaaagtgtggagaacatattgagtcatccgctgacatgtctcttgatgccgccattaaacggcatatggactataaacaccttaccgccaaagatatggctccatataagaatcatgaaaatggtatagattatgagagccaaacatacgatggcgacgaggatgacgagcaggtcgaaaatggagacctggttgttgaccaagccaatggctcaccccgttcagcggactacaatgatggcaatgtcgaagttgccgaagaggaactagcggaacaaccgagacctacattggaaaaaagcgtgctacgcttgattcagaccgtgccggagttaatggtgatggcgaggtgcccgagggcgagtctgacgttgctctctccaaccaactccttttagttctctcgcgatgagtattctgcatctatcgagaagcgccttcacaatttatggaatatacatgatgttcgtgagttcaccaaagactatgaagagaacacaagtgaaatgaacgagacctgggcgactgtattccatgaagcaaagagtgccaagaaacgcaatgctccagaatttcttcagcgaccggatccctacaaggcgacaaaggttggacgcggcgagttccttgagatggctccacttgaggatttcttgtctcaactacgcgatccctaattgagcaccaatgtttgatctttagtcttttttggaaaatgtccttcgccttgtaagttggatatgaataattttgtgagatcgtctagtatcttcaactggttttattgctagtcttttggtacggatgatttcttcaatactttttattgattttctattcatc

SEQ ID NO: 4910 - DNA, 3612 bp, Emericella nidulans
gacttctcacataatagctcgataccggttcccagcagaccagcgtaggctcactacaacacgaagttgttccggggcgacttttggacatatgcacggcccttcactgaagctcaactcccatctggcttataccctcccggctgtggttattcccttttgcagacaatgatatgttcgatattcccgaagcaactgtagccgtcttacttaatggtgaggggctccggtttgcaggtacattgctgccaatagcacgattggctgattcaagaccagttaggactggggtgtgctctgcttccgaagtctcgcgagtcctgggctgaaaactgctagacatgcgtcccccgttcatttccgcgtctgtccggccaaaggctcactccaccatctaacctcgtcgattcgtgggaagatcaacgttccctgcctcgcatattgtcgtcaatgttagcatcgtacttgggattcaagaactgttctcggcgggcaagaaaatagtccagacactgcgtgtgcgatccttagccttggatttctacccgctccttctcgctattgaagaggaatgtgccatattggcacgagtacaaatggtagaggtaaacgccgcagaccccgcttgttgcactcccaccgagatgtaaactgatacagcaattgatatgatgcgtctagaaacaaaaggcacccaggccttgtctctttgggtttggtaacttccttctcagtgacaacgctccttggtgcggaacttgttttcctagaaccaggattgtcggaatcgtactctcggaattctccatctgactcgccgagggaatcacggctagtgttttcccggttaaagaagccttttgcgctgaggaatgcattttcaatggcctttccggcgctaccactttcaccgaaactccgtccagagtcacctccaatcctttcgttctcgatttggaaccatttctcgctgtttaggtgcccggccctatggcgaaacatgtgcccgaaggaaagccaatccttttctactaagaccatgaatccctctaaagtgcggtaatatgggtctaggcaaagctggcttaatgcactgagctggcttgtgcggtcccatccgtcagaacaatgaatcagcacatgcgagtgttgaaggccgacctgacgggcgatcaaaccagcaccgtccagaatacccgcaatatgcttcagccagccgctttttgcgagctggtccctgtttggacctagcggagttaggtcggaatccttaagcgtctcaatcaccttatttaaagagtccctcatcacgtgaatgttgtcaatcccaagataagccttcgtcgcaaatcggtaattgtccatattttcagagccaaggccaacagcctgcatggcgagtgcattgactgtcggtctcgcatcaacgatcaggttatgttgttgcgcgccgtaaatatggggtttcccttgtgcctcttcatcaaacgatgataccagctcggcttctaactcttcggcatttgtaacgtccggccagctttggctaccagaaagttcaccttgagtagatgttgaggcttcatgttccagattcggcggtgtgacattcgcaagtggtctttctgaccttgtcgtcgcaaaaatcgcagccagcagcttctcatcttgaatgcttcgattcccacggaaacccacgaggggctgggagcttctggtgattgaacaattattgacagggtggagatatgtcaacactggtatccgcgcgcgagaccgatatcgtccggcgtaattgatcgtattatccgaaatgcttgaaggcacagcaaacagagcagggtaggtcggagagaactaaaatacagctgagccagtgacgtatcaaaggccgtgatacacgtaccccgtaatcagaatttatgtgcgaaatgcgccagccgtggccgtcgccgttgatgccttggcgggccagctctttgaccgcatcgtaaagctcccaaccattgaattcccgctcaggaggggggggctggtaagtgaaggcatagagcttgtccacgcgtcctatcttgcaggtccacgtttttatgctctcatacacgtccctggccttgccctcgttcgcaaaatagaagcagataaagttgaaatctcgacaccgcagacggattgacgatggttggcgggatacggcgggtgctgggcgatacgtgcagaaagcaatgataggatatgttatccaaatttctttgggtcttacaggtgcgccctgcgcttggacattgtcgagctgtggagggatggcggagaaaatgatatggtgcggggttaggtgaagggtgccgacgacttgttcacgcacggcgtgctaaggtcacatcttcaacctggacatgttgaaaaggcgttagactcctggatgataaataatagttctgtcttgcggatagtgattgggataccttagcaactcgtgttttctccatgccttatcactaacgcgttggcctagctttcatggctggtgtacgggagccggataggccacttctgctcaggaggaaaagctaaggtgttggaagagaagctttataaaaataatagtgtacgctcaaacaaaggtatgtcaacacaagatagaatttgctttcggtgtaagatcagatcaggacaagaagcacggactcggtcaaatgcgggccggggggactcgctaacagaaggcgcggctacgtcaacacctcagttcttactacctaggctatactctactctgtataccaggaaactaacattatttgaatttcaccttcatcttaacggtaaagtgaatcttactttgttagactcttgttaattatctacagaacaacttgatcgctcgatttagtatagcggacgaatccaatttatatttcatacccaatcatggacgttcccagcataccccatatgtaaagtacatgtctatatacaaattacagtcgcgtattatgttagcccaaaggactgcgacacgtcaatttcaggctcccacggatccaatagagacaccaccttgcaggctgtggtgcagaaagagtggaactcttctggaccaagctgaggcgagatggcggagtgtgaaacaccagtgctgctggcgctgtgatcgttcgagttgatctccaagaagagatctgccgtcgtattcgcgccgtacagcccgctttcgtaaggagcgtagaagagttgttgaccgtaggcatcatattcgctgacatgagtcatttgaatatcattcactggtgggtacatatactcccccgtggtccatccatctaagtctggttcagggccggagagccgtaaaaggttgtttggtagcgtaatcgacgtgaaaacaggcagagggacctcactgttgctggtcatgctcttatggaagcaaccttgcaagtcagcgagaagtgtgtcaagacaaggaatcttctgggatcgcgttagaagctcgtgggtcagcttcctggtgaaacgaagatcggcagcgctttccgggagtaaatagtccaccttgctttcccccaagacagctttggcactacggagatccctttagtagggttaatt

SEQ ID NO: 4911 - DNA, 5221 bp, Emericella nidulans
agtaggggaatgggtaagattaaaggagagataattgggagtaaagtaggagataatgttagagacatggtacggtatagaaggtagaagatggagttaggatgtaagagttggattgatcaagatgtgtggtgaatagtaattagaattgtggagaatgatgaatgtaaaaatgataagtggtagtaaagaataagaggggaaattatgtagaaaggatggttagatagagatgaaagtaacaagggagaagtagcaatggagaagatgtattattcactcgaagaatgagaatggactaagtaggtttatcatgtaggggggcggaatggctctagctatagatttgaggagagaggacgatatacttgactaaaatgagcaaggtgtagtagacgcaaaactcttaagaaatagagtaataggagtccgccgaaagacctgtcgttaccagagtttacgacaagtagaaggtgagtgagctacgggtagtactctccccaaagaccatttcttccgagcaacccctaaattggccaaaggcatagtatcttcctcgtaaaacaagcggtgccctatcataaacacgaagcaccgggccagcgcctatagctgaatacgggaacgaccccgaaagcgcactgctatcccgattatgggcccctggcttatactccgccagactgtgcccttctatgcccaatgccatggggtcatattctccgagtcttgtttgacgacggtacgcgatgacgtcaagtattatggatgtaataagagctgccgcgccgataatcgtgaatgagaaaagggccttgaacatgcggcagaccgcgatgccggttgacgtggcccaatatgtggcgttgcatgttgtgagaatcgtgtgtgagacggcccaggcgaggaggacgaaagcgacagccagatgacgaagacgacggagtttgtgattagcgagagacgcggggagaggccgtagcagcagtggaggattgtggtgaaaatgaggtttaggagggagaggaaggcagctataatcagctaagagacgattgttaggatctagtcatttagtaagtgcgttatcggacgacagcttaccacaaggaaagcccaagggaatttctgatcggcttggtggagcttgtaggcgaagacagcgaggatgatggcgacgaggagggatgagaggaagaggacgaagcggatgaagtgaaacggtagggctggatattcggatggtttgacggatttgcgacgcatggtttagatattgaccgatcgtattggagtgtcaggtggatgaagtgcgagtatgaagacgaaataaacaacggattgtatttagtggtagaaacctggcacgatttcggcaatggatgtttcttggccagcaagagacttggaggtaaagaagattatgtcaaaaggtcaaaggccaaaacagatgatcagccccagacatagtttgatggttaatctattttaaggtgaggatctgaggatatgctgccaattgccatggcaaagccttgtttggccccatcacaacactgcctgctcgctccaccggccacgaatctctttccccaccgcccatgcggcctgtgagacgacgtcaacctaatctctatcaacctcttgattttatgagtgacattctacgaggcttacagtgtcagccttctgagtacaacatatgatcacgcttacgtctcagatgccgattgcttcgccatatataatttggctgtccggcattcacaacaagacaggctgcggctcgtgttagtttctccacagtcgtcactggagcccagatcatcaactcttcctggataattctacacggtacctgtcaaccaaccgtccggacacccctgggttcaccatggcaactgttctcactacctccatactttggcgggatggcgaaggcaagatgcaccggcttctgtccatgccctagcaggccaatcacaccgtgcgtctcttaattcggagcaggtctgcagatgagaacgactcctttgctcgctataggaacacttgattatgaacaaagccttagtgtactccctctcgggtggggaaatgggcctggcgactccgacattttgttctagctgggacatcaagactctcgtaaggaggaacttggatccagttgtcaaagtctactgcttagtgccgcaaggactagcaggtaccaatggctcctttcgccgttagtcttgaggaccggagaagggtgaagttacctggtaatacgaccgctggatcattgattaataaggaagatggactcgttcgcgcgagtatcgccctctccatctgtgttggcagcaacctcagtggcctgtcgcacttctacaggtcgaatcgcttaggaaggtcatactaggtaattgtgcaaaataccttggttccaagctcgtctcaggaacatctcacatcccagctgcatcctgaagctatgggctttttgaaccgtgcagagtgtctattcttctcaccctcataaagaaaccaggacatggacccaaacgtccgtggagttccctagagtttgctcggtgcgcagtattgcgtacgctgagtattttggcaatcgattatattaaattttcggcaacctagaaagaacaccgttaccaggttacatattccctagctctggaacctggaagcattgattcatcacaggtagaacagaaatctccatatcttgggcgcatcagccatccttcctcactcaagcattatagttaaagtgaccttcacctcccgcctgtcgcaaaccactttcagttcagaggcatccctaataaactgtctccatataaccgcagcgtcggatatttaaccataaaggaagacatccgagtcttgtgtgacggcggcgatgtttggaatggagatatcaccctattaatggacgttttctgttccgtacatcagatcccaaggaagctggaaggaagctgggccgcggctgccagtgcaatagacgatactctcatcctatgatgggcatgggcttaaacatgcctatagccgtatggttgatgacgatccctccagtctcagcgacgattctactcatacatttcatttacttcaggccacggtacaaacggaaagttcgatataatgactcggaattcgggaatatgagttaccacctcttccggacaaacgaaagggccagactcgaagtcccgattaaaggccttggggatggctttcaactaccggaacagcacagtagtacactgccgctcatagcagggagaatcgtcattacgcccgcccttccgtcccaattcccagtctttgatattagcttgcctgaatcctctggtctgtctcaatcatagaagtagtttcgtttttcgacacatttaatgctttccaatattgcctcgtttaacaacaatgtttgtcactggactaattgctcagagcgaagagacgagctctgagccggagacaatcatttcagcgaaagggcatattggatggcgcattgcagagacttgaaatctcgaaatctagctcgcagattgtggtagttctgcggcagccctgccctggaggtgtctatattcaactggttggctgaaaagtagtatacgagaatttcaactactgaaagtatagctacagagctttggaatcgttcagtgcaattacccaatatatgagtcaactcatttcttaagagctcctctgctagctggtgcgttgaactataacgatctttagtttcggccgccgaaaacgcgtcacggtactgctgcctcattagagctaccgtatctccgctctgtcccctcactcacttttgagacataacccaaactcccacttccgactttgcaactcgagagaactctttcttacttacactagtgcaatttcttctctaatccacctctcgattttcttcttgtaaatattaactcaagcggcaaacgaacgaggacacccagctctcccacgcaccatgtcaacctacgagggtaagaaatacccctccaactcaagagcaaacaccaagctaatcttctaccttcaacagtcgaacataacctcacatcggacccgtcaacctcgcaatcccaatcaacgactcgccgccggcgccccgacctctccactttcttcgcgaccctctctgaaatcacccccgacgagtcccgttcgcgcccctatgccgtgcctgtgcccggcgatgtcagcgctgcgttctattccctcgccgaggcgctaaatatcatgcgccgtgaggggggtggaggaaattccggcgctacaggtcccgccggggacattgggagcttccccacgcttaatccagacgggacgcccattcgagtccacggggatgatctgctggcgcagatgattcaaacattgttgagagatgcagaaacgccgccgaaggaggttgagggggttaatgaggagttttgtgatagtatttccaccctccgttgttccctactggcatcaattactggagaggatattgacaatcatgacgaatagggctggaccgtgtcccgcgctcctcgctgaagcccgaacaggcgtgtccgatttgcagcaatccgtttttagacgacaagtacccactcgttgtgcggttaccgtgccacccgacgcatttgtttgacttggagtgtgtgcggccttggttgagactcagggggacgtgtccgcttgaccggacggatttcgcgaagcaggagagggacaagattgaggagcgcaagagaatagctgaacaggatgacgaggaagagtgggatggaatgtatggttgaattacaaggtatgccaggtcgtttgagttttggagttgatggggttaaaacgaggctatgaaagctaatcattgcatttcgtaaaggagtatctcgcgcattatgttatatatgtacatgttgtatttacttttaaatcgaactggtcaagctgctcaagagctactttgtccatctcgtggtcgaatagccagcttaccagttttatcaataacagcttcgaggccccgctgctgcagcattccattatcatcgcggacttcacgcgcctcaagctcttctatgagcttctggttctcgcggttgccttcaagcaagaacttaaggcacatgacagcatgttctttgatgtaaggattgtgggcatcgaaattcgtgcaggacag

SEQ ID NO: 4912 - DNA, 1132 bp, Emericella nidulans
ctccagaactcagcgagagatcaaacgcgtgtggccacacaccagaccgcacatgagcgcaatatcagcctcattagttgtgacggctggcagactgtctgcgtgcgcacatgctatgacccaggtctcgccgacaaatacaaacagatgaagtccacatccgaggttcctggatggggggtctcaggggacaagatcctggatgaccctgcccgttatgactttgacgacgatggcagcaactcctggcaacaggtgttgattcgcgtgccggggatcacggatttcagtggcgtttggggcgagggcgacggcggcagtagcatacggtaccgcagtgggcaggacgatgaggagatgatagcgcagtaccaggagggcgaggagcagtggcgggatttcagcctagcgcagctaagaatccaagcgggtctgtacctgttggatcgcgaggccatatcgagtctggattgatcaagattctctggctggacgagcatgggcaggttgcctgggaaaatcggttggatacttccacttcagctctgagtcggctaacaggatccctcctgaacgctacgagtctggtggaaatgaccggctacgacggtacccgcggcactctgattgaaaactagacagcttggcggcccatgtgagatgtgagatgtgtggaaagggacggacaattgtcattattggatggccaacgtgtagggttgtcaacccgcaccgcaacccgcagcgggccactgcaccgcactgcagtggtgtggtgcacgttgggaaatctacaggtccgcgcgggttgcaggttctaatagtaggacccgcacaggtttgcaggcctccatgcaggttctattagcaggattatagatattctatatattatacagactagttatatttattctatacagctaataagtaactgaataaaaaaaattttactatatattagccctagccagttttaatctcttaatctatagtaggtaaaaaagatatactactagactattaagaattaatatatttaataacagctttatttagtaatcttaaaggggctataaatgctggcccctggccttaaggctcttattaggggtacgaaggcctaataaga

SEQ ID NO: 4913 - DNA, 3824 bp, Emericella nidulans
cgtttccgcaccccttctgggtagtggaagagaatagtattgttcagactggctgccattgccatcttggtgccgaacgattgacccggtgttacgtgccctgctcttaccccctatcttaagcacggtgcttaggatgagtctatatgtacgtatctcattgtctgttgctgctacgattctggggagctcgatatggtattgtaataatcttaatcagccagcgaggttagaagcttccacctaccatgaggaaccgagctgcaacctgacctaaacatcaatgagagaccattctcatcctccctaagatttcaccataaggcttttgatacccggcacaacgtatatctgcacggcagcgccaataatgctcgtcgaacaagtatgccagcagcgcagttgagcctgcaggcctaaccgctgatcagattttgggttcccatccaaaatcggatcgatttgtttactgttgcaatgagcaagggttcgatatatgaagtatggttgatagttatctggagctaggttaatgatatcatttaattttctgccctaaggcagatcgcctaggtcacgggccgggccttcatcctgcgagccaggctcatggatatgggattgggatatggtaacatttaccagttcggcgaatatttctgtttagtccgcaggcgctgcttaatttggaatggatgcgtaaaatagagagtaggaggctgtgcgctgggatatggccttaggggcagcctggttacgaagagcacctagattaggtacatagtaggggagaaggggtgcgccctatgtgtgaaacaccgagggttgatgttgccgactaccctttcagtcagaacaattgacatctcggacgattattcaacattcagtttgttagcccagcggccatccatcgctaaagctacatagccaaatctagcgagtcagcccgtcagcaacccaagaaggccagaacccagcccatcagcactgggattcggcttgagctatagcagcacgcttagcatctgaaagtctccagagagcttcaggatctggggcaacagcaggggcaagaagggagcgacaatctgagggtcctccacaagtttgcacatgttgtcgacgatgacggcagccttacgcttgatgggcgttgcctgctcggccttaagaccacgctcgagcaagggagtcatgatagcaagggttggtccggtgacttcggagacgaaagtggtagctccgagcaagtgaatggtctcaggaactcggtcggggaaagcgatacacttgacgagagcgggaatgaatttttcgatatctttgttgctgatcagaccgcaaacaatctccaaggtaccagtcctttcgggctgttccttctgctcgggcttcttgcccttcgcaggctgatacggcttgtaaggagttccctgaatgcggtccttgacagggtcacgagtatcccagatgttcgctgagagggcagggatcaaatcgggaacacggaaggccatctgaacgggtgaggacttgacaagctcttcgatacagtcaagagcggtaagcttctcatcggcggtcgcaagtgaatcgtcgatagagttgatcaaagtagggagaacggccttgacagcgttgccgttgatgttcctgacgatggcaacagcagcatcgtgggccacagccttggcagggttgggggtcttcggggagaccttcagaccggaaacagtgaggaggggtccgagcaaagtaaggaggtggggctcaacaccaggggcgatagtagggtgagaagcgatggcgagaaccgcctgagaggcacggagaagagcattgatgtccttcttgttgctgagctgctttgtcaaggtctcaaccgccctgttggaacggtaatggttagcccaccgtttacatgataaataccaaagatcactcgagacgcctgttattactgatcttagggtagaacttacttgaggggcagaacttgctcgggaataggcccggacagcatctgtgtgaggctagtagcagcagcgttcgcctcgtcctcggaggaagcgaggttgaggttcttgagagcggtctcaagcagagcgacggactcggcagtctccttgctggagacagcggggacggaagcaatatcaacggcaggcattttggacgttgttaaactcgttaaaatcgaaattttgatgaaagaaacagagagttttaaaaaggattcaaagaaccgagaacgagcaaaagcgttctatgaggggtatcttgaaggtgacggtaagagaagcgcgccgaatagacagacgcacaccgaccaaatataatctatgatcccttttgtctaaaggacaaggagacaaggaaataagaagagcaaaaagagaggaccagacctctatcgaagagataaggaatatggagggaagaggagggagagagatggagcgagaaaggaggggtgacacttatttatctcaaatttgtgtgggtgggctgcagacttttttctcccagcgattttttttgccgcccgaaaaatctggctccgatttaataaataaaaaataaaaaactgtttctgtaaaaaaaaaagtctaattgtctcgcgctagccatttacggactcctttgcctcaggccgcctttttttttttttcttttcccttatcgctctcaggctgacccataatcttgattgctctcccaatgcctcagaccttagtgcgtatcacccgtaacacatcctactctgtactccgctctccattcataagtatctccattcggctctgtacccggtacagcatcgtgatgcttgacgaagcaatatatcgttgagccgtattccctgaactctagcataagtcccgcacaatgataagtccatgacagcacccttcgcggcaagagcatgtatgccttgcgttgagcattttgactttctgtagactctatttctgacgctattctaagtaagtacataccccgaggtacatcgaagcatcgccgttctattcctgtcgccaccctagaggtcgcttctggacgtgggtggcgcagctaaatccatataacttgctttattttttatttgtccgccaaaagaacggtatgtaatttgtcgacttctggggctaaatttgggtccctgatagccgtgcagcgatgggctctttctcctattcacctcgagctgtcagcatcaatcaacagtagatttctttcacgaggcaggcgtcctggaatgtctttcagccaaggatcagatgtaccgagcacgtcggatattgctcggtcggcgctaaattctctccttggacttattggctggctaaggttcaggggaagtgaagccttgcagacagggcgaagttcacaatctccctgaaataagcctgaagacaggaaataatgtaaacgcatttggactcagtatgcgaggatccctggcacctgaaacgatgggctgagttggacgacagacgcaacaccgccatttgtccagtgttcaccgcatcattctgtttaagttaatcatgacattccattgacgagaaacaagtctaggtcgagatctagtctgctcggcttagagtattgcggctagagaagtgttcctccaggaatgccccttccaaacccttatcgattgttctccagatcttcctccttatcccccgcaacacagccggatggagtctgtggcacagatcatcgcaaaagaaaaagaaaagtatatccaatattatctccactcaaactttatcctttcattaaaatgcattattattattctttcaattgtt

SEQ ID NO: 4914 - DNA, 6158 bp, Emericella nidulans
ggaaagtcacgagcagcttgatgctctggctgaacatgatgacattcagcaatgcaactccgacatagccggcacttatctgtccccgtagcgtgaccaccaggataacgagtaatacggcaatcccagcaaccacgagatctaatgtgagtgtgagccagcgttggatggcatagaggagatagaacggccgttgagagcgatcaagaagctgatactgcttttcctgtagtgcctgctgccacccaaatgctcgtagactggctaagccaccgagtgagtctgtaaagtgcgaataaagtggtgcttttgcctcaaggtctaggaatcgtaattgtctcgaggttcgaaggtatattttctgaatggcgtaaatgaccaagagaacgatggggaaggagattgcggcgtatttcgaggcgatgcccataaaaatcattgagaagatgcaaagaacgaggactatatgagcatgttagcttgagtaatgagatctgctgaaaaaagcttactggcaaatgtgtttatcactgccactgggagttccatgtcgatgagctgcaagtcttggctgaatctgttcaagattgtgccactatctgtcacggaaaagtattgcataggggcactgtctctgttagcacattgcttgtgacttacaaagagcaagtcaccttaaaaccgtgctcagaagttttctgtgaaaaacctccccagacttcggtaccattctgagaatcatttgcctgtttcattatactattagccatcgcattcttgggcattaagttagggttacggttacgaaccaggtacctgcaacaatacagagcattccaactcctccaagcatcgcgtacacccctaaatagtatcctgtgtgcttgcctggattggtttcgttggagttcgcccaccacttgacccagatacctgacccaataaagttagtacaggagcttgtgtgattaacaacaaacttactgggaaatgatatgcagaatacgaagccagtaattgccactgcaaaagccactgtttgaagccacccaacagattgtatatagtataagtagatcgacatgtcgccatctcctctatagctctccagctctacatcggaggccctttgaggtgggtattccgagacgctagacggctcatttttgtgcattgtgcttattttggtgtccacaccagctcggttcaacgcaaaactcgaaatataccctccggctgcattgagagaagagaagctgccttgttcggtgacatatccatgtttttcaaggacaattatatggtctgcaaaagggactcgcttgactgttgatcttattgtcagaacgtgatgcatatattatggaggcgaggtttacctgaggaggaggcgaataatatcgtcgcattcaacgagcgcaggaggccgtggtctcctagcaagtgatgaaatatatgattttctgtctcggaatcaagactgctgaaaacatcgtcgaagatcaccagctctctccttgcgtatactgctcttgcaattgcctagagaagttagaatcgtcgagcttgggatacatgatggacaaacgggacgtacaatccgctgactttggcctccactcagggaaatgcctttgcttccaatgatggtctcgtcgccacagggcagttgctcaaagtcctgagtcaacgcgcaggcatttatgacggacgtgtaccatgcttcgtcgaaggcagacatagcaacaatacattctcggattgacgcgttcatatgccagggcgactgatcacagtacgcgacgctcttcgtcgatatgtgaatactcccatcctgacagggaacttctcccaggatggctttaagcagcgttgatttcccacagccggatggcccaaccaggattgtcaaagtccctgaagggacggctatagatacgttcttcacagatggttcttcttcggtgttccacccaaacgagccatcttgaactgtgattatatgatgtaaaagagaggatgctgagcctttagagaactgtgaagagcctgactcgctgaccgctatctcagactgtgcaacgaaggtgagttgtttggacaatttcagaggattgaaagggtgtgttaggacttcgtcccttgggtcgacatgactttccttctcgaggaaggcttggatccttgaaaatgaaccaacagatccagcaaaagccatcatagccataacaagtgacatgagtggatctgctaaaagagagaaaagggacagtgcggtgtagacagtcgaagtatccagcgcagaatcttggcctcgattatgcgcaatacctacgaaggctccaaatgcagccattggtccgaagagtcgagttatccaggctatttagaagtggttagtgttgaatacaagcctatagagtgacttaccgaaagccatattccaaaccagaagcttcctgaatctctttgagattctcagctcatctatccgcatattgtgaacgaatttcatgagaaaagactgaagtccaagcatcttgattccttttatggagcctagcattgacgaggttgcagaaatacgtctttcaatagcttcaagccacatagcttgccttgctgctaccaaaggcatacagactgagcatcccatcaaagccactatcatttcggaggcatatagttagcgaggcgctgaggagtcataacgtggactaagggtcacaacctaccaattgttactcctacaggaaccacgcaagcaacgcctagctctctttctaagaggaaaacagccagtgctatttctgcgacattcgcccacatctcgtgcatggtttgccagccctgaacaattcgctcaatatctgcgctcatgagggtaattgattcagcgggatcagcgtctttgagatttaatgtacacgcctttctgtaaaccattgatacgatggcccctcggaccattgttattgcgcggtaagtcagatgctgctgttgtcccattgtaacctaaagccatactgtcagtatcgtccagatgcagtaaagtcacccactcactcccaatccaatatatacgagaacgtatgcgccaataaatccataaccgacgttattcgttgtactgttgactggctccatcgtaaacgacagggatctatgtaacagcaagggttgacaaaagttcagagcgacaagaaaagctcgatagggaacggctgcgcatatctgccatttgaatgttttcatcgtacagacaaagagggtatttggctcttttaaggaaactagaactcgttagcacaagactgagagctattcatcaagctccgtagatacccttattccaagctgcttctagagccaagtgtaaacgctttgaggatagttgtttgtcgagaacaaaaagatcttcgaccgcgagagactgcgacagaccctgccggaataatggattcaaccaccagaaaaatattctgttgaatatccccccggttgcttccggtggataggccttgtattcatcgcgcagtatcgaccttttgtcggaggattcgagaaagagtaggaagagtttgaggccaacagtaacagatgtcaagatcgcaattatctggctagtgcctccaatatgccagagccaaagcgtcctcgtttttgctatgtcgaaaagaagagtgataaaaaggtagacattgaggaggaaggatggtggggtagagaagttgtgttcggcgtacgagaggaggctaagtaggaagaaggcggaggtcaagacggcgttgacagcaatagaggcatcggtccgcaaggctgagactgacgggcgtgcccattgtgtcgttaagcccaactgcacaatccctaagcagatccaggtagactgctcgggttacaacctgatgagtgaatggatttcgaagtttcgatcttgtaatgagttctaactcaccaatttcgcgtactccaaggcagaaggcaccactctgcgagactttcgaaaaagatgccgtattcgccaaggcaggattattgctatgattgctagaggtaaagaacctaggatcacttcttcgaagagaagagagaaatcgaatccccctcgacatgaagaacgaactggatgtagcgaattgtccgcctgctggcacaaagaggtggactggaacgccatcactgccttctacagcagcctcccatgagaaccttgaaaggtatgtatgttactgaaggcataagatgtcaccttatagtggcagaactttcttggacttctggaggcctcgcctaggtcttgccaagttagatctatatttgctgctttgtttttcttttttggggccccaatggggcatttatcaacttagaggatatcctgcgaagggacccacgttttcgctgagcatacttccaagagagaaggtgtatggacgaactatagtacatgcccgtgtacctgataggcgctgcccacctagggaagtatcagaagttacccaatctaggccatacgtggatgtgtgatcgcgaacgtaaccaatcgtaaaaacgttggttacttcgtatatctgacctcgccacaaggagagaaaaaacgcgatctttttggcagctgagtagcagactccaaagtcactctactttggccgtgactgaggcatcagctttcggcctctgccgcctgggggctgcctgattggttctgttctagagccttacagtcgagacctgacctagcgctttgcggaatacaatccttggccctacgcagtggcaataactcctgacccctcgcatagccttgggtgacccttgagtgacgggagcaaatcgccgaccaacacgaggagacatgctgtgtaaccttaaagctgtcaccgaggcgggcgaatcggaggttattgaggcgcgcttgcagattcccaatatatgtgaggacgttatggatggatgaagtcagagttgggtagtacctatacagcgtagtcaacctttgcggaggagcggaagggggattcggtttcttcaccagctcctgccttccacctttggctgttcatggtagcactgagtctggcttgatgtcaggggcaaggtggagttgctcttcatttcgaaataatgcacgaccattggcaagcaatcgattattcttgccttgatgcttcagaggcgcgcatgatcatcccggattgaaaacccgacggctcccagctggatacggcaatgatcgtttctgcagccatcaggtagtctaggcgatggttaccccaagagctcaggcgctctgacagtttctaaacttgactgggatcaaatcatgatcaacttctgaaaaggttttacgtcaagttttttggtcagcgctcttccgttggtagcccgtgggtgaactcacgccgtgactgacaagaggccgagactcgttcgccaacaatacccttgttcctcgctgcagagagcccagcaggatccatctcgatgaggcgaacgagaaaccgaattgttcgccgacggcggtgttcgccaaccggatttcaaacaggccaggaatataatccttgtcgagcggggcgtccggcacggccgagatgtgctgaggatacgtcggcccgcagtattgaccaggctggagccttgctccacctcgagtctcctaggagcgaggagcagcaagcgggttcgagaaccgatccttgatttgaacatatgtacgtacctcgaagaagtatcgtcattgagtgcccagactcgagttgtggacaaggcgagtgttagtgttaagtgttagtggcggcagatggggagctcggcagggcaggttcaacttggctctaacaccatcaaacgcgttggcttatttgtccccatcgaatatcgttccgcgtcttccgccacggcagcctttcctgaacaagaataagcgatgttcattgcgggagctaaaaaagcaaatctcacgtcctctgtctgatctcccgcagaagtactatagcaagcaggtaacacgccgcgtacccataggcacggacattttccgagcaaacatggctctcatccatgtcacctttacaaatcgattttagaatttccaaatgcaccgttcctaccgcaagatgaatagtctaaatgtttaaggacatcatcccctt

SEQ ID NO: 4915 - DNA, 2834 bp, Emericella nidulans
cgttggcgggagaacgaggcgtgggtcaatcccagcttcgttcacctgttgtgagcttgaacactcaggctctcattccacgtattattcggccgtggccggtattaccaatacagcaggcgataagtcatcatcgaccccatccgtcgcattccagcccagtgatcctcgtgcatcaagcttacctccgaagcttagtcttacaacatgagcggcgcagctgatgaccggtaatttctccatcccccctgctactttccctgtcatcgtcaactcgaccactgacttagatccagttccagttggcgcggcggccgtgcgttcgatcagaaccgccaatccggacagcggcaaccgaactccaggacgatgagcgcacacggcgggtcccgtggaggccagcagagctcgaatacgtcgcatactagctgggcggatgaggttacggctgcaagtcaagaccaacacactccggtaggaggcttcaatgctgcggaggcgaaaaccgctctcaggagaggtaagtgcccggttgttgtggtgtcaacatgttcactaacgagtttcttcactgcagccccaggaggtatgcacacttgccaatcctaactcgacgttgtttccgaatctctcactgaccgctgtactttagcgcccaaaccttacttctacaaagcccaaggaaaggatgcaaacaatcgtgcgagtggaccgtggggctcgaatcgtatgctacttctgtcctaaggacttaggtataacgtcgcagtgactaactcttcgtagcgaataccatggcgagtggaaaagacttctttctcgagcttcgaaagcaagtgactgctctacgccagggaggaagcgttgccgggggttgatacaacgaatactggagactaaagcgcgctggaacgcggttggggcgcgaaagctccgacaaaatacaagattctgccgatactctgattccctggttatgtcttgacgaccgatgagaatttggccgttgagagtgatctcgctaggttgtcgatcggctagatgcatgtcattgcaacaatgtctcgaaactagacttggcggtacgaacggctgacatatagcattgcgttacctgggtttggcgtacctacggtagcgcggaacaactgatagtaatgacaataacatgatcatgaactttgacaagagacgagtatgcttagaacgaacgaggttaagaggcgaaaggattaacctgtagctaggacactattgtgtcccgtacaagcctgtttccctgtccttttgcaacctacgaagctgacgagagcttttataggattcctgcacaaatagagccatgtatccctaacacaaactcctccagtacccctaacattgcggatctcaatgggctcctggtggtcagtgttgtgtatgatcgatcttaaccacttccctcacatatatattaggaggcagggaacagggccagccagggcggaagagagcacgtcccttattcctgctgcccgtagtttcctaactacgtccgacccttgcctacccctgggccagttatctagacgcactttgatacgcctgtttagcatggtgccgcatattgactcttcatttacagcgaaaggatgtgatccctgatatatgaagtcaacctgagttgatatcccagcgcaggtagtactctgacatgacgaagccagtcgctgaagctatcaatgaactgacataccgacaaagcttcagaaggggatcttgatagaggcaggacccgacctgactctcaatgaaccatgccattctctgagtgccaggtatcctggtttgattatctatctacccaacgtgacaacatactctcctccctcttccgtctccaggcccttttcgtatttctccccatcgacaaagaattccaccccgtcatgtactcggaccctcagtgcgcccccagcaagtgaccttataactgccgtccgcaacctcccgtcttcccaatctatgtcaaccgtaaagcctcctctcgccatcaaccccctcgccgatcccctcggcacagcaaccgcaggcaatgccggcaagagatgcacaacacccgcgtgactctggagaagcatctcggtgatcccacttacaaccccgaaatttccatcaatctggaaggttgccccatcatccgtattccagagagtattcgtcggatagaggctaaaccacttttcgatctgcgcccaggcatcgtctcccctgtatagccgtgcatattggttgataaaccatgcattactccaccccgtgcttccagagccgtggctaaggcgatcttcaaggaggacttctgccgcagcgctgagagtgctatttactagtggcgagaattggcctccagggtgcagaccgaagaggggggagagatgacggtggccaggggcggacgattcatagtcaagacgccattcctggatttggccctggaatccgatacgtggtggatggatcttgtggaggaaggactttgcggctgaaactgtatggtcgtcgtcggcgattccgagttctgacgccgcgtcgagcaggttgtgcaggacttcccaaataatctggtcgtccatgggaatagcaacatccatcgctgctttgttcccggcaacggtccagttctctggaatgatgaaggtattctccggggagagggagggcccggtcactttgtacccttcgtgctcgaaggtatagcactggtagaactttgcaacgtcgacgagatacgggtagatcgtatcagccaggagtgccttatcgccagtaaaccggtactggtcgtataagtg

SEQ ID NO: 4916 - DNA, 2677 bp, Emericella nidulans
tcgtggtggaggacgtggcccccgtcggtgaggctgctggggatggtcacggtccagctgttgttgttggagatcaggttgtcagaggcccaggtgccaggggcagagctgccgtcaacgagtaccgctctcgctaatcttgacccattcgagggtggtcttgtcgacggttgtgcagtcaccgttgcagctggcaatgtagtcgatgacgggacctttgcatgtataagtgaatgcgatgttcagagagctaaagtttgtactcaccgtggtgggattcaggccactcagtccactgcagctcaacggtgccaccagcagcgacggtggcagaagcctgggcgttggtagcgtccttgtggcagatgatatcgccagaggtgtagccggagccatcaacgaaacccaggtcggtagcatcctcagcccatccaacaactgcaggggggtcgttgctgtaagggtactggttaacgaggtaaccgccgtagtatgtgccgtcagcgacgattcccgtgacataaccgtgaccggcgacgatggccgcggaggcgagggcaaaaccagcagttctagcgacagacattttgttggttgtgatttggtgttttaaataaacgcacagcgttcttcaacttccgaaggattgaatgagggtaaggtgtgaaaagaatgtccagacttcaatcaatgaagtgggaaagtaagagaacgaatggatcgttgatcctggtgaaaagaatgcaagggttggtggtagaaagaagagaagagcctttactgtcgtcgaggttgaacgcctttatatacatccatgtcccatctgcccacaacggctctcggcttcgaaagctcggatcaagccaggcacacggccaccagcgaatgaaggttcgttgttggtacttcccggccgcatctagattgcctcgcagcccaaaaaaatttcccatcggagaaccatggcgagaggtctggtgtggcccactgtctgaaatagatgaaaggttaagtgctaagactgggcgatgggacgccgatgtctgcatagattgacgaagacggcttcccatcaggagaaacgactatttgaggattagtgcgtgtgccatggagtgcagctgcggagacgggggtcctcacgatttcaaggctgagcgcgtctaggttcttttcagagccctaagatgtctgtctctaacagcctgagtttcagcttaaacgacagggcgtccatatcctgtccctgccaagcatccccgtcattaaactattccctgaattggtggagcaggcaattccaaccgcctgttatgacatttttgacagggcgacggtcaaaagcgactccacccaagctcttacaccgctccggagcttcttctccgtagaaatctgaccagtgcgctttttgttgattttgagacgtcggaactaagaggaggtgttgtagactggaggaagaatcctttcgtcagtcatccaaggtgagggggtgaggggttgccacgtgccggctgtttcaactcaacaaacacttacaatcttgggacgttcataattcatcgaacgccatcatcatggcatccagattttccctcatcaaatcgcgacatatggaaccgaaatcatcactttcatctccgagcaagcgatccgcagggattgccaccggagtgtgcgcctaggagaataaatgatgcagcgctaagaaagcactcgtcaatatattggttaactatgatacgttaaagccgtgtgactgctactgacagcgccggataaattatatgagtccactgctaacctggcaccgaaatgcaagcaataagcgccggtggggatgtgaatcgcttgcatgatggcctctacagtaggcacggacagtttggccgaatgacggcatcgacagggcatagcctcgccttttgccttgtcgtcaatgcatgcgtttcctctcatacttcgatggcctgtacttctaccaaagcgaggtcgttattttgccctcaaaatttcggatctataaagcgcgctcgccgctcggcatccgaccgagccagtcgtaccgctgttttcgaatgacgctacgatgatatccgcggttgaatatattggtcttagtatttagggtagcagccgggagattgttcaatcgcggatcgactatcacctgctcctggatctgctcctggagcttgtgcccgtttagtggccagcgttggcgagcgttatggaaacccaaagacccgttctcttgtcgggagaactctgaaacgcctatggaggggcgaggcctctatgtctcaggtgctggtggagttctggagcatgccaatgatgtccaggtatgatcgtggcccgggccctctttcggccctggcgtctgcagtttgcatcctctcataacggccatgtcgccgatatgcagaggtatacaaaccagttcatcatgcatcttaaagcgtctcccttttgaatcacctcccaagtttttggctagaggttcgctcaacatgcggttccccgttgacggctgggagctatgtacactgacagtgtatggtcggtgattgaaaattgagctatcaataagtaaagagcgcttttctgtcttatcggctcatatatcggctcatggagcggtggctccaccacgaggcttgtcgttgcatgt

SEQ ID NO: 4917 - DNA, 3101 bp, Emericella nidulans
cgtagttaagagactgttggaagaggcagaacgatcactctgggtcctctaggtaatgtgcgcctacatattcagcctctctagtgcaatagggtaaggtgcttggtgcaagctactgtgggctcgtgagtttattactggattggaggccttgggagtattaaatggagatgctttatttaggtcttcaggggacaagatattcaaagccgcttctctgccgctagaataaacctcttggtcactggagagtgacaagatagttaatttattggctaccgcgaaaccactctccaagccgtgggagtggaactccacaagctcgtcaagacttgcaacgcctcagtttgccaactacaaaaccaagcatcctcagtcaaaaagcattctgaagagagggtcttgaagtcttttaaaaatgttgccacctgctcgtgccgtcattgggtcactggagatgaacttggcaaggagatttcctggggacggagagtatgtgaaagtggcaagtgttgtaaaaagtaatatgccgggaaacagctatagagggaagaagagggcgagacgagtgagggaagaaaggaagaggagaaatacgtcggcatgctttgagtgctggagtggctttgatgtcttgtctgaaagcacgctcaggatcgggccaaacaaggaagatgcttgcattgcttgggccgcttgggcgggtgctggggcccacgctgtggatgcatctgatatagtaaatatagtagacgttcactaagagccacatgtgctatttgactcatctcgaaccctttcagttgttcaggccttttccgataatctggacaaggagcctgctgcttctaccagagacaatatggtagatgagattgaagtaacgggatacccttttggctgaaaatcggctccctatcttatctgagaaacaccctcgaaataatcaaaatctttgagcagcggagagacaaccgtatcgaaaaccgactcgtcaaactgcggatcctcgaaccgctcgcccttgttgcgagaccagtatagacactctctgacgacgtcgccgtagttcgatccactttcacagtatacattgcggagaacccgggtagcagtgttgaacttcacttggctttcgtcggaatcacgatcctcctgtcggtagagcgcggatataggtttccccagcgatagctcaatcagagcaattgcaagcggtagcaaaacctcattttggattctgttgctggttgacggactaacgccgttgtaagtgcaggagctagaaacgggccagactagatatgggtggtcgaaggcgacggatccatgaggcgcgtcccgagcgaaaagaacatctctcgtcccccattgttgcttcagccagcttccatgaagttgcaggacgccgcaggcgagtacggcagcgaggtatagtctatctcgtcggcttagttcatctgagctctggcccggcctgcccaggcagtctggcccagcaaggatgtcttgtaatgagcacagtccaaatcttgctcgatgcagcgcagaagcggcatattataccgtgcgttgctgggttggttgaggatatacccaagggcgtctcgatgtgcctgagcgcccattgccttgacactacccagtgtagagcataggtcgccaataggaccagggcagttgggggctttgtgcactgcctcgacgcagacggtggtggaagttgacgcaaattgtaccctgcgttttccagccgggactgtcccgcgcgaatcagtgcatgcgcatcgaaggccaacgcggtccaggtagttgaagccgcaatcgcggaaatgctcgcagagatgtttttggttccggtggaggaagtcgacttgactgggaacgacgagtatgcccgcttgagccagagagctgaagactaccttctccacccggagccagcgcagtacgaaccgttccctggattgattggaagcgcagtcaatattgccgacggcaagctcgccaatggtcacatcagctggaatggtggcgcagactcgtactacgagtacctgatcaagatgtacgtctacgatcccgaacgctttggcctctaccgggaccgctgggtcgcagctgccgagtcgagcatcaaccatctggcttcgcacccgtccacccgcccagacgtgactttcttggccacttacaacgaggagcatcagctgggcctgaccagccaacacctgacctgcttcgacggtggaagctttctgcttggtgggacattgctggaccgccaggactttgtcgacttcggccttgaccttgtcgccggctgccacgagacgtacaactcgactctgacgggcatcggccctgagcagttcagctgggaccctaacggtgtgcccgacagccagaaggagctgttcgagcgcgcaggcttctacatcaacagcggccaatacattcttcgtcccgaagtcatcgagagcttctactatgcatggcgcgtcacaggtgatggaacggtacgttcactcagcgctgcttccgtaggaagaccatactgaccgctttagtaccgcgaatgggtgtggaacgccttcaccaacatcaacaagtactgccgcactgcgaccggtttcgcggggctggagaacgtcaatgcagcgaacggcggaggccggatcgacaaccaggagagtttcatgttcgcagaggtgctgaagtattcgtttttgacttttgctcctggtacgtttccctagttctggttcacctgtggagaatattactgactgcagcagaggacgactggcaggtgcagaagggcagtggaaatacgtttgtctataacaccgaggcgcacccgtttaaggtgtatacgcctcagtagatagtacatattgtgctctagcgtactgcatgcataacctaaatggcatcacctacttactgactactcaactgacaagcagttgcctttatatgctcttaaggagcttgggcggtacctcgtagtcactctaaactccgcgtgaagagcggggaggctgggcctatttctcttgcaggggcaagtacccgggcagggcaaccaaaaactcttc

SEQ ID NO: 4918 - DNA, 3409 bp, Emericella nidulans
catcctcacaaacatcccttaaatcttcaatctacatccccaattccagcgaaataaatctctccacgcactgaaaatcaactcctatatattataagagggtgaacgcaaagcgcattattgggaaaagcaccagggcaagtgacctcctcatactcaactccccgcttgcacagccaactttttttcaaccatattcccataccggccggggggaataagtcacggctaggcggttcttctagaccctcggaaccgatctccttcaatgcatcagggataaactagatttcatgcctcgtcaccgtacctgagaagccgcgatatcttcaggagaaggtaggcccggtgtgtacgagagtctgctaaagagccttgcctgactcgtggagacagcatctgcgggtgagagaggagcggcgagagcaattgcgttgactagatctgagggaagagccgaaagacggaggcctgtttctgaagcggatttctgcttaagctcgttttcgtcatcgatcaacattcgcagagcctgagctcgatttgcgtaagcggatgggtatcttgggtattcattgataatggcatcgagggcattgattgcggattgaacctggctggtttccggtgtcggctgtgttgtcgatgctaatggggtgataatctctctctcgcgagcttgcagagccgtgtgttcttcaagagagatacccaggtgtgctgggagctgaggaaggcttaagtcaactgtcactgctgaggatggtgaggattcggcgtcgaagagggcttgtagaacggcggagtcgttggttgttagggagggtttggaggagttgattgtcgttgcggacattttgctagcttagtgttggtataacctaatctctggatgtgagaagaaaagatctcggtgtaatttgatatctggagaagagatactggcacaaaccatgtgcttaatctcgtgtgtaatggcgatggctgctgccggatacttggcgggcggccccgggtgtttcgaaatagccgtcactttcctcgcccaatatccgtctccagccgtcttcaacctcgtcctcccggaactttaacatctcggtcacgatgaataatgcgcagcgaatatacgaaagatagaggaataccatatcacacatcattattactcgatatccgtattctgggtttataaccacagaaaccctcgcacaaaccattccgcgtcaaccatcgatattcagtttctactcaagataccctttagatatcaggttccagatatacttactaccacaagatggcgccctccgcaatcgaccctccgacctcaacatctctgccctcctctatctctagctatcgtggctatgaccacgttcattggtatgtcggcaatgccaaacaagccgcctcatactacatcacccgcatgggtttcaagcgcatcgcctaccgcggcctggagacaaactcccgcgccatctgctcccacgtcattcgtaacggcgacattacatttgtactcacttcgcccctccgctcgctagaccaaatatcccggttcacacctgaagagcaagacctcctgagagagatccaccaccatctcgagcagcacggggacgcggtcaaggacgttgcgtttgaggtcgactctgtcgatgcggtgttcaatgcagcggtggcgaacggagccaaggttgtgaaaggcttgacaacagtggaggatgagaatgggaaagtgacgatggcaacaatccaaacgtacgggcagactacacatacgcttattgaacgaggcgcgtatagaggaactttcttgcccgggtacagagtcgaaacaagcctcgaagacccgatttcggctttgttaccgggtgtcctgttgaaccgaattgaccactgcgttggtaaccaggattggaatgagatggataagatttgtgaatagtatgtcctctccctgactaaaaaaaatatgtacagaggctaatgagagcagctacgaaaaagctcttggattccaccgattctggtccgttgacgataagcagatctgcacgtaagtcacctttaaggcaaatgtcacagccacgatgctaattcgcagcagcgagttttccgccctaaagagtattgtcatggcctcccccaatgatatcgtcaaaatgcccatcaatgagcccgccaaaggcaaaaagcaatcacagattgaagagtatgtcgatttttacaacggcgccggagtacagcacattgccctcctaacagacgacatcatccgcgacatcacgaatcttaaggcgcgcggcgtggagtttatcaaggtccctgatacatattatgaggacatcaagattagactgaagaaggctggattaactctacatgaggactttgagacaatccgggctttggatatcttgattgatttcgacgagaatgggtatttgttgcaattgtttacaaaggtaaccacccactctcacatgaacctacctatatgcaaggtaacggaaagctgaccgatgaaacgagcaccttatggaccgtcctacagtgtttattgaaatcattcaacgacacaacttttctggattcggagctggaaattttaagtcattgtttgaggctattgagagggagcaggcgctgcgaggcaatcttgtgtaaacttgaattccttcagactattgtaatcctattatcattgaccgcagacatttccgtctcttcttactatacccaggagtgagcaatgctaaggattaaaatctgactgggagcgttggtgctccgttcctaagattaaggcctttagacataagagccctcggatattaagctaaggatatggcaccaggggagaatgaaataacgtcaatctcctatgccacatagcgttaccgtataacgccacaggcagaaatattttcgtagggggattggatccgagccctagggggttgtctgagacattctttttgccctttgctacagtaatgtctggtttgcagtactttcaccgagtaacataacctgctttatttaaacaatatcctccaagactgtaatctccctgtggcggttttcatttacttcttttttgaagagctggtacccccaggcgtagaacctggccggcgcttgtacttccgagggtctggtaacatcagcagagtttcagcgaagacagcccacgcctcttacctttcctgctcatcagggtcttattcctggtcccctttcctccttcccagaacccgctccctgcttttccaattaggtatgagcgacagataccgcagttctcaggacggtatatttgttcgcgagaacaaaagccactgaataaatataatccgttagactaattcagacaaattaagtagatatgagataggga

SEQ ID NO: 4919 - DNA, 5353 bp, Emericella nidulans
ggtgaggatcgctgcgacatcataagtgggactccagcggttttgaaggatatcgagacagagctctcctgtgccgtagacgttgggatggaacatctggctgatgaacttgacgccgggagcgttgtttgggtattgttcctcgaaatgcatgaccaacctgaatgtgccatcctcaaacggggtatcggcgggaccaataataacggcgttcctagcgacctgattagaagcctctcgatacaataattatcaggagaaaataccaggtcatcacattatcggccaccggggatgctgagactcctgcggggggatcggtttgcatgcgctggcgttgaagaaaccgattagccgagagagtccaacagcgcgaaatttgattaggacgagagtgtagaataggcagggaatataaagagatacagagcacaggcaatgaaggcgctaggattgatgcgaaagtacgtaccttgaagtcacgcatgagacggcggcgtgcggatgtcgacattctggcggggtgggagaagagcgaagaatgcgattaaacgtttgaaacagaagatagaatcagcagttccagcagtaataacctgtatgacaggttgctgttctgatcagagaagtttaagtgtccttcgtcgttataagtggtgagaaaaaaggtgagatgatgtgagttctaggaggattgatgggtcatggatgatgataagactgctccccatatctaaacagattagaagctcagcgatcttcggaacgcggttcttccggttccgctcagctccttcccgcggtgaccataattactttttgagccaatacctcttcttagtgactatgaatctatattcctaggacttcgaggcttcaatcgctgccaacgtcgattgagctcaagcatctgttgggccttcctgagaaacacatattaatgggttaagcgtgggtccagcgtgtcacgtgtcatatcaagtatgtcctaaccgaaaacagtgcagtatcgatattcaagtgcctgctttgcacggttctagtccttgactcggatatgcaacgtctactattcagagtcaattgagagagcatgagatctgtgcctacaatatcctagtactgaataatgctcgatcccattgaactgcaagtattcccgtcctcttacgactgcatctcgtggtccgaggatggtgatatcgcagtcgctgcaggcgaatatgtacatattctggtaagcccatgatctcaaataccttagaaagcgaatgttggagctgactcatatagacaccaaaattatcttccgaaaatgaagcaaatggcacgagtccaaatgcatcaagtatagagtggcacaggattcgtttccgtgccaatgtcttcactatcaacgaatggccaatcatgttcccgcaaccacgagatcacttctcagtaggagcggagcagtcgtttagtacagttgcaggcattggctggtcgccacccgggcttgccaagtacaggcgtagcgtactggctgttttgacgtccaacatggttctaacgatctatgcgcctactaacaatccagcaaagtggacgcgaattgcaattgtcaacaaatccttggagattttctttcatgaaagcattgagaatggtactccaaacttacgcacccagagtttccgtcgggacatcgaggacaataccgcgaggacacgcaaaaccaatattcgatcatttacatggcttccgcccctcaaggttcctgccaagaacgagttgtatcctgcacctgaaagtcggtgggggttttttctactcgctgtcaccaacgaggacaatgatatggtcattttgcaggtgcagccatccagctctgaacaagcttcccagtatcctctgcgtgtaaatttggtatctaccgtttctctacctacttcagcaggctttggtccagcacttcaatttaattcactgctagccaaagcggtccgctcccaggtgcggtcattgtatttgtcgagcgggccatggctctatcaaacagagaagggagacagaagtggagaattcccaatagttgcaaccaccaatgtggctactatacagggtgtgaatctccgcgtcgtcaggttgagtgtcaatctggagttgcgtaacccagattctcacgatgagccgcggtacaatttgactttcaacgcgtcagagaatgttgcaattcctgttgggcgtacggatcttgcatttactggccctatccgctgggcgcaacacgtgaggctcttccccaggtcttcattaatcctttggcttccctaacttgctttctaggccggaactggcagagtgtccatggcagttggcgcaagggcgaagttggcgtggatagatataccggagagtgtatacattgagcaggattcggaagataacagtacgcagttttacggttttcccatgatggtcgaatcatcagatggggtatcttcgaccagcagggcgctgcatgagagaatcagcggtatttgatcactgatccaaatgagaaccctactgacatcttgaaggtatgactgtcacaactggcgtcgaacccagaacgcctacattacatttgggttctgtcgggggttatgcagcggttatgccattagctgcatcggctgaattgtctatagccccttggaacgcagaggtagaggatattagggagcgattcgacattgaccgtgaccttggtggcttggcgattgcaagaatttggggtctggtatctcagcaagaactcattgcggccgctgtaacactgcatccaggggatatggttgagtatcgcaccaacgcagaagaccgattgacagttgtgctctcgactgcaaccggacaaccagtggatcctgaaagagtatctttttttcgcaggagcccaatcagctcactgaattctaagagaacgccgtaatatcgtcctacagtacatacttcgcaaccacacaggcaccgagagcgcactatctccaaaggtcctctatgcagcagcttgctgtgcaattgtgcagtcacaacgtgctgagttgattgcgagcgctcgcgaggtcttaaagaaactctcggcaagtaccggcgtacatctgtcagatgagattgcgaggtgctcggaacctggtagcgcaatagaggcgaaaccaccggagacattaaatgctcctggcgggaacatctttgaaaaatgtgaggtctgtgacgcagggattgcgtggtactcagcgcaggaagcacagtgtgccactggccatgttttcggtaagtctccaacagttagcgaagccaggcccgctaatgatcccaaaagtgcggtgcaatttgacgtttctggcaatccaagagcctggaatctcaaagctctgctccagatgtgagagtgagtatcttgacgaggaccttgttggcctcgcagggcaagccagcattcaaaggtcctgcaagacgttgtcagacgctttcgacacctgtgtttattgcaacggaaagttccgttcttgatagttcggcattgcatactctgagaagtctgcaacttatcagcttgtgctacatgaccgccctctggccgttagtcaagcccaaagagctttccagccaccggggcccactcgtcatcccagcgaaaggcgcttgcatcctgcgcacctgcacgcagcatgttcagattttcagggttcccaaggagctcaacaagctgttctgccagttcacttgggcttccaaaacctttcccgttaacgccgtccgtgaccaattctggccacgccctaaatttactccacccaaccacgggcaacccagacccgaacatatcaaccaccttcatgggcaaatcaacaccgctgctgctcgtgtgcaaactgacgcctagcgaagcggatgccaacaaacgtgcgtagtcaccggtacttaaccaagcagtgcatatggtgactttgctgagtttcccctctttttgtaatctagatatccgctcaacatatatatcgcgctgaggacctttcccggtaatgatggcgagcactgcgggtagatgaggcttggtggtgctggatacttctgaataacggcataaagcatcaatgaggagtgagaagtcttcgtcaggcgtccatgacgtcgaactgacaattacttttgtgtttccttcttcaattgacctgcgcataggtgctgcctcgggtaaagataagagaaagcttttgcgctcctgctcgtctaggatcggccggaaatgacttgctgggcgatcatgcagcggtagaattggcgcctggagatcaaactctttcttcagcactgaggccatggcattggttacgcagaaatgcgcaacagccgacctgcaaaacacgttctcgtaccacttggagactttcaccaacggatgagtgtccccaagtttcaacgctagaatagtataaccgaagttatgccagtcgataacaagtctggtctgtcggaagaaacaaacaagtgaggcaatagccagagttggaatggatggcgggttctacagcccagcacgttagacaactccagcaaatatagatcgcggaataacaaacctgaatgagaagccatttggcaggctttgtgtggtatgcgagaatccaccataaagcgataacttggaaaagtactttcaggggcgcgacaaacagaaacaacaccttgttgctcgtttgtagaacgctcggatgaggaggaatcgggacaactgagatgttgggatgggaggaaacatcaggatgaatctccgactctacggtaaattgagtcagcatgcgtgattgaaatttgtgattatcttaccggagtatccaataatatctacatgtccgccgccgcgagcgatacttaatgcgtgatactgcatgcgggggctgcggccaatatccccgaggacgagaacctgaacggtggtcttcggttcactcaagtcatcactactaccagccacacgacgctttggttcatactgcgaaggaagcatgagtatgaacaatgtcacaatggtggatacgaaaaaggcgacttcaatgacggattcaatcatggcgaagcacgaccacaaatgatcaaaggaaaagggtcttgcgggattcaactctgagagtgtgcgtggaccgacggtgatactgacgtgtacagcattcacagccccttgaagagcagcgacctggactctgaagaagttcctaaagctcgagcgaaagtatgcgcagagtcaacgtggtctcagataggaattggtgtagagcctagttcctcaggcataagagtgcgataacgcgataacggagcgcgg

SEQ ID NO: 4920 - DNA, 6464 bp, Emericella nidulans
  unsure (1)..(6464): unsure at all n locations
aatggagccagcaagactgcaccgccgattcctgccagcagactcggccacccgatgagacggacgagaaagccgcccgcaatcgccagtctcaaaacgcaagacgggatgagataactgaacgtgacgaaatcggcgatgcgctttgcgtcaacagccgcaaggttgataatgctttggcagttttgttcctgttcttcgccttctccgtcctcctcaccctcgtcctcccaacctccatgttcctgggcagctcttgtcttcggggaatttacatttttgcaccgcatcgattttgcaaagattaacccggacaaaccttcgtatattggtatccacaggtccgaatagatcaaccaccaaagccatgactctatgcttgacgagagtgccaaaagtaaacccagtccagcaacccacatccagacaaccgtcgagtcagtctgcaagacagcgcgttcctccagactcttcagaatctcatacagagccacttgcgggccgaaacctaggacacacaccacaagactgagaaaaccctgtacgatgagcgctcggacatgccttttgatcagcgcaacccacagtttccgtccagcttggaactgctgcagcttgaaatgaactgtctctgcgcgggcagtaaacggtagtttagggaggtcgtcgatgttcaagctcctattttttgacgcaaagttgagcaagtccgttgtccaaccgtatgtgaagcggttatacgcgctcacggtgagctcctggtcaacgacctggccttcgaaatagacgtttgggcgacgagggatcagaattgatactgttgcgcggaggcttgaaattgcgatttgggttgagaggaggattgtggacgccgagtttatggtcacggtatgcccgttgccccagaggatgatcgtctgcgttgctatacctaggatacaaactagagatgcccagaaagaggagataccgagccagtatctcttgacacatgacctttctgttaggagggagactggttgtatgcacattgccatctatacccaactgttagacacgttttctctcctctgcactccagcccaggtcaagaagaaaactcacccacccaaccataccgacccacgaaatagccataaaatgccttcctctagcaccagcacatgtgacaacaactgcctgcgcaagcgaaaccgcgaacccaaggacagagagcgtggcgatgctccacgcctgccacttttctgctttctcgaactcgaacacggagtgctctgtagcttcgccatcttcgncaatgtattcatgtcctgcagagtccacaacgcgtcgtattcgtcctctaatggcaaccgaattgtccctcgtctgctcgctgtataccctacaagccatcgaagtgtagatattcggacgctgacaagcaaaatccccacgaggccgagcgccccgatcgcaatggcccagctttccgccttggtggatggcatccctcatacccacatcaattgctgacaactgtgaatttgacccgttcgatgatccgcaattggcgtggcgcggaacgagagtcggcagatggagggaaagaagcttattgccatcaggcgcgagagaagcaaagttccctgagataaattcaagccctttaccagtaaacaaggtcacgtcgtacattccagttctgtgcctgcattcctgacttgagttccgccctgaaaaaagtccctgctgagcgggccacgcggtggacagtggattatgtattgtgtattgcgttacgatgtttagcaattggattggagcttggcgctcggcgggtagcagaatagcgaataggaagcgaaaagcgcatctgccaagacatagtactgtcatgtactgtatcaggacagggcaagggcgcgaaggtactgaaggaagggttatagtagtgaacacctgcgaagttgcggaagggtagagaaaaagactagggaaagaaatagaatcatggtttatgcaggtcagcaggtacactggcctcactctcgaaattgtaaccgttgagtaacatggtcctaccatcaacccgttctatctttgacggcagggcaccttcgaatgaggatgatcgggtcaagagatcaatcgattgcatctcggtaagtatttgatactaaattattcctcccaccaagcaaagggtcttggaattctgaatatgtatattactgagctgtgtacggtcgtactacagtgtttgtgtcctcgtgcgattatatattttctcgtccgcgggcgggtgtaaccatactattcctcacgagaaggtacgtataagataccttgcgcatggtaacagcattatatatataggagactgaatacctcagtcttaagtaatgattcaaagactgagtcattgcttaggtgagcagaagaagcagggttcgagcgacgctcgctggataccaaggataacaaggttaacaaactctctacagaacgaactaccaggaacagagtgcattgaatgatgagtattcgcctgtgtatcgatgtatgccagatatttggaacacgatccttagattaaaggatgaggaggtccgatgctgcttgtcaatcaactgccagctgtatcgagcagtcacgtctacaaaggatcaaacatggtcgatgacaacactagtgcagtgataatttcgctcgcctatccgaaggcgagagtacacgagatctatgctcgccagtgtatgatgcttagctggtgttttcaaagctcggttcccttgtttaggtaacaaagtaaacaaggtatgggatagcattagaacatctgctggagtgacgactgaaccaagaaaaagcatcgggagccaaatcactgagaagtgggcttgctcaatgacgatcaaggctccacagacgatgagcaacccgatgtctctaactttataccgtcgccgggcgttatcggacacggagagtgtatcctgaggggccagagcaggtactgccgcgtttacctctgcccatctgcaagtctacagtgaagtaacctagtgaatgaccggacaatctgtgggtatcttgcatgctgctgaggggtgggactcaaatttcaaaacaccaagccagaagtgttttcgtgcacgcgaacccccaagacatacggtgtgctcgagcaccgaaactgcatgtaccacctggctccagcaaatatctgagcgtcagagtgaggaatacgagcccgggcaacgaggggcatggtcaagacgaagtgatagacctttccatcgataatatgcagtgcacgtgtccgtcccgcatactctcaacgataggaccctgaaaagtttcaggtcaaggatatcaggcagcgggtactagattgtcgcgtggggaatccattgataataagaaagactttgcagatactggatgagaagtccgcttttttgacgcccagagagtggccgcttgtcctatccatgttagaaggatgccgggcatttgctttttctactcatcaagctatcgatgaggcagaagacctcaaggctaggttgaatccgacctagtcattctggaaaaatctcgggcttgcgttcatctcgttgtcggacacgccgtagctggtgtgcgtctaaccgccactgcagggtccagcgaatgtcgcgcgttccgacgcgcacgacgagtacaggccggccccactgagaaggctgtgcaggctgtgcgaacggggtggctaacagggaaaaatcgccgaattaggactgtgggaacgacaatcgccagaatctgcaaggacaccgcttgaggcacatacatccaacgcggatgcagggatgagacattgacaacctgacaggacacgcgactgggtagaaggtttccagaacacaattaaagaggtccacgcgagcttgcatatcctgatgagctttctggcccacgtgaagcagctacgtggaattctgcgagccttggatgaaaaactctgtctctcggcaacaacaagaccgagcaagtgaataaccatgcgagcaactgcaaagtacagcgagttaatgacccccacgagagattgcgttgcaacactttcaacacgagccgccacctgatgcaagagtgaggtgaagggctagaagaaaggaaagagatcgagtgcccagctgccgagacagctttagggcttgccaagagcattggcagtctcaaccaaggttcgcagccaatgaaagccccaataagctctgatctgaggatcaacgctggccacttgctccgaaacgtgctcaggtatttcctctgattggcggatgagcgacgtttacgccaagtccgctcctctggtatggccttggctctggagctgccgtgcagccaatgtctgtcttctcgagcttcacgttctgcaactgcgagatgagtcctaccgggcgtcacttggcgggcattgcctgagtctctgccttcggcagctgtcctggtcaatatttaatgcacgcgcgtccggtaggtcagctcttttttcttcaccacacccgtcggctcaggcttctgatctatctcgtcttcctgacatcaagtcttctcacttgcggtcaagatgcctcatccacttaccgccaagtatgactggatcctggccatcacatcgatggcctttgtcttcagtgcggccagtaacggagccaacgatgtcgcaaacgcctacgccacctccgtcgcggcccgcaccctgaagatgtggcacgtcggtatcctggccgcaattactgagttcgtcggtgcggtcgcgctcggaaaccgtgtgaccgacaccatcaaatccggcatcatcacccccgaccgcttcattggtaaccccggtacctacatgctcgccatgggatgcgctgaggtcggctccgctgcctggctcaccaccgctaccttcttgggctggcccgtatccacaacgcagagtatcattggtgcattggtcggtgtcggctttgcgacccaggccgatatcacctgggaatggaccagcggcagtgtctcgcagaccgccgcctcatggggtgttgctcccggcatcgcctgcggtttctcggccatcatcttcggtaccctcaagtacgccgtcctcgagcgtgaggatcctttcaagtggggtctgcgtctgatcccctggtacatcgccttgactggtgggatactcgccctgtttatcacgatcgaagcgcccaccgccccttctctcgaggaattcggcgccggaaaggctgtcggtatcatcctcggctgtttcttcggttgtcttttcgtcggctacgtcttcttcatgccctacttccaccgccgcctcgtcaggcgtgacgcccgcgttcgcttctaccatatcccacttggacccctcctctggactgaaaacccgcctctctatttccctcgtgagggtgaatgggccattacaaaccactacgaggatgcatacggtgaggtccgcgcaggcggacaacagactatcaccgccgctgtggccggcagcgtccttcctcctgcggacggaaaagaagccagggacacagacattgagcgccagcccgactcgcttgcttcaagtcccgaaatcgcacccaaaaagcgtatcattgagcctgaagaacgcttcctcgaccccgtccgtgatctctcttggggtaacccccggaagtggcttggctacatcaaatacgccttcctgcagggtgtgacccgcgacgtgatcacgcacgattcccagctcctccgcgacattcatgcccgtgcccgtcgctacgacgaccgcgtcgaacacatgtggacatactgccaggttgtctccgccatgatgatgtccatcgcccacggatcgaacgatgttgccaacgccgtgggtccatgggctggaagctaccacaccttcaactccggctcagtggaaacagaagccagcacaccagtgtggttcctcgttattgctggtttgctccttggtggcggattctggttctacgggtaccatatcatgagggcgcttggcaacaagatcacccagatgtctccaacgcgcgggttcgcgacggagctgggtgcggccacgacggtattgcttgcgtcgcgtttgggattgcccgtctcgacaacacagtgcctcactggcgctgcgatcggtgttgccctaatgaactatgaccttgcggcggtcaattggcgtcagattgcatttatcttctcgggctgggtgcttaccctgccttgcgccggccttattgctggtctactttgtgtaatggcgttgaatgcgccgcatttctagttttgcgttgcggattgtgcaactgtctcttttgtatgattggtaactggagagattgtttggggcccgttagactatacccgtataatgttaactactcttcttgacactttgccagtgcttttcagtaataactcgcctaccttga

SEQ ID NO: 4921 - DNA, 5481 bp, Emericella nidulans
gtagtcttgtcgcaaaacaggtctggaccgttgacgtcagtgcccttctttatgctcaccctttccggaaaagagggctagggcctgacaatgtcacgggaaggtgaccttcaccgcccaaccaggacggcgatgcaggcaaagaactgccggcttgagtcatcggacgagaaaaaaagttcccccgtcttgataggagcattcaaagaaacccctctatgggccgcagtctggttagcggggctcaacgattttccaccatcctctgcagaagtatcctatcctaccgtccacagaatcgaattgggtcaccgcggaattgcccttattcctctagccaatttattccttctcgtctaccctatcccggtcgattctttacgacgcgcgctgcaaccatggcgtctactgattctctccctgcggcggtcgagtcgctttctctgcagactacctcagagacctccaagttcccgaacagctatccctctttaaaccctgtcgatgtttaccgtgagcacatctcggagcatttgagcgctattacgggtattgaggctgagaagatctacccccgtttgcaattcacgagcactctggacaagggtgaccttcttttaccggtacgcgatcaaatggccatgataccttagtccaaaagctgacgcgggaactggattactaggtcccgtcgcttcagatcaagggcaaaagcccggcagacttgagcaaagaactcgccgagaaattcccagaatccgacctcatccacccacctattgccggaggccctggcggtacgcacctccaattctttttcaaggagaaacctcttgcacagcgggtcattggacagatcttcaaggagaaggccgcatatggatcaaacgggaaccagggtctgcgggaccccaaggacccctctaaaggccggaagaagattattgtcgagttctcgtcgcccaacatcgcgaagcccttccacgccggtcacttgcggagtaccatcattggtggattctggccaatctctatactgttatgggatgggacgtcatcaagatgaactacctcggcgactggggtaaacagtacggtctgcttgccattgatacaaaaagtctggtaccagcagaagttgcttcaggcccccttcaaccacttgttctaggtgtatgttaagatcaacaacattgtctccgagcaggagggtccaatcaaggagctcaaggaacagattaaggcgaagaaggagaagaacgaggacgtctcgaagcttgagcaggaactagcgaaactcgttgatgtcagtgaggatgagaatgctcgtcgctacttcaagagcatggaggacggcgaccccgacgccctaagtctctggcgcagattccgtgacctcagtattaagaagtaccgcgagacgtatgctcgtctcaacatcgactatgatgtctactctggcgagtcccagattaaacaggaaagcatgtccaaggccaacgaaattctgcagagcacaggcgtttccgaaaactcggatgggcaaccattgtcgacttccccaaacacggtgccaagaagctcggaaaggccgtcattgtccgaaaggatggtactcctctgtacctgacccgtgatattggtgctatctttgagcgtgatgaagcctatcacttcgacaagatgatctatgttgttgctgcccagcaggatcttcacttggctcagttgttcaagattgtagagctaatgggcttcaaggatctggccagccgctgccagcacatcaacttcggtatggtccgtggaatgagtacccgcaagggtactgtgaagttcttggacgatatcttgagggatgtcgccgacaagatgcacgaaaccatgaagaagaacgaggagaagtacgctcagattgagaaccctgtggagacggctgatatcctgggtatcacttccgtcatggttcaagatatgtctggcaaacggtacgtactctactccttcttttccatgtcttttctaacgccagcacagtattaacggttacgacttcaaccttgacgccatgacatcgtttgaaggagacaccggtccttacctgcaatacgcgcactcccgactttgctctattttgcgcaaggcggaggccaacgttgaggagcttccgtcggctaaccttgacctcctaactgaatcccatgccgtcaaccttgtccgcctgctctcgtcatggcacgacattctcatgatgaccaacaaaactcttgaacctaccaccatcctcacctacctcttccgcctgactcacatgatcagctctagttacgatgttcttcaggttattggcagcgaacctgagctgaagaaggcccgtctagccctgtacgaggctgcccgacaagtcctgcacaacggcatgcggattctcggtctcagccccgtcagccggtaagtcgtacctactataggattcgatgtggatgctgacgttttgtccaggatgtaaacgacgtacgaccaataaaaaacaggatatccattttttagatctcagacagcggaatacaaatttctcgacttttacttttaatgttcaattcaatccaatagcgcaccagtaatcggcccagtttctgaattccttggccgagatttcagggtcagggattcgggcgtgagacagtcctcttcaataggtcgccttggttcacccgttggccggcgaaccgtagttaggtaaaccccgagcacggcgtctgctgtggcgtcccctaatgcattatccgccaaccagcaacacatgttttttcagctcgatgacatggagcttagtagagcgcatgggagccctgcgtccagtgccaggctgaccgcgataaccctagcaaaaagttatcgtgtgagtcggactcagcctgcctcgaaacggctgtggtgacacggaaaatgagatatctgccaaacatagatctgaaacagacctcgcacgaatcgggcaatttgattgcatggagaaaagtggcgcctgttcagtcggtcatcgagtgtcgagaacagcaatagaaaactcgacaggaagatgatctctcgcggggtttagggctgattgtcactgcctcagctttcaggcgctacgggcactcggggaccaaactgaatcaacttctcgggaccaagtcccacccttacgcctcgctgaactcctggctcgcccctactccgtccagtccctgtcgccgtttatgaatttcgccgtttatgaaatttatttcctactcaagtaagaaggggtgcctagtccccgttacacggcagataaaatggatctcccctggtccctgcgaactagtacacgactggaatttcaaggtttctttactctgtactcgaattcgagtcaaatgcgtggacatcgacgcttgcaaggcctgttttcatcaaggacaaacatctgccctgaatttctataatcctcccactatcaattgcgccccgctcgagcagaatcatggcatgcagctccagttcttccagtagcgacgggctgaatgctcccgatgtggaacaaaacgcgggcagccatgactttctcatgaaccattctgtccagagtttctcttggagtgatctcactgtgtcagtcagagaccgaagaaccaaacagcccttgaacctgattgagagtgtcagtgggagcgtgcagcaaggttcgttttcgccgcatctgcaagacacgggacaaagcgcgccagaacggtgttgacgctgtatacctaacattgcataggggagcttgtcgcgcttatgggcccctcgggctgcggcaaaacaacgcttctgaacgtcctcgcacgtcgtgctgcatcatcgggcgctaaatcctccggacattgttatgtcaatggtggcgaggttgataacgcaacgtttggcagaattacttcgtatgttgagcaggaggatgcactaatagggagtttaactgtgcgagagacgttgaagtttgcagcggatttatcgttaccggggtatgtgatttccgttacaacttagaactgactaatgattctctcaatgtttaggttcgtaagcaggtcagagcgtgttgagaggatacacacccttctcgaatctttcggtatccagaaccaggcctctacgcttgtcgggacaccgattaggaagggcatcagcggcggacagaagaggcgagtcagtgttgccagtcagctcatcacctgtcccaaaatactgtttctcgacgagcccacgagcggacttgactcaactgcgagctatgaagttatttcgtatgttaggaagctggcgcgggctaataaggttggttaaatgcttttgctggccagtgcaatactaacttgcgaagctcatcatcatagctagcatccatcagccatcgacggcgacattccaactgtttgataagctcttgctcctttccagtggaaaaacctgttactatggccctgttaagcaggttccatcgtactttggaagtattggatatcccatccctccccagacaaatccagccgagttcattctcgacatcgtcagctcagactttatgtcagaaaaaaattccatgaggaatgatgtggaggcaattcagtctgcctggtcgcaatctccagaaagcagtcggcttaagcagcagagaactgagttcgctgagaaagggagcaggagggttgtcgtggatgaggccagtcgccctggtctgttgagtatcaccatatcactcttgcatcgcttgctcatcaagagctatcgcgatgtcgtagcgtacggcatccgtatagtcatgtatatgggtacgttcagcagccacataatatttaaatatattaacatgtgcaggtttggcgatcatgatgggtactgtctggctacgtttggggacggagcaggagtatatccagcctttcatcaatgcaattgtgcgttggcagccctacccttagtacaactcagctaacaagtatccagttctttggatcagccttcatgagttttatggccgtcgcctacgtcccagcgtaccttgaagaccgcgcaactttcacaaaagagcgcgcaaatggtctttacggcgctcttccatttattatctcaaacttcattattggtcttccattcctctgtacgtctgctcagcgcccacaaatccccagacctatccgtctgtccacccaaagtcctcctcgctaacacagaaaccctatagtcctgatttcaatcctcttctccatcgtctcttactggctctccaatttccgccctagcgccccagccttcttcacctgggtaatgtggctttttctcgacctcgttgcagccgaatccctcgtcgtccttgtgacgtctatattcccgaacttcgtgatagcacttgccctcgttgcattcgccaatggtctctggatgagcgtgggtgggttcctggtgtcgccgaat

SEQ ID NO: 4922 - DNA, 2542 bp, Emericella nidulans
ctggataaataaaaatgatggagacgcctgcaggatgaggttatgggcgggctgaagcgagggggctgggcgagtgagaatcgctgcgggggtggctgggaaacaaataatcaacagtaacagggcgcaacatggatggcacgcttccagacggttcgctctaattagccggtttactacctgtcagtaaatagccttctggccggttgtgggacagcaatgttatcgatgggtttcactgccgtgatctttgtttgatttggccagccctaattctgaacaatctatagtacagcccaacgctagactatctcctaagttcccaacgcctgcatgggccgtgaagtacataactgaaaatcatgaatactatggatagcatctttaccaaccccctttaccagcgaaaccagaagcctcctcgatcttctttcccgctccgcgtgtgggcttcgattgagcggcctcgtgcttgcgcaattcctccggcacccgggaaatgggcgacttgataagcatttgcttgagatcgtacctgtgacagttagcatagtcgtatagtaagcaaggagggaagaaacgtacatgacgtcggcatcctcgttacccaagaatgtgatagccacaccactcttcccagcacgaccagtacgaccgatacggtgagtgtagctctcaatcgaggtagccatgttgaagttgataacgagactgacgtctggcacatcgataccacgtccagccagatccgtagcgaccaggacgtccgtcgagccgttgcgaacagaagccagggcggtctcacgctgttcctgtgttttgcttccgtgcagtgtaacagaagaaaagccccattgtttaatgtcgcgcgcaattgagtcgcaggtgcgcttgatattgacaaagacgatgatcggttgtttgaaggcgccagacgataagatctggtcgaggcgtttcttgcgcttatcttcgccggcgaacatctcgacgcgctgttcgacagtgtacacagcttcaccggcgctttcaatggtgacaatcgctggtcgccggaggtactttcgagcaatgcgctctaccgcagtgggcatggtagctgtgtacatcatgggtctggcgggagcggtcctttgagcccagatgtcgggttatggccgatgaatcctctgcttcctctgtgtcgggcttctcattggtgaccggaagcgcgtcaagaatcttattaaccggctcctcaaaaccaaggtcgatcatacgatcggcttcatccataataacgtagcaacactggctaagtaccaacatgcggcgctcgatgcagtcgactagacgaccaggtgtagcaataatgatctcagcaccgttccgcaaactgtatgcctgctcctcgaacgagtgaccaccaacgatactgacaacattaaaaccaagtggctccgtgaacttcttggcttcaatctcaatttgctgggccaattcacgggtcggcgcaagaacaattgcgtacggtccgtcgttcttgcgccactcaaactcgtctatccgcggcaactctgcaatataacatagcagagggagaagaaacgctgcagtcttaccagacccagtcacggcaacaccgataagatcgcgcgactgcattgcgaatagggatcgcagctcgctgaatcggagttggctctttgtacccaacttcgatcaacaagctccagaagccgcttcggcaggccagactcgtcccatgatctcatcgggtttggtacgcttccacccttggtcgcgatattgaagtcttctttgaagatacgccagtctcgctcgcgcatatgctccagcttcttctcgctccaatgcttgtccaactggttccgcgtactctcctctcgccgcctccgctccatctccaagatctccctcgcccgaatacttcccgcttcgcgatctcggtcctccagcgctttagcatacttctttgccactgaatcggccacatcgtcaccgaagcccgccagacgcccgcgtccgaagaaattggcctcatgtcggtgctgatacagcgggttaaagtcccgcaaggtgtcctcttaaggttcccactaaaagtaacctttcgggcagtcgttagcttccgcttctttttcgcaaaaagttaaaagtctggtccgcgcccataaaatagttgcttaataagggccgcttgagctcgggcctggtcctattcaattgaccctttaatcaacttttttatctgatttggttgtacccgagtcattccttgaacgcatagctgctggcccagtaggagtggggccgtcaccgttcctcattgcacgaggacctgtagaaatagatcgagaatcaccattcggcgtacggaatcccctagacggcgtatctaaatccatcccatccaccccattaggggttccattcgtcgtctgccagtgagggtggacttccttcgcgagcatttccaatgccatccggtctcgacaccaccctgtacgtgcactcttggggtacagtcatgtatgtaacg

SEQ ID NO: 4923 - DNA, 1809 bp, Emericella nidulans
agaatcttgtctgaggaaacggaaaacgacaggttggagtaacatcggaggttctgtataggagcttgctacgataagattaggcagaattagtgtcatcctccactaacgggagaacacgcgcaacgctaagcttctcgcgtcttcgcgttcctccgcctaagccctgctgtactttcaactcacgcgggggggtggtctgtccgaccgaagttcagccagtctttccagttcggtctctcgctcattcttctctgcgtcatcgtcatcgctctgctccatcaccgatctcgatctcgatcgcttcccactcatatgcgcaccacgatgcactggggtcaccacaacttcgaaactttcgtttgaacactactcgaatcttgttattctaattactctcgtccatcgctcaaccgcactgaatgtttatacgctacctccctcaggagaggttcatccagcatgccgcctgtttccacagcgccgtggaatccggcccagcccggtttcgccacacctctccatcgctgcggtcatggatgatgactcgcgttacggtggcgatcccgatcgccgctacgagcaggccagattctcgccctcaatgtcgtacttatagcgtggcaggtttcccatcgcattccaaaacaagccgatctgtctcaaagcttgcgacgacagtcaattcgccttggacccgattcccagctcggtcactgggcccatcccgcgcaatggcagcaacacctgctccggatacaccagtgaaaacggaaaatgaacagctcgagagctcattaggtgggggcgacttgggagacacgaacggaaagcttgacgttgcgccaattgatcctgaatcggacgaggatgtgccggttgaggctgaagagcttcaggaagccctttcacggcccccgcccgtcaatagcaactatcttccccttccctggaaaggcaggctggggtatgtgagtatgcccttcaatattgtattcgtgcttccatctaatacgaatgtctttgtaggcctgcctcaatacctacctaagatactcgaacccgcccgttttctgttcccgcacctgtcgtatagcctctatccttgagaaccgacatccgctttccgatccttcacagccgccgcatgccaccaagaaccggccggaccggtcacagcctgctgacatcgcacgaggccaggcccatgtgcaagctctgggattggcgaatgctcgaaatctaatgaaactgatacgctggaatgatcggtacggaatcaagtttatgcgtatcagcagtgagatgtttccatttgccagccataaagaatatggatacaagttggctccttttgcctccgagacgcttggcgaagtcgggcgtcttgtcgctgagcttggccatagggtgactgtgcaccccggccagttcacccagctgggctccccccgaaaagaagtgcttgagaactcatttcgcgatttggagtaccattcggagatgctgcagcttctcaagctgcctgcgcaacaagaccgcgatgcggtaatgatcctgcacatgggtggtgtcttcggcgacaaggaggcgactttggatcggtttcggcagaactaccagaagctctcgcaggacatcaagaaccgtttggttctggagaacgacgacgtgagctggtcggtacatgatttgcttccaatctgtgaggagctgaatattccgctcgtcctggactatcaccaccacaatatcatcttcgactcttcccagctccgagagggcactctcgacatcatgaacctttac

SEQ ID NO: 4924 - DNA, 4334 bp, Emericella nidulans
  unsure (1)..(4334): unsure at all n locations
cctccaagtcgctcagttagattacagccccgcgtacctcgattccttctgtgcaggtattttcagcgcgcatgcgccagcttggtatccattgcttttggatcggttccggttgccgctcggcaccctattcgaagcatggagttatgtcattgtactgtcattgtgctctgtaagttccacctgtcatatccctatgtatgttactaagccgtatgtacaataataatacatcactcccggaggccaggctccagaccgttagggccggaatgcttagtgccttcagcccgttctcgctcgtaggtgtagttggcaggtaggagcagtaaagttagaggaacttcttgatgaagtcgatggcaaaaggagctgccgagcattctcaattagtctgatattaaccgatgatgtgtctggagggtatagacgtacagaggtaaaggagaactccgccggtaacggccatgcggacggtctggttggcctgggcctcaccagcctgtggtaagggtgcgttagttttgatccatgaagctcatgcaatgcgactttgttcgaggccgaacggatgctaggatgtaccttaatgtcttccttggattcctggcctatatgaaatacatgttagcttgctcgtatgccaatttatcaacagataaatgccgcatacctggagcgaacatcgttgattatattccgcttgacaaaaaggagcaaagaaataaacggcgtgatgatgatgtttttgcactccagaagaatgcagctacttggaacgaaaaagtcaagcccggctattctgccgttgatcaccgcctagattcattctgaacctggcactttcacttctaccactgctgtttttcgtataaatctcctcattcaggtttcattctactttattgtttctattgctcctactcagaccatctcttgttacgaaaatcgaactcggaggctggtcctgatcctactcagccgtttggcgcaatctcaccctctccttttgacgcgccctcatatacaacgcaatacaactaaaactgctcgttccatcatgtctgcgagcccgagccggagcccggagtcaaaaccggcagggaacacgcctcccattgatgttgatgttgagaacgagcagaatgtggacgccgaagaagccgtgcagccaccgacccctggtgcaggcggggacgacgctgatgccgatgataacgacgccaaacccgccgtagacaacgaaattgacaacgacaatacaaatctgaatgaaaacgaggggcagaatgaactcaatgaggataacctcggtgattcagatgacgaatcgattctctctgaagtagacgaggcgcagtttgaagattttgacccggagaatgtggatattgaagaccgtccgcagctggatatcgatgaggagaatttgaagctcattgggcggcataaaaggaagaggacggaagaggaggggacctccaagcggaagaaggagggcaggcgaaggaaaagccggcgctatgcggaggaggaagagggtggaagtgatagagaagctggcgggaagcgaaggaagtcgaagaaggcggagcttgaggaagatgaagaaacgcttgaccctgctacgcgtacgttactatagcgaggtttatccttggacatggatttgctaacggtgtacaggtcgacgaagggctctcgatcgtgctatggacgaggcgctgaagaaacctaccaagagaagagccaggaaacaggatggaattgtatgtcttcagttgttattgaatgctgtgctacagtggctaatttaagtaggatttggaacaaatggcagatgctgagatcgaggatatgcgaaaacgtatgactcacgcggcgcagatggatgctatcaaccggcgcgaaggcaaaccagccatgcacaagctcaagatgcttcctgaagtcgtctcgcttctcaaccgcaatcagtatgtcaacagtctggtcgacccggaaatcaacctgctggaagcagtcaagtttttccttgagccgctagacgatgggtctcttccggcctacaacattcagcgtgatttgatgactgcattgggcaagctgcccatcaacaaagagacattaattgccagtggcatcggcaaggtcgtggttttctacacgcggagcaagcgtccagagcccggtatcaagcgcatggccgagcgactactagctgagtggacacgtcctattcttcagcgaagtgacgattactccaagcgagtataccaagaagccgaattcgatcctacgtatgtcctatccccgtttctcttgttccctccgactctttgtgcatcgttatctgaccgtatttagaaaaatcacctcacgcgtcaagtcagttcaagatagcgctgcggaggcgcgcgcacgcgagctccttcctccgcgccttgctaaccgtgcgcgcgccgaaatctcgcacactagctacactgtcgttccaaaacccacggtggtgcaggagagcaagtttgcgcgaccgttgggtgctagtggtgaagatcgatttcggaagatgcgggcgcgacagattgctgcgacgaaggggcaagccgcgcgacggagttgggtttctatcgaaactcggctctccggtcgatcgcttgtagcttatgtagtttggtatttgctatttgccacggatcaggcgctcggggggtacattatcttgatttgaaaataaaataataagcagaagcgcgaactgtcgactgaataattcatgatcaatcagcacgcctggaagaaacggcacgacacgacggtgtctgatcggtggatcgtacgatggggcgaaccccgagtttggtccggctcagatcccgcagtcgttttttagacgtcaccgggttctgcagctcccgataacttccttctcgcgtcatctgcgcatcaaaaatttcctctttcctcctcttataaacctattccaactgtccacattccgaggctgtgtttaagtctacagcttaccgtacaaattttgctaatcgtatttgtataccacacacatcatgaagctcctcacgaaggaagaagaaaatgcccactccccggaagtcgggcgccaccgcgatgcctcgcaattcaaccagcgacacctaaagaaaaccgtaactaactcttattcatagtgaggtgctcaagggtggctcttttggtacagtcctgggtctcatcggtggctatgcaggtgtcttggccgcatcccgccgctatcacactatccgcaacctcacacttcccatgaaagcatttctcgtcacatcttccggaaccttcggtgggattatcggagccgaccgctcctcccgcagcttctaagctgcgcaaaaccagaaccgacaatggtacgaaaaccgcgaggagcgactgcgcgcccaggaacttcgcggtatgagctttagcgatcgcgccctcgcctgggctagggaggaacgctacacaatcgttttctcgacatgggttgcttcgatgattggtagctttgcccttgtcgggcggaacccttatctttcgggccctcagaagctcgtccaggctcgtgtctatgcgcagggtgctacgcttgccgttcttatcgccagtgctgcattcgagatttccgagaggaggagggtcagacgggagcttgatgcgaagtctgcgagtgctaaggcggactctaagttgagtaacaacactggtgaagataccgagctatggaaggacatggtcgctgctgaggagcagcggttgaagaacaagcaccagtcgctctatgaaaagcatcagaatgacgccggttctgaccctgatgctgggtctaccccgcctcaacaaaaggctgaggctgagaagctgcctagtgagcaggagcaggagcagaagagtgaggagaagaaggagaagcagaagtaatttctcttggctgctagggggactccgcataaaagaatagattggttgtgtataacatttcttgtttcctttcgtggttgggcgggtttctcgtaccacgattttacacttgtttcatcttcctgtttgtgattgtacactctctcctcttattcatgtcttttcactatatatatggcgggcgtttgtcattgcttttcttctggggatgtccatacaaagcagacccatctgatatacaaaanctgcctacccttttcaatatacaagatagaggttcactatgtattcccccttctgaaatcgcaacacctagctaacaacagaatattgaaacgttgacataagtaggatcatatatgaccttcatggagaggctc

SEQ ID NO: 4925 - DNA, 3388 bp, Emericella nidulans
tgagctgtatatttcggacactgccgataattcaggtaggcatatttggcttcttccatactcgacgcagagctcgagcgagagtgcttgccagaatcctcgcgtctgtgagaggccgtaatgctcacgggggatgaaagtgctgattcattgtaagaagcgtagacaggcgaggtatgagcggatgagacagctgcaagtctatctgatacctcaaccacattgcgctggactgacggacgccgagttgggtaaggaatgaagcctggtgggtttcgagtgttggaaaggaatcgccggtgacgctgcggtcctgcggttggtggaggctcaataacgacgtcttgtgatctgatcctaggtagaagagcagggccatgttggtaccggggaggagaatcgattgttgggctcgtagtcgaagtgacagcagaccatggagacgaatcattggagtatatagacgaatctgacgcggtgtgattatgtgtctgcccagccaactcctggtactggacaggaggggtggtgggccggtagtaaggaaagcccttggacatcgtcttgtggtagtcagagtatataggccaattaggtaggtgtagtcgggaggaccagcttcccggacgatgggtagagaatagaattggccaaattcttctaaacagagagatatcagatcccaaccatgacacttgcgaatggaaagacaagactcggtctgggtagaggtgggaatggttggccgttaaatgctttgagcatcagagacaccacagctaaattagaagcaacccatcaacagatcttccagggaccaaataacctgaaacatggagagagccccattaaaacgccagatccgcggctgggataggtgttttcagcaagaatccggtctaacgtgccagttcctgctggcatgatccgatgtccaggatatcttcagcaagcacggctgtttcaggtggcacctgcgcgtcaaaatgttactatattttgcatgttgccgttgtcttcaggcgtatatcgttgaggaatggttcgcgcaagcgccagggaggatctataatcggcacagacatgtttcgtctattctgggtagtaaaggaactaaatttacccagaatatcactaaagcctcaggcttcaacaggtcggcggcaagagagctgtcggtgggcatctgctacaccggaaatgccagacgcgcctctggtgcgttcgtctttggtgaggggggttgtataagcgccgagtgtgatatggagcagcagattccgacatggggcatcccaattgccacggcagagaattccggaactagcatgacgcctgcgagagctccagggtccttgatgttctaagaatacctgcccagcgactaaggtggtctcagtacgcgccgacgacctgatccagctaggcgccggggtgtatcgaatcttctcgtcatcgatcggtagtggcttggcttatctgaacacaatatggcaagaaaatgaagaaaattctgcccagtacggactggtactggatgggtatcgaagtgaagatgatgagagaagttgaggttagctgtaggataatgcaggcaatgtgcacgggatccatcatggattccttccttccgcctgaaaaattcagccaatgagcttgtttctgagggagatcgcagcaagctaacaggagccgcaggaacgcagagtcaaagctcatacgaggacccgcgagtagctaggcagtgctaagcaggtgcgtcttttgcactgtagtagaatgactttttgaaccctgatttatctagcatactggacacttacgacgaaaatatcatgataataaataattgattagcagtattatgatatttcaaaaacaagtttttcgtattcatgaaccggaagctttccagcgccgcctttgccagaaaaaaagaatcaggaccgatttctttcgtaccgagtataacaacatcatgcaagagggaatctagaagtcatatagacagaatcctcatcgtaggaggatgattagaagcaatggtgattatatgctggtcgtcattcatgcctttgtttcgtacttgcgacggaacataccatcaatctcggtgagcgtagtatgtgccggggaagagtgtgtcggggttgccagagggcttgaagtccttggccaagtgggcgtgctcgcggagctcgcacatggcttcatagtccgtgggagacaagactgtgcgggactcaagacgcttgtgcaggttcagcttttcaacaatgtaggaaacgtcgtcaacaatcttggcgctgaacagagagctggcatgaccactgtcgtaggagaagaagcctatgtgcttgggctggctggggtcgaaggtgagattgctgagcagagagcagagaccagcgtagacggtagcggtgtacatgttaccgcacagggtggcaacgtcaagaccagggcgcacgcgctcggcgaaacgcttcttggtcagacccatgaaagtcttctcgacattcttgtcagtcagagaggtttcgtagtcgaggtcacgcagctcaggggcaacttcagcgaatgaggggtgagtggggttggcgaggtagtcgttgtagagcatgcgagcgtaggacttctgcacgagcttgcaagtaggggcgtggaagaggacatagtcgaaacggtcgagagcggtcttagactcgtcgtgagtgacaccgttggtgccattttgggtcttctccttcagtgtcttctcacgggcaccgtaggccttgtagcaggcatcaacggcctcggtgtagcaacgaagggagaagtggccgtcaacaacggggtactcgctagtgagatcgggcttgtaaaagtcgtatgcgtgggtaaggtaagaagcacggagaccgggctcaaagatgataggagcgtcgggaccgatcagcatggccacacagccggcaccaccagtgggccgagcggcgcccttggcataaagagcaatgtcaccacaaacgacgacggcgtctctgccgtcccaggcagacgactccacccagttgatgctgttgaacagagcgttggttcctccgtagcaagcattgacggtgtcgacaccctcgatgttggtgtttccgtggggggcaaaaagctgcatgaggacggacttgacggacttggacttgtccagcagagtctcagtaccgacttccaatcgaccgacggagttggggtcaatgttgtatttcttcatgagggaggaaagggtggtgagagcaatagagtaaatatctacacagcagcaagttaggctcagccaaatttttttattggcagaatccaaacgtacctcacggtcatcacagaagctcatcttggactgtccaagacc

SEQ ID NO: 4926 - DNA, 3666 bp, Emericella nidulans
ccttgccaactgaatcatagacaacatcaacacccctgccattcgtaatctccttgaccttcttaacccaatctttgccctcttcactacgataatcaatcacataatccgcacctaagctcttaacaagctcaaccttctccggtcctcctgccgtcccaatgacaatagcaccaatgctcttcagaacctgcgtcatgagaaatccagcaccacctgcagcagcatgaagcagcacccaatcccctctctggacgggatacgtctccttcgcgagcgtcaacactgtcagcccgctcaaaaaggaacccatgacatcctcattcgatatcccctcaggaaccttgactgcgaacgcctgcgggacagcagtgtactctgcgtacgagccggtggatagccaagccacgcgatcgccaatctggaagttgtaaggattggcaccgggaccgacggccacgacttcgccgacggcctcccggcctaggatttcaggcttggaggatgggtagaggccagtgcggaagtaggtgtcgatataattgattccaataatctggttcttcacgagcagctggccttctgatgcggtggggaccgggtggtgggttcggacttcaaggacctcagggccgccggttttctcagtgacgatggctttcatggttgagaggggaggcatggtgacgtgggtacggagagacgagcgatgtgcgactaaagatgatcgggggagaaattgagactggatgagggacaatcgcgtaattgcgcgatacgagacttgaggggtagagaaacgggacgccgaagcgatgcggggaagaccacgagagtacatctgaggaatcaagtcaggtccctgaatcggctcgcgagctggtcttttatgttctcgattttgtatttataatacgcgagaagcttctgcggaatcctccatgtcggggaaacgctgctacaccaggcctcccatgcttacccgctattcctccaacaagtttttggattctagctatctccgaacggacaacttcggatctgatgttttcggagttcgaaagcgggaattcctcgaagtatatgacaatccgaactcatgattatatctttatatagttactttcgtgacatcgtgcggcaaggtctcaacatctcgtctacattctccatgagcatcaattccaagttgtaatcggagagtagattcattgtttgaatagcttctattcaagatgggaacggtctattgtgtccagatgtatttggttatactgttgcttctgtgaacagaaagaaaaactttagagcttttacccctgtctattctcccatgtcatgcagtaactatccagggactagagcatacctaagcttttggcattgatcggatgccgacttcggaagagttccgatgtctcgctggcaattccgctgccaagaatggtattccgcatagcttacaaaagcactgcataaatgagtcagcggatcgcaaagaatacacaaaacactagaaagggtaaaaaggcacatgacccgcaacccgccgagtgtcgacccgccgcaacggtgcccaaaacaacttcatcttcggttctccatcactgcatcttctcaggaaatccttacttggctgcctgtttacctgtctgatcatcacctcgatgagtcaatatcgacaatttacttgcatggcaagcagacaactcaccgtcagcgcgacttcgattggtgcgcatattccaatgggcagcgaacgcatggagacatggcgcccaatgtagacacgagatggcgtcaacaaaggctgagtggtcgcgcacccctgaagttggactgacactatcggcgcccttgacgttatggcaggggcccagtttcattcatctttattctcttcacccttgttgagccattgggctgcgaacttcaaaacctagggcaattgctcaatactcacacagtatgcaggccatgcgtggagcgtatacagaacttctaccaccagtttcaagaatcagctcgtccaaaaatatcaaccatccgtattgcggaacaaccagccacactcgatgtgtttcatctcctttgggagtgattcgttgcctctgccgcccaatctgtgggctgagacgctcatagggccaaaacattgatgcgctgcccaagggctgctccgctgacaggagcgatatatacttgctctattgccccctcgctcgctcgctttcttttgctcttgacaatctgtatatcagcgataccttgtattactaccttattaatcgaatagtactagacggcttcggtttgtttttttttttttcgcttttcgtttgctgctatttgtttgtatagcgcatctcaactattagcctacggcgtttcgacaacagactctatcaacacgacacagactaccatgaacactgactgggatttgactgaacctgactacatcgccgcgaccggataactgcttctctaaatcggaatcggaacccattcttggactcattttgcattgttttggttgcctttgtttccgctgcttccttatgtattccatttcctccggactgcccttgcgctggcgcaagcggcctcgatggcctcctgttccgttcgtggaggatgaaattgattcccttagccgggaattggacggattatcccacattggtgaattgccagggcttgagggcgctaaagccagaggcaccgtcaaccagtctcctctcattgaggatgttgaactacccaatgctctgaagaactcttctaatgtcgagaagaaaacttccaccggatctcgctcgtcaggcttttatgcagaccaatccaccaaggacgccagaggaccaaaacagactctgtcccgccagccggcaggaaacagttcccaggaaccaggaaagccatctcagcggattcaacccaagcccctggacgtacccgcgagtcaaggtctgaagccagtacatgtttctgaacctcaaaagagtcccacctgtgtcagccagaagcctattccccaccaacaggagccagctttccaggtaacatgtgaggtgcctgcacagaaacttccagcgagaaagattccagaggtggcccagaagcgccaaatggctccatcccacagttcctcattgcaccggggctcggaaccgcacagaactgacttgccatcgagattcacccagccagagccagttcgcaatggtgggattagaacaagctccccagcgaaatcactgccggatgcatctgagaggaatcagtctgttccgtcccgcacaacttcgcttcgccgcgcacagaagcaacataatgaatccagttcgccaactaggtttgctcaaccagagtcagtccagtctggagtgaggacatgctctccatcgaagcggctctcgaacgtagcacagcaatcgcagcctgtcctatcacggactccttctgtacggcgagacaacgatgagcgcaggtctgcatcaactactatgactcctcgggcggagtcagctggggtttctaaggtgccagctggctcgttaccgccaaaggtacttgtagcacaggagccccaagcgatatccccccggcctctcccggtgcctcaggaaagccagaacagagccccgacataaggtgctgtcc

SEQ ID NO: 4927 - DNA, 3396 bp, Emericella nidulans
ccgcgggggaattcaaacgcgatgccaccggccgttctgattccctctcgcacccgcttcgcaagctcaatatggtatcgattgcacggcgagatatcagacccagtctgtgcgatgccaataattggcttgcccgccatgagctcctccctcgtaacgccatagttgaggtaccgctcgatgtacagggcggtcatccctgcatcgcccgagttgaaccatgttgtcgatcgcagcttacgaccggcgccgagtgtactggatagggacgacacctttttggccgatgcgcgcactttctccagctcgatggttcgcttcctgagcgcttcgagctccttgtcgaggtcttcaatattgaccgcgcttgcgctctggctgctagccgagccgcaagcgcagccttcgcattttgactggcagggcattcttaatgggatcgtctatatgttcaacgctactcagtcctcattatctcaaccggtaggtgaccggtctcaccttataaatcgcgtgtcccggctaaccatctgcggtggggtcgcagccgaatctgcaagaccggcgaatgtccgatggagaacgccgtgggcccgaaaagagttgttttcttcgtcccgagaatcgacagcgcagacaggaaaaaggatgatttatacagccggcagacaactcgctgaacgagtcgcaattgacctaaccaattttgcactctctaactcccaatgtcggcttgatcgtgcagggaaaacctggtcaggttccgagtcagaccccaatgcggtaccgtacatggatccattaataggcacaaccccacgctctcttctccagagtcggcgtcgcgtgggggttacagtcaccagaatccacactccagaatatcaaacgtcataagcgttggaaatctctccgcttgctgcttcgtaccaatgcgcagtgctggatttctcatggggctcatacggcacccgcactaccagcacagcaccactggtcagtaaaccagttgactgatctactctgagtaacggtctgtcgatcgtgaccaatgggatgaccaataggcctctgatgcttttaatgccatccaatggaacaccaatagggcagggcgcatactctgagtaaggcaacatcgtgctctttcccttttggattccgccacatcccccacgtggatgtggcggtatgaaatccccaaaaagggtaagcgcgatctacccatcatgactcccattaggaccccccatcatgactggttcctgcgatttgttgatcgatctagcctcaggctcagtgacacatgcggtacgccaaggagaataatgcggttatgcggtacaagccgtctataggggtgtgtaacgccatgaatgcgggctgcaaggggatatctggcgtggaacaagacgtcagacccgtggtagtgcttctttgacatggggggttcgtacatgtaccgccaaatcttctgactatacatgactatgcatgactatgcctatgttccaggctggtatgtctctctagactggagaagacatccgcaattatagactatgaacttcgagtccgattgttgagctatgctaattacaatgcacaatgaatgtctggatatcacctcctcctctcaagatcaacaacaagaccctcctgctgcacaaaccaagcgttctttgtcttccactcgtcgcctggtctatgcaaccggaaggtgaaatccctcagcagctgcgggatgatcttgtgcatctcaatgagcgagatattcttacccacacaagtccttgacccagcaccaaaggcaaagaagctctgctccatctccttcaatttcgcaggcgggctctccagccaccgttcgggcataaatgccccggggctcggaaacaccttctcgtcgtggtgcagagcccaagcgttgatgccaacggtcgtccggcaggaatatacctcccgcagaccgtgactccaccctctggcacatgtcgttccaggatcaaccccacggtcggatgaagcctcatggcctctttgatcgcggcccccaggtaaggcaagtgcgtcatcgactctttgtacgagatagggctgctcaagcgtcccgcgctatcagcggcctcgatctcccccacagccttttccatcttgtcgggattcttcagaaggaaatacataatcgcccgcagcgcaatagccgttgtatccgagcccgcaaagacgttggtcgacagatgcacaatcacatcgcgggtgctcatcttctctggatcagcgacatggatcgccatccaccggcttagcatatccttcccctcctccaggtcgcctttatcgagctccccgtcccgtgctaaactcgtccgcgagttcacttgcttcagcgtaaactgcaggacctggttccagctctccatactcggcattaaaatcggcatcagcgggttccctaacagaaccttgtgcgcctcgggaacctgcccgatcaaactcgcgtacgccaggatcccctgtatcccggccatcatgtcgtccacgtcgcgtccttcttctaggaacccgagcttctttgcgaaagtgaattcgccgacgacgtcgaaggcgtagtactgcagccaggttcctagatcaacaggtctcttcttgcccgcaaagtcgcgcagccgggaaaggaatatggccgtgcaggagtcgaccgctggttccagttcgagtagagaagtcatgctgtatgcatttgcaacgggccgtttctggtcgcggtgaaattgctcgtcgcgcgttgagaacaagttcatctgcggctttttgttccatgatatgcattggatggggtagaagcccgtctgtacgcgaagcaagtcagcctcgtaacagcccgacactttcggcaaggatgggggacataccttcgtgaaccccttattcagcccgtaaatcacggggatagcctttggatctgcgacagagacatgtcgtggcccaatacgcacgagcgggccgtgctgtcgatgcaagttgatctctgtcagatggtggtcgcccttccagacgctgtgcagtttccagagcctcgtgcatttcgccagtgctgggccgggaataccccgtaggccagagccgaatctgcgccaaatgaatcggaggaggaagagggcgatgatggcgaggactggtagaggaagaggaagagaggattgaagggtggagagggtggtgggcatgatgaagagacagtcaacgttcagatctaggaagtcggaaagtttccagttgagaagatgtctcaagacccaaggaccagagacaataggataagcccccatatagccaccacctccaagcattcatagtcaacccatcggtccactcctatcattctagccagta

SEQ ID NO: 4928 - DNA, 13391 bp, Emericella nidulans
acaacatcattacaccaactatcgccaccacgtccgcaaggcctaggactccatgggcgcgaggatggcctcattcaaacgctagggccaatcttcaaatttagacctcaggccgggcaccagcgtcggatcatgtttatcgtcttgtcctatgccccgcggagctgggccctgccacccggcgggtctctgccgctgctataggctgggtgagctggaggctggaggctggataggctggattggctggattgtcgtggtacggcgtcaggactagagtcggaagggtgaagtgggtaagcaggcttctttccgtctctcttcgcgatcctgtggaggggccgtgagggtggaactggcgcgcgcatgggcgaaatcgtctgcaccctgcaattgcatttggcgtcattttcgggagagtgactcgaagacgggcctggcctgggctttggatttttgagttccggaaaataccgttggccacctgcgtctgaggagaaccagtggctactggagtcgctacctaggtagccacgtaaagacaaatgacccgagcttatccttccaactttcatcatagattccgttgggctgatggtttagtgggcaggttggctgagttcggatcattttcttgtcacagtctgcgcggtcatgtaccaggtattctatgactgcctatggctgtctatgattgggttcgaccattatatctttgactcctggcctccgacaacctccgactcctaaggccacttgaagttggcggaaggagcacgccatagtgatcgacaattgcctatgctgggtatagtctggccgactcataatcctcacggaggatggagccgagacggttctggtgatcatgtgcgtgccggtggtttactcgatactgatactcgatatggaatttgaggcagtcgtccttggcctctggactgtctgtagacagtctcacgagtcataccatagttatctacgagcagtgctataaagggctcatgattaacggcactgatgcgtttgctcatatttcgtttctaggtgcttctcaccataagattctcacgatgggaaggcaatggctccctctttgagaatgggatggtactgagtcataatgggtaatagctttccctaggggtattaatgcaagaattctcacgggatcatacttggtaggtacttgatgaaacttgataggacttgaaaggactcgataggggcgctgtgaaacaggagtccaatagagtaatcaaataaaagaatcaaataagctataaaaagaaagagaaagggatccgcagaagcttagttgaagatcccgctcttccatcttggactcttacgcgtacgctgctacttaccaaggtagcccctccttgcctgatatagcctcacttcagtgtctataggcgggacgagggagtctgggatttgagcatcgccctgagcgagccgagcaagccgggctggctgctgggttgaaccccctgcctgcctccagtgctctgtactagttcacttccagacatccagtgttccactgcccagtccccaccgacgatcatgatctacgcgctcagaatatgcgattgtactctgtactctgcgtcctgtgagtcggcccgggcccactctactgcagacatcgagttctccgtgaacgctctctgtgaacgccctggaccgtccgcaataccgcagagcagccgtgccgggcgatgaacatcggtatcccgagtgcccgtatgcacatcttactctgtacgtacagagtagtacgccgttgccattcacgagatctgcatcacatcagttctgatcttttcttgatgccaactcaccatgcaacccactcgtccgcccactctccacctactcgtccaccaattcgtagaactatatttcgtagaactatattgggtcataggtaggtattggtgacttttggcagcgcatcacagagtaattggtaaaagctgctctgcgttgtaccgggtcgtctgataagcagctccagagcctgggacatagaggtttatgtcttgttgcagctccacgacaggcggtatggtgggtttgggggtaggcttgtgtgactggcggtgcttatgctagagcaaagggtgaatcagcccttctagccaacagaacttcacaaatacggttctcgaatttggcattttcttgataaggtcaatgcgcgcacaggggtcggccgcagcatcatgaaaacaatctcgctgtcgatatgcctacgggaattgagcctttgtggtcctcgttttttttttttttgttttgttttgttttgttttgtttgtttattttttcaatggtataggtactcaggacttcgttcagacattgttttgcctgtttccaatgctgatgcaagttagactcaacaccgctggtgtataagaatatattttcgtagttatgagggtggtcatgagttatgaccgattgatccacctccacaacgaatcagaaagcaaaatggaatccgggacctaagccggatattttccaacccagagactcatattgggttcgccgtgtcttgcgaaaagtaaagtggccggaaatcaccagaggtataaaggcagttgagtcaatgatgcaatttggaaatatattctatctagtaaacgctgtgagcaacacaagccgggctagctcaatcggcagagcgtgagactcttaatctcaaggttgggggttcgacccccccgttcggcttccctttttgctcttgagctgtcagtggtcctggctgtgagcttttttttgcggctctggtgggtattccacctggtttctgcgggcgggcgggtagtacgcccacgaacgactgggcgatggatccacctgcagccctaaggactttacgcttgatcgcagagccacagggcgttgatattagaagaatcagtaatggagagcaatgacttattgtaaaattctgttctatagtccaatagagattggaataactagttgactttattattagataaaccgattcataagagtccatatgtccatagtagtgccataccctccagtaacgaaccggaactgaattgtgtttctctatggagagcgtacgaggaggagccgccctttgattgaatatagtctgatgtttagtcagagatttacgtgtactgagctctacgtgagtccgtcagattcattccgttgttttttcttctgctttctcggtgggcaatgtattttcattgacagttcaatgtagagcctatcatatgctaatcgagacgaagaatgcgaatcgcgcagttctcagttgctaaaaacagcttatcacccatatcacctagaactatctaatgtcagaagcaatttcggagcggacaccctagtgtacgagttattcagaccgaatattcctcacttgcgcttaccaagaacagtcacatagctgactccaacacccagatacttagccatagctcctcgccataaatagaaacttctttcgtcgtctcggtgggcggtggggaggcaaatgtcctaaaattcgaagaggagatgtgaaagatgtttcttggtgcacccacaggcgctcgcaggtttcggaacgtccaaaacccaggcaagtcaggtcaaatcggcctttttcgggatataaaagcaaaatgtcaccagaacgggtcgtatccaatcatatattctgagaaaaaggcgtcgtcttcccaatcccactcctgctcgtgttcagctccgtcgtgctccccgaggacatcatcagggtagccgtcccatccgggccagaacatgtccatcatggtgtagaacagaattatccacctggcggttgggcggtggatctacaggtgttaattgtgttgtcaagtatgagctgggtagcgtacgtacgagaataaatgacaggaagcggttgtagagactgtagagatcggccattgtaggcctgattggtcttctctcgcttgatcttatgggtctggatgggactgtgtttgatggttgaggatccgtctggagacgggttgaaattctggatacacacagcggaactgttgtgtaaaggtgttgaggatggagggtgacacttagggaactaccatgtcacccagaagatgctaggcaagtaagaagaactcacatggtcctgggttttcgttcctcagtatttgtaaaattgagagacatctgagtgtggtcggcgctcattcactcttcttttgccagtagtcgccctaggctgcaatgtgggtgccttgccggttcaacaccaacactttcttctcttcttctatccgcaactccatatccttgtcatcctatatatgttcaggaaacgatagaagctctacaccgtgctctaaggctatgtgcttgtctgcaaatatgcggattgtaaccatacctagcgactgggaacagccgtggggtagcagaccaagcattgcccgtcaggcgtcgggctggttgcacagtcctagaccattgtcctgatctcctcttaagcaatgcctcttcctagctgttatgatgttctatagccgtatctcctgcagtgacaatttgttctatttaccggtcactggctaccgccagtgaccgcccgagccagcttagggcacaaaggaaccaaccatcatcacgagtcagcgactttcaaagaggcacttcttgatctgatcagtatacaatggaccctctgacgacaatatgactcgccatatcctggaatctatagacttggcacgaacttttctggaagaatataaggatcgtgagttctgcgactggccttcctgaagacaatgcaatttgaacgtggcagcaagatttggttgaagtacgggatgactccttcccggctaaagtgcggcaacaacatgaggccgaattgtgagttgccagccagtgtaggggtttatcgcaaagctaaaggaaaattctcttcaagctcaaaagacaagatgcggcttacggtctggtgttcacgcggcatggaagaacacgcttgaaaagaggaaaaacgcttgatcaagaaggagctggtagtagcgcgtagatcgttctgcgtctcaccatcatgctataatgagccgcgactttgcttgcgctcggcgactgtctctaagcatcttcagtgatgagcagtgctgatctagggctacccgaggcacataagcagcagctgttgacctgggtagtcatggaaagcagttgcaaacgcgacattcacaatcaaaagatatcattcaatggccggattcaacgtgcgttgacaacgctgcgacgatgcatgcaagacattggggcattgaaagatgacgctacgatacagtgctattcagatacaggagaaacaaaatccttcgtgcaatatattccctatcatgttctgcagcgacgagtgtccagcagtaggagtacatcctgttggcttcttgaagaggcgagctgctcaaaaatcccgaagaataagactcccagtgttcaaccacacggacattaagatctaatctcataatcttcaacggattctgttcttgaaccgcgcggtaggaacttcagacgttgtatcgcaggaatttgtacatcatgaaggacacagaaacgtttactaagagccactggaactgtcctatccagctaagtgcgggacgagaccaaggccgtgaaaacgatgttaaatttacggatagtgatctatattctacggcgcaaacgttgtttctacctggaccttgcaaccagcacgcgtgactatttgtagaggctcgcaaaggtacagacaggcaaagcttccgaactcagcaatggcttctcagttatacacaagtaatgacaagtgacaactgattgcctcgggatctccaagtgtgctccaagtgtactccaagtgtactagcttaggcaggactctgagtggaggagttgccgagcagtcgactttgccgagctgtcgcccaatcagcctggctgtcttatcaagagttggatacaattaacataacccccaggctttgcagcatgtaacccctcatccaattctcacaactgtccacgatgcagctcccaagtaagccgtccagcaaaccagaaaagcaaatgttaactcgtgcagaccgacacaacgctttacacgacattgtcgacagatatcgccccgatttacagcaatacgagtctgtctatcgcaaaatacacagcgccccagagctcgcggggcaggaaaaggagacatcctcgctcgctgcaagccatctccagcgcctaggctacgaagtccataccaacattggcggatacggagtcgcaggcgttctgcacaatggacccggttccacagtgcttctccgtgcagacatggacgcccttccgctggaagagaagacagatctgccatacgcaagtcaccgaatcatcaagaacaaggcaggtgccgaagtacctgtcatgcatgcctgcggccatgatacccacgttgcaggtctaatgggtagcgccgagcttctccattccgcacgagaccactggtcggggacccctggtactcatcttccagccttcagaggaagaattatctggtgcccaggcaatgctagactacgggctatacgacaaagtcccgaagctggatgttgtcctcgcgcagcacgttatgcgcatgaaagccggaacggttggcatacgagcaggtcgattgttaactgcctcggacgcttttgacgtgcgtatcttcggtcgcggaggccacggctcgtcgccccatacttgtatcgatccgattgtgattggtgcgtctattattacccgtttacagaccatcgtcagtcgagagatcacaccgggcgaattagccatcgttacgtgcggcagcatccaagcaggttacgctccgaatattatcccggacgaatgtaacctacagctgagcgttcgatcctacgaccccaaggtccgcgagcgtctcaatacatctatcaaacgcatcatcgaagcagaatgtgacgcatcagacgcaccgaagaaaccagtcattaaacatacattcacggccccagccaccatcaacgacgaaaagaccgtcaagtctctcctgaggacattcggatcttactttggaagtaatctcgttgaagtcgaacctgcggctgcaagcgaggacttttcgctcctggccacggccgttggggcgccgtatgtcatgtggaatttcgggggtattgacacagaggtctgggatgatgctgtgagacagggtaaacgcgacgagctgccggggaaccactcgccgttcttcgcgcctgcagtagaaccgacgatcgttacggcggttgatgctatggctttaggggcattaacgtttctggcgcgggaccgttgaagagattacattttagacttggcttatactctggcctgttatcatggtgggagtatactgtgctttcccgtcaaagctagcagcataagcatgtcatgctgcccttcatactaagcgcgcagctgtgtcgttcagttcagtgatcatagcaagacgaggcagagaaccgacaggcctggattcggagaaggaacttgctactcctcctggagagtgccttgcggctactaggtagtcatagtaggcatgctaacggtagggaggttccggtcctctctgtctataataatgaaactctctcatgaatcacgcaccccgaactaataattcgcataccttcgtttgctccggcaagtcagaggtcgagcatgactactatatagtacgctgaaccagggatttccccgaggttcgatttccttgctatcggaatctacttgtcatacatccacctgtaaaggtgataatattgacgtagctgctccaggggcactgaatataagcagtgtgcatgtcatctaataaaagaggtagggcctcagctatgacgtgttcagagcagaatatctcccgtttcccaaatataacgcagccgtaaaccgagcgggccccctcacgttctgtttcgttaaacactgcttattcaaccatggatatccgctatagaaaggatctaataacccggagatcgtgcatatacagggcgatacggcgtactagcattatagctagcgcaaaaatgcatgttatgccattcataataatgacctaaactgtcatcacatcatgactcgtatctcataacaggcgaatatgccttctccagtttcctctcatcccccctccagcttgcccgcggcagccgcagtttcgtacctcggcagaaccggcgttgctgacgcctcccaactgaaatccgtccgcctcggcagtcccatcatgcgctcgcggaccgcctgcgccagcgcttctttgcgctcttgttcttcctgtggggtcaggaagcgcggcgtcccgtaggcgtcgacgatgacggcgccgcttacgtcgctgtaggaggggaggagggagggagtggagggtgatgggcttgaagaggtgagcatggtagtggttgggtctgaggttggaactggaactgtaggctcagtttgggtggattgctggtagcgggatgcgatggacgccgatgagattgagtgatccgctgcgagagaaaggagagtcgtcggcgggtcgatgtcctcccaggtagtctgggcttgggtttgtgattcctttggcgactctatctctgaatccagctctggcctaagtgatgaaggcgagggtaagcttgaagttgggggaagggcagatgaaattgaatcgggctcctgctcccggtctggttccggtaccagtgccggtgctggtgcctgacggctatgagccttaacggcaagtggttcggtgaccgctggagcgcgcgccttgcgactgaaaagtgaccgtaaggagagcttagactcggtggttggcgctcgaacttggtctggagctgaacccaaagacggggagctctttttgtagaaggacggcatgatcttgatgacgatgacggtgatgatgacgataacgacggctgcgtcgatagtcttctgatattataacccgctcagttgttaatggcgagcatcgctcgttgtcagacagaatcgttagcgctcgagaagcccgacccggacgcattcgacgctgacgtggacgtgagctgcaagtgcaatggccgggagcactttctttacttccagtccagtacggacggcggcttgggttcgaaccgaattgaatcaggcctccaggctgcgggacgcgattctgcacagaaatgggctgccgagtcaatcagaggccagcatctggggtgggcctggatgtcctgcagggtgcagaatgatgtcttgaggggttcgataggctgccactgtgagatgtcgtcagtcaagcgtgaaaaggtattataactggacaaaccttctataagtagtctgaagcagaaacatttgtggaagagagatgtcgcggtggagctggagaagtgttacccctggtctcatggtcgcctggcccccaaccagagctcggcgtctttcccccattctgaccccgcactgtgcccccggggcgaaccagctgggctgtctaagctcagcgtaggcttatatagcccagtctagatctgaatagtcccgttagccacgggaggcccaaactcgaagtcattcttgtgttaattctctctttgcgaatgcaaaatacaagccatgggccctactcagcttcctgcctctacttctcccaccctgaccttagcccacccaactgtcgccgaaacccagcaaatctggtcccaaacgtcagatatctggacagacgctctcagtgttccgcagtacttggaagagtacgcgtacctgctgaccgtcccacttgcgcgggatcacgggatcacgcagtggatccttgtggatagcctcgacaaaccgaccgtgccagccaacgatctcaatggacgcgagggaacaagaagaatcctggcttcgtgcgagacatttcgcaagagggcattactcgccaatcgactcgccagcgatgataccaagaaccggtgcaccgatatcctcgtccacggcgtagcgagcgtcttctgtgacccccagttgcgagggcggggatacgcttcgagactatttaaggaactaagccatatcttgccacaatggcaagcgggcgaggtcgagaagcctagaggcgttggtagcgtgctctattccgatattgacccggcattctacaagcgacaaggctgggttccgttcccgagttatcatttagaatttgagcccgtacagctcgagcataccgctgagccgctctacgccgagaatctggcttccctctgccagagggatgaggagattctccgggcgtcaatgtcgagcccgtcaacgatgggtgatcggggcaagactagattcgcaatcatcccagatcacgatcatatgctctggcaccatgccaaagaagaattcggcgcgcacaagctgttcggtggcagcaagaagcccgagattaaaggagcaattgccggccctgcggggaatagagtctgggccatctggatgcaccggttctatcgccatcctcagggcaacgattcggctgcgaatacgctatacattctccgtctcgtcaccgaaaccccttcgcctgcgtccgagagcataagagctgtgctccgtgcggcgcagtctgaagcggccaattggggattaggcaaggtgaagttgtggaatccgcccagagacctagaagaggctatcagggcatccggggtgaagtttgaaaagaaaaagagagagcaggatagtgtgccgtgcctaaactggttcggagaggagagtccagatgagatggagtgggtgcttaatgagaagtatgcttggtgttgaccctctagagtccataccggactcctttctgcgactggacttatcaggcccgtatagacttcagtttagatttctcataaagcgccaaacatcactatagagaatagattatcgattatgtagtgttcagtccaccagagttccatccggtatgcttaagagcattcacaccacctcggccagtacatctattcaccgtgattccttcactggcatgacgagctgtccaattcagtcaaaaatctatgcatgtttaatggcacgcgacagcgtctgcagtcttggcaagatgaagctatacgcaaggaccaccggcactaatccagttttggctagaaacaatcgagaagtactagtccttatctagttagtggaaagcagtcaacgtactggacctggatagagactcgatcaacgtcacttaactctttagcaagtcaacacgagagcagcttaatctactgcagtctttgttacattctactcttccgtctcatcattccatctagcaactgctaaactacagacatcaagcttgccatcaacatgtcctccacaacacactccccaatccccccaacaatgaaatcctggctctactccagcacacaaccctcagtaatcagcaacctctcattcactgcctcagccccttcccctcccctccccagctatgcaaaccagctcctcatcaaagtcttcaccacatccctcaaccccgccgaccacaaagtcccccaacatgctacgattcccttcacgggtggcagaacactgatctgcggtctccccgcttcaccgggtctcgacttcgcaggaaagatcgtgtcagtacatccgaaaaataggacggagtttgaacccgggcaattggtatacggatgtcttgcgagacctcgcacattcggtacaacgggggagtatatccttgcggatgcgaacgatgttgcgcatttaccggaaggcgtcagtgtggatgatgcggcatgtttgggtgttgccgtgaggaccgcgtaccagagtttgaagaactatcttgatttgagcaaattcgagggcgggagcggaccgagagtcttcataaacggcggtagcggtggatgtggtgtgttcgcgattcaaattgcgaagatgctaggctgtcaagttacgacgacctgctcgggtcgaaatattgagctagtcagagatctcggtgcggacgagatcatcgactatacaaccaccaatgtcaccgaaaccctaaagaccaagggcttagtctacgaccatgtcatcgaccatatcggcctccctgggaatctgtatgctgaatgccaccatttcctcaagccatcgggggtctgggtgcaggttggtgcggggagtatcctcactgcattttggagggcgatcacgccgcggtttctcggaggcggacggaggtggtttgttccgctcatgatggcgaatagcaaggaggatctggtggaggtcggaaatctgcttaaagagggaaagcttcgaactgttaaggatgggaatcgggtttgggaatttggggatgttaagaaggcgtatgagttgctggcgagcgggagggcaagggggaagattgttatcagagttgcggaggactaggtagacataccgttaatgtgacctgtaatgcattttgcatgcgtagctgatctaggctttatgcatgatagataggtggcagcccgcagtggtttccagcatcgttctcataccttctcagggcttgcacaattctgtcttagggaattcaattactatacccagaatgtttaagtagatacagagcggctgcacagagtcctttctgcccattaaattgaagtgcttcgtctgtttccattgcttgtacagattggaggccctagtgaaaatcccgggtacctaatgcgccattcgttatagaacgtcaacatccgtgagggcagcagtcattgaaccaaagagtgcctctagccttgcacggggccctgggtcttccttacctcctgaaactgctggagagccgcttccaggaacagaactattcgtgcttcacgcattcttgctcttcagcatgggcaagagccatgagctctagcttgaaggctggaagtcagtcactgatttaccagactacttggagacgagattaatatattccacttgacggtaaggcaagccgtgggactaggcaggatctaaatagccaaaggatggcagtcatacagtggggtgttctggacatgaatgaatcgacagcacttttgctgccatttaggccttctctggctagttgtccgtgcagaagtatatgtctttgtaggtgtttccccctgagcctcagattgcaactgggggctacagttggggtaaacatttgcagatcataaaagtagcgcagaccgtagtagttctttttcgatcctctctagggtttgcgagtctgatggggaggaaggggaagggatctatcacaacatgtcgccttgcgt

SEQ ID NO: 4929 - DNA, 5082 bp, Emericella nidulans
tgatcgatatgggagcacgcttgaatgattcttatagcaattctcccggaacagtactgggagcagccattgagcggggggatatgattattcttgatatggcatggactgctggcgctgtctcagttaacccaagacttgggaggcttggtaatatgcagacggccagtatacctggagcaaagaggattgcttgcagatatcctcaacatggccgggaccccgctcctaggagccgcactatcggcaaaggatgatggtttagtatggatgctgctatcctacacattcgaactcaaccgtgtcactatggacaccaggatccatgaccaccctgtaacctacaaggacccgctgcaggctgcaatcagaaatgggcgtctctcaattgcatatgccttacttgaccgcggcgcgaaggtgaccgatagtgatattgcagatgttgtgatgtatctggatagtaatgacaccactgaaggtaccgagttactccaacgcctactcaaggacttccaaggagcagcccccactgccacagcagaggcaattctatcggacaggttggacctatttgactctctccttgccgcgcgtattgatccaagggggaagccacaacaattcctggacgtgtgggagtttgatacaggaagagattatcgccttgatccgccagagtccattctcgagatagtttgccaaactggcgatatgatggtgctcgaaactctctttcaggcttgcccctgggattcaaggctcgttggtcgtgctttgacactgtcaattctcttcaactataccgaattgtttgaatacttgttttcatgggctcctgatatcaaccaagagattgcgatccaccatctggacactgaggacgaagaggggttatttgtttcagggtatacggaagtggtaactccgctgcaagttgcatcaagagaccaacgggtatccgtggtacaaaaactgcttggacatccaaatattgatgtcaactacctgggcgcaggtccccggcgtcgcacagctcttcagcatgccgtcgggaatggaaacatggaattaatcaatctcttccttaaccgtggagccgacatcaacggccgtcctgcccgagatggtggagcaactgcactgcagatagcagcaattcaaggatatctcgggattgcccacaggctgattcatctgcatgccaatatcaacgccccccctgcaagaataaatggtagaacagccctggaaggagcagcagagtatggccggattgatatgctccagatgcttcttgatagtggcgcttcggtcactggggatgatgggcagcgccagtaccaccgagctattgagcttgcggagagaaatgggcatcatgctgccgcaaggctgttaatagctttcgagccacagggtgtgtaagtccggtagcgtcgtcagttgctattctgagtcaatgcattacacagtctatatcacataatatgttctaagtaaaaggagcctccgccgggtcgattgcaatattgtggttttgagagattggcaaagagaggagcttaacgatcatgggaggcagttatatctctctgttgtgttcgtctctgcgcaaagtccggggaaagtgggtatggggaccgaggtggaatgtgcagctgtcggggttgagaccattgcgcgtacccgatctgccctatgagcgtatattgcacgagtgggagaccctacaatgcgtctagaatctccaagccgaacgactccagtccttcaaggtacgccaaccccaccaccagtcttaatcaatgaatcgatgcctggcacctcatgaattcatttgggctgagctgtaccgttcgtggcatgagtgagacgcgggggatgggcgtgtgtacgtctgggagcatgccgcagttgttgcagtcgctaaagagacagaggtggggagattacaggattagatactgggaagaaggagacaggagtaaagggcaagaaagaggggaatatactcacgtctccgggggataaaatatggtctaagagggcgcagccgcgaaggaatcgtggtggatgtggagccctatattcgaacctagggttcagagagtaggatgtgcagatgttgttgccgccggtggaggattctcaaaacacatgtaacttgcccattgaaatccactaccactactaagaaggagatttgttcggcacggcggccggggatcggctagatagactgagctagaccaacttcaagcggtactccgttgaagctgtaccgcactgattgtaaaggacggtggggaaggcaagcagatttgaaggtgaatcaaggcatgcacagcggcggcaggcaaggtagaagaagaaattattaggatggagatagccgtatcaaatacaggagagcaaattaactcggctgcacaaggcgatgcagcaaaaggcaggttcatgatactgtaactaagagagacagcaagagcatatagtttgtagatcagataacagaaattacttctgcgtaccattagagcatcaaagcaaggacctagttaactgtcgaggcagaagagcaatctaggcaggatcaaggagtatagaaatagccgtgtaggagacagatggagagatacgcgaacaagctaggcttactaaactgcgcgtcttgaagagccccttaagagctagcagaaagctgtagatactggtgtctttgcagagtgactctgaatcagaaaattcgaattgtgagacggaagatgaacctaaggtgagcgaccaaagaagggccacaaaggcagtgagaaagacggcaaagatgtagcctatcctgacaccggacattaaagaacctagacagaatcaatagaattcgcaaatagtgttggtggcctccttgcccggcagcactggaagtagccgttgaattgttgaaagtataatcctataagagtataccgcgagagcaaaggtctatagcttggagaagcaaggcaaatgaggaagtcaactgataagagtgatatcagtgttagtgagatgattacccactgagctatgtaagcggcatcagatagtctatctgcgtaagaggccgatccacaagcagctactgtagacttaacgacggcgtagagcaattagtctaacggacttccttaccccaactcatccttcgtcttcttctcctgtaatccaaactccgtctccaggctctcccgcattggaacctccttcaagacaaatgcgaccaaaaagcccagaatagcaaatgcgaagctaacataccacactatacgcagactatcaacgtatacgcccatcacgacagccttaacatgagaccggtcattcagggaagccatgaactcgttcgtagcaagctcgtacgcaccgccgtcggccaaccgggcctgcaacaaaggctcttggcccagacggctcgggaggaagtgattaacctgactgttaaacacagcggaggggattgcaacgccccagatgctactgagactgcgcaggaaggcccaggtggcggtcgcgacggcgacatcggtctctgggaggggtgcttgcagggcaggcagtgtggtggttaagagggtgccaacgccggcggcgccgaggattgataacccacccagctgcctgtggaggaattgtcaaggagggtgaacaggctaaacgcaataactaaaggggcaaagccggcgaaatgaaaaggccgatagcggttcaaagttgaaaggctactgccggtgaggatagcaaatgggatgcttgccacagcgctggggaggaggtttacgcaggggattggggaggcttcctccaccgcttggaagtagaccgggaggaagtaagtgatccagtaggtgagtaaggcgtggatgaatgctaagccaaaggcgccgagggaggtgcggtagccgaagaggcggagcggcatggtcggttcgtcggttggcagcagagtcgaggcttcaggggcaaggaaagcgatgagtccgaagagccccaggatcaagggcacgagggtccgccatgaggactaggcgtgcacggtgccgccccaggttagcgctagaaggatgaagagtacggaggcgaccaggagagcgttgcctagaaagttggcggcggacgatgttgcggatggagactttcttgtagttgactttgagaagggggatgatgaggagcagcgcagcgccgcagatgggcaggttgagatagaagatccaacgccaggtaacacgttgggtcatgagaccgccaataacagggcccagcgagagggcgacagcaaacaccgaaaagatgacacccatgcatttgggccgctcgtgcagcgggaggaggtcgcagatgatggtatcgaccaggacattgatgccgccgccgccgatgccttgaatagtgcggcccgcgatgagtgccgctgtgctcttggctcagagacggctgagccaacgccgaacaggactactgcgaggatggtcaggctacggcggccgaagatattggccatccggccgtaaagcggttggaaggcggccatggtgagcatatatgcattggagatccacacctaggcatcgcccgagttcaggccacgaacgatggtggcacggctgtcgaaatgacggaggcttccagcgcggatagcaacgaggtgatcgtgagagctgcaaagatggcctatctcaacgatctattagatcaagtacaggatggggaacacatggatgaggccttacccagaaccgccagcccttttggccagcggtgctgcaagacgaaacagggggggtttgtggcatgcttcataataatatggatactggagtgtgaatactggaacaggcttaatactggaacatgcgggattctttatcactaaggccgggattacctagtaggctggggggcctgcataactgtggatttaaccatacgggattttgtaagaccatggatttcaaaaagcgggtgtttggtccccattgcctaaaaaacttaaaaaaatctcttgtgccatggtttttgaccacacgtcccagggaatttttt

SEQ ID NO: 4930 - DNA, 5870 bp, Emericella nidulans
taaaaataaaaaataattatagtaataaaaacagaatagaagttagacgagaggattagaggaaagagacgaggaagagagaaaagagcattctgggaagggggtacccgtgagtaataacaaagtagaacggaaaaggtggcgcaaggtagaaatcgaacgtattattgcgggccaattagcgctaagcaagaccagggaaaggaacggtcaggcaccacaaaatgacgccttttgggaggatgtccaacgatacttcgtaaggaagggatagggactaagccctcccctaggcaacggcagatggggccagagccaaagagtagaggtaaaacgtcatgttcagtcttggtgtcgccacccacattgaaatcgaaaaccatggccattcccggcgtttgtgacactgggaatcacggcaatgttgctagccttgctcatgacgatgctagttaccaggagaaccgggttcgagagattgagatcgatacttgagtcgacaactctaggacgggtacttgcgccgttaattcctgcgcctgatcatggccatggtctcggtgagggtgcggacgtcgagataactggtcctggggactgggttcgaatggtaggtaggcgcaaggttctgattacgccggaggttgtttctgtgaatgggactgtgctggaagataaaatggagagcatccagatgtctgctggacaaaaacagcaattccagccggggccagtggcggatgttgatgctgatgctaatgcggatgtgatctcgcccctgtatccagataaagtatatgatagctagttcggcagcttgctgctgtttcgtccatttactgtcaccattagtgcaggcagttttccccttgaatattactttttgtcacagagattcataggcagaatctgatgtacagcaaaacccaaacaaagaacaaccatcaatggaggaatgtctataaagccttcttcgacagcgatatagcattataaatgtgcctttgtggacttccgcgcaagttttttgtttgaataatgaataaataccgctatgaaatatccatatggagggtagaccgcaatctgcttcgccctgagcgcagtcgtttatccctctcagtattagccctaaccctagccatccccatccgcgatacgcttccaaaacaccatgtccagtccgaggcccccaaaaccgatgccctgctcaacttatgatgccatgtgttcacagtgtagattccactatatcaaactccgcgagaaaggcgtcctcccccgacacctcaactaccaccccggcacgtaccccgtaatcttcacctgcaacctaaacctcgacctctgcctcaacaacggcggcaccttcatcaaccacggcctaacagccctcggaacaatacaatcccatctagaatcccacttcaagcttcctgttcccgtacacagccactgcacctcatcaaccgttggaagcgcgattcacattcacaccagtctcctcttcgattttccatttaagctcaaggacgtgaaccggtggaaaggctggctggcagagtttatgaagatcagcgtgtacgagaaaagtgatactctaaggccaagagcactctatacgactggcgatggggactggaatatcggctgccccgatgaagaggaggagcggcatctttgttggcaaaggctgaggtggttcttggagagggagggggttggagtctttgtttagtgagtctacgtatgtagcttattagctccttgcaatttgctaacgttgctttgttttcttgtggtttatggattgtgggattctgggagtgtgaattggttccatacacgtatatagccacaagccgtcgtacatgtagatcatagacagaccttgtaagccgtaggccctctgccagtggaagttaactcttttatatcagaccaggggtgcggtactttgcaaacgcaggggctgatcacatcttcgacagagacaaaagccagattcgttgtcgcgaaacatgcacaggcacaacgaactgtcgaatgcttgctcttagaatcccgacttgtaaatcgagatctccaaattggcggtagaatggtaatgagtgtgtccgccagatatgtaccccaggcactgccattaaccagtcgcctaccgtcgcgctgctcgatcagattgattttgagtgactgtgagtgcctcgatgggtgaggacgttgttctcattatggcaatgaggcaatttctattgcctgatcttattatgattgtcgttttctttacacagaggctgtttgggtcatttcctttgtcacactgtataggtctctgaccagggtactggtggacgtttctatccttcttcgttaccacatctgcagagcaaattttatgaattcctggtaatgtggctaatccaataggccttcttgagcaacatatatctcgtatacttagaccaagttctctcgcgcccactcttccgccgtctgaagacgcatcccccgatgagcattccacgtctcctctgcgttccaggcaacgcccctcccctctccaaacacgatctggtactttaagagcccgttctcgggatcctgggccaggtccctctttgcggcatctacagtcctgaccctcctctcgaaagccctcctcataacactctctacaatatcggccaaccgcccatacgacaccgtatccccagcaacatagacaatgttatccggatccccaaatgactcctcaagagcaatttccgccgtaacgcgcccaatatccgcagggcccgtaacagtaactcgattctcccagctccctaatgcggtaacgacgcccttctccgtatccacaaccccgaaagccctctcaaacaagaaagatgtaaacatccccgttgagataatcacccatttcgtcctatcctgtgaacgtagaaggtcacgcacagcaagctgctcatcgaatagatcttgcgctgacccgcggccgatgatgtcatagtcgactccaaattgccagggtatatatcgcggcaccctcgcatcgaggacggctcttgccagtttcagctgtgtcccgcggccggcggagaagccggtggctgagattattgtatcataggcgctgaagagtgatgatagggttgactgcgacgaggttgagatgtcggctgggacaagggtaatgttgttggctttcagcctttccagttccgccgctttagcagggcctggggaggcgatcgacgacggacgaagaagaacggaaatgtgtgttctggtagaaagtgcaggatgttgcgcaagcgagaggaggatctcggtgcctaattcgccagctccaagaacgaggatgttttcaaccgatgacatggtgcaaagccttctagtttctcttctgaaagacaggtgattatgacactgcttcttacttctgctggttactggatccagttttatacctattatcaactgttcacgatgtgtgatgattagttatataatgaataagcaatctgcactcggcgactttttggctccggcggtgtactgcatatggcttgcaggctcacgttaccctactattacatatacttttgcacgtagtccaaccgcaagaatatatattcagacttctactctgtctatcttttttatacccgtctccttcctctagaacacaagctgatgctcatggaagggatttcatctacctggcagccgttaccggtacgatcttcaaaaactgctagtagaccagctttgaatagtgatgctacaaatgtcaggcctcgagtgggatgcgtctctagagcactgagcaacaaaccggccagccagatgaagatcaggccggtccaagactgtctctcagatcgagcggtgtaaagtgagaggcgactgagagttcgtaacccaggaccttatcgaaagctgtaacgggcacttgaatcctgctgtcaattaaggaggttgtttgaaattatatcaacacccaactgtgaatgaccgcgtttagcattgctttcttccacgccgtttatgccagatataaacttggcaactataaagttagtttttttgaaagacgttgacagtgtcattatcatgaatcggtgagttttgatcttgattaatttacttcaagcaatgttgcgacatcaagcattctttgcttaactgtaatctctccatcgctatacaacagttttgcaacaagattactgctgtcggtctccggattggacgcagcgatccaaatttaagctgtcgtctttccaagcggcaactttatgatcacaatcaaggcacgttcaaagaccagagcaagccctgaagtagcaaacggtagatgtccgaatcaagcttgcaccgctgcttgacttcgagtccaaaagaatgaaaatagaacgcaggatactcaagtagctaccggggccatacctctcggatcaccacttggtgagcgacctgaactcagagccaggcgttctttctgggagtctcaaacaagctgacccttgtgtccaagcttcagcaagaacttgcagttctcttgaccgccggcagggtggggcgatcagatcttgtcccctggtgctgacactgtcacaggatctacgggcgtacagatgcaccttacagagcaggcgctctgctgctaggattagcactgaggaggtcgcggtcgatcctgaagctcttcgaccagagcgaaatgcgacgttggccctggagtatcggctgagtgtctgacttgttcctaagcgtcaatgtttagttcaacctaagtcgtctccattcgtgggtccctagtctccagtttattgcatttaacggctggcacccgtgacccccagcgttctccggttgccgtaacaaatggcttgtagtcaacatgcagatctggtcagctagtcaataatgatgagtccttgaatattgactcattgtcagttgccttgattgttacctatcacagcagtaatccatcccacgcttacgtggatacgaattgtggcgacagggattagagtcaaagagaccaaagtgaagctattcgcacaggaccagcttcgcggccaattcgcgggcacttaacggccgatttacggccagttcacggcctgagtgcctggggcaggagtcgggcgaggagcagatcatgtgaccttcccgggctgtgcagaatctgatggaacctccatggcttccgcgaaggaggactgttggggccaatcgtgggagttccttttcaacgtaggcgataacaacctcaccgcctcagaagctctggccggcatctagaacgacagggccgatcttctcttaacactacgaaagggtcctctggcccggaaagagtcgggtcgaacgcggggcttccaccgtgctccatcggccacttgaagacgaaaaccagcaaaaggaacccaagagacccaagaggaaccgcagaggaaccgcagaggaaccgcagaacaaccgaaagagcaaccgcaatagtgcttctagcagaattggcttcaaggctctgaacggcggctgcccgtagcgatgacgccattttctggggtcatgtcgctatttttgccataaagaaaaagaaaaaggaatcttcgaatagtcaaaagtttggatctggatcaaaaaagaagcaaaaatggcgttgggacgaggcgagtggcgtggacgaaagtactgaggtgggggtggagcttgatatggggcggtgatcggggatgttcacaagtagcgattcagggacagcccatgacaggaacagcttccagccatgatctcatcacttttgatctttggttgtggcacaaatcagccgtgggaatgtatcgcagggc

SEQ ID NO: 4931 - DNA, 4617 bp, Emericella nidulans
ctatacgtttacacccccgccctcctacgaggttaacaacgtcggcagagtcggatacagactttgcgcaggcagattgagcgagcccttgattgttccaccttcgaagtcagtcctgcggaggtcgacgagcaggaagtctgcgccgggtgtcctgttgctgccgggctggagccattgtagcagcattgggcgtgggagggatgccgggtctgtggtctgggggctggggaacgcggcgtgccagggctgctcttccgacattctgtaagtgaatttagaagtccttggactatgaaggcttgaaatgggacaagtggaccaagtgttgtggttgttcagtaatggttttcaattcgtgagtatatatagctgttgaaatgtcactgcggcgtttgtcattggcagtgtacaatgtgggtcgccatgacggggctgaggaatgtatgggaataggcacttactacttactacagtataatgttgtgatcaatcataccacatatggaagtatttgtgagtaagaatcaaaatggtttacgaaaagtaatagtagatgtaagagccagtttgccggctacgttaggaagtgtggtttgcctaatacaggaactccatattgcacaacatgacagatatataaatattctccagaacccactctgcctcaataatattagtgtgcctatggtgggatgcctatcaccaataaactacgcttctacctcatctcaaggcttcaacatattacatttgttaccgacacgacgtctctccccatcttacactatgaccacaaacatcccagtaatcaacctcctttctatggaggaaaagtacaaccacgccttgagcaaagcactcgcgaccgtcgaccctgaaagagccacactcaccgatcgtgtaagcataatcatgcacaatacaagcctcttctttctatcccagacgtcgaattttgacctaattgtctctcctgcgaactcttacggccgacttgacggtggctttgacgatgccatatcacgggcattctgccgccctccagaacactcgtacgacacactcaccaaggccgcgcaggctactttatatgccaaatggcggggatttgcgcctcccggcacgtgcacaattgttccgtttccacaagagctcctcaaggccgacggctccggcgacaacaaatgggggtgtaagtgggttgcaatttgtccgacaatgaggacgccagatgatgtgcgctgggatagggaggttgtgtacgagtgcgtatggagcttactttgtgctgttgagggctggaatcgagacctggacgaaaatcaaactggcgagcagcggattcgaagcatcctcgttacgcctatggcaactgggtgtgggaaggtgagccccgaacgctgggcggcgcagttcgtgcttgccattaagcactttgtggatgcagtcgagaacccagaaagatggaggaatttgggctggaaggagatttatgacgatatgttggaagtacagcggacctggaaggtagatggtaacagcaaatcttaggcaggtttatatctggcccgtgaacttcagatgaatgctttaggggatagtattgagcttgttttggctctgattagcgggctacataatcttattagagcttgataaggtgcttgactaattctaatatcggagaggtggactgtcctaacaaaacctggctatattggacccatcagagctctctttgatcctcatatccagcgaatgcagtcgcagcgtttacatcaggcttgactgagtatacatcagcgtttgcagttggactggatcaggaggcaacacctcatgttgtagttcatcatctaggtcttttgaaacggactcctgggcttgaataaacatcatgggtagttaacttatgcctgctgaccaactacctttgccttttactcttcagccgagcaagcgcctgctctacaagttcttgaggtaggtcagggataacctcaccaaacctagaatcagcatccccagggttctgtgggtcttgatggcccagttgctcgccttcattaggctgaggactttgagcttgatccggagattgaagcacgcccttcaacggcccaccggaaatacgatgaaactcaacacgcatcggctcccgactcaaccccggccaaatgtcagagggtagatagtcgccctgttcgacccgaaacgtttcgcgggcattaacatcctcttcatacagggcatctaatttattccttgcatcacggaggatcttctcgacgcggtgccggacgtgccgccgcctcgcgacctcgatgattaggccatcatacgcatccaggaacccgtcgtaaagcgcattgagatccgacagatccgccagcccgcccttgatgcgatcatgctcgtcgttccagacggcggtgaaggcgtgcgcttgagcaatatatccgggtagccgagttgacgcgagagaagacaaataagaaaagacctccttggtagcgttatagatcgcggcgaacgaatcccgttgcgcagttaaagtctctagcacagattccatttcgccgatacgatcttggatctccatcacgacatcctcggcctcggcggcgtcattgacgatgacacttaccatctcccgatactccgacgcgctaagagggtcgagcggggcgtttggatttgcgttaaagtctccttcgatggtcgggcctgtgcctgcgccatgaccagggccgggatgactgcccattactccggctggcatgtcccctgtgatggattgggcagctgcaccgccaccctcggtgtgtttcacggccgtgacgcagaggtcgaaatgacggaccaaggattccaggagattggccatttcctgcgcgtgcatttccaaggaatgcaccattgacggcatggatgatatagacggtaagctggagctagaacctgactgggagcccgaggaagatactgaaccccgggaagacgctagtttcgtcgtcgcccggtacgtgctcaacgcctgcttgatagactggagctcaacatcaaaggcattattggaagcgtccagatctgcctgagcggcattggtacggtcgattgagctcttcagcgtcgagtgaagctcctctacgccccgctcatccacaaagtcgtgtagactcttgggttcctcaccctcagggcgaaacgacgcatgcacgatcgtctcgcgcagtaaaccgagggtctttttgagccgcgcgtccgctgcatcaaggctttttagagcatttgcaaattcagagcgtcccctgagggaaatttcctcaacttcggctcggacgttgtaaagcagtctaagctggttgttcaggccgctgcggaggaaaccggtgcgcgctgacactacaacgctctcttccaaggctgagcgggcagacgtaacaatttcgtttgcgcgccatacgtgattgattgctgacagggacctcttcgctgcaacgaggtgtgagatcagtgtttctagcggtggcaggccagtctcatgctgcgcttcccgttcaggatggccgcttgatgttgatgagtctactgctgacatgttgacggcctttcgtgatgatatggctcatgcccggcacaaaacgaagacactggcccttctagcgacatccaataaatatcaatgacggaagttggggacgatgcgggaaagcccaggttcacagccgcatcacgggacctgtcgagattctcaggaatacttacgtcgtgatgatacatacgcaattactcggaatacattcatcctacggctttagcttaggctcagcaataatctatagcttgcaagcatacggagtgcaatggatctcttgtaggaacttaatcagatcattttgccccttaatatgctggacttgttcattttattttttgtgtagcattccgaaattcgaaaacaactatgcgcaactttagccgcaatcaaaccatcttgagcaaatcaggtatgttggctgctgcccggaaattcggtgacaatcgacgtcaagatcactgatcaccgcgttgacttgcggtgagactgatgtgcatggatatctgcaagggtccctgatccatgcccgacgcggcaatgtgcgttacgacatcaattgcttaggccaggagagatatgtcttgcgcaattatggccgagcacgacacctgaatcctctctaaagcgatgccggagatagcgtgatcccaaacaaaaggggtgagctggggttagtctgaagccgtaaacggtgggccgtggagatggctaagatagtggaatcatggatgtcgcggggggatctgatgtttgcaagaataactggggcgagtcgaggctagatgtcatcgttagtgcaatcaagcaggcgaatggtgtcagttctggacaaagattcctcattttcgacatcaacatgggcatatggcgccatcgggcacgtgactccgcccaggtccccggggccagagtggagcagcgctgcagcacgacagacggatcctcactgcgtgatcgagaagcatctatttcggcaaaaccgcaggacttcaccttcttatctacaccgatat

SEQ ID NO: 4932 - DNA, 5613 bp, Emericella nidulans
ggaaaaatggaagggatatagagtggagagaggggagaaagagataggaaagataaagggtgcaaatataagagagggaaaagggaaggaggtatggagaagagaagagtcaagtatggaagtagagaaggagaggagaaaaaagagagggatggaaggagtaagagaaagaaaaggggaataagaatagggattagggacaagggaaaggaagggagagaattaaaaagagaaagagataagaaagaggagtagtgagaaaattagaggaagaaggagagggagaaggggatgagaagaaggtggagtggttataaagggagtaagaaggagagaaggaaagagagaaggggaaagaaggatggatggaggaaagtgtagaaataagtgaacagagattttgtgaaaagacaggcaaaagcagagctaggaggatcgaatatgaaagtactgaccacccgagataagtcgccgacaagctcttattcacatccccaacaaagttcggctttctcttctcaaagaacgccgtaacaccttctttctggtccctacataaagaaatgaattgtcagccatattcaaacatacacaaaagcagttaatgacgaaaggcaaacatacggcgacgtaaaccgatgatagataacctcggactccaacaaatgagcctcctccgcactctcaggtcccctccacataagctcccgatttagcgctgctgcctgaggactcacattttctgcgatctcagtagcgagggccaaagcgcgcggaaggacctgactctgctccggcatcgtctctgcaaagaggcccccgaaatgaggagatgtggacgggtaaacggcgcccgttgagacgaggtagttggcacgcgagtggccgattagccgggggagaaaatacgaggagcaagactccatagtaatgccacggcgagcaaagacgaagccgtacttgcttgattcgtgtgcgatcctgttcaacgttaggttccttttagccgtagggagttgcgactgtagggtaaagtaagtgacagggtgtgtacctgattgcagctgggagaaccatggtcataccaactccaacagctgagccttgcatagcagcgatagtgggcttacgacatctgtggattgcgattgctacgcgaccaccactgtataattaccaagtcagtccgaggcagttaccttactacaatcctttcatgggcgaggaccaacctgtccctatgctccctcgacctctcctccaatgccttaaacccaatctccagatccgcgccagcgcagaacgtattgccagcgcccgttaaaacgacaaccctcacgcgctcgtcgcggtcgaacaggccgaagaccctctctaggtcctcggccatggccatcgtaaaggcattgcgcttttcgggtctgttgagcgtaacgataacgacaggtgttgcattcgctgagcccacaggataatgtgagagtttgatgtgttgtgttggaaaggactcataggataagggaatctcgataggaggtggagtgaaatacattgttttggcggtgacggtggtagatgttcgacaagttgttggctcggtcgtgacggcagaggttatttaaagggcggaagactggtgagacaacccctctgtctcggcttcaaggctgacggttgtcggctgccccgtgcaactggtggtatgctcatctagattataatagctgattacaatagaccggttcagggacctcggtatacccggctaggcgttgcggagctctaaccccgcaaatgcggagagctcatgtacagtacagtactactttcgatgcatggcaccacaccgcttaaataagtaattgagatagtattcgagctgagttcgatagattgaaggaacgaatatagtaggtagcaagcttcagtaatcacgcacagatgaaagagtagtgttgtactacgttggcagagacctgggttagccttaggcctcgcctagtttccggttagaaagctcagtaatcgtctccgcgacttatgacttccttatttgactctcgcaacaagacggtctagtatgattagttcatgtttgaattacggtcgagggccctaagaacatacatgctcgaattgggcagagtacgaccccttgatgtcaacaagaggtgcataaacgtcgacaactccgtgctgcacgagagtattcatctgcagtttctttagtgactgtagtcattgcggtgaaggccgacgtacacccgccagataccgctgcaaccccagacggtccaggtagcggcgacagaaaacgatggttccaaagttctcgttgatcgtcttgtataaggaccttgctgaagccagaggcaaagacacctggcgcggtgcgtcatacgactttccgtagccgtaaacaccgacctagaaacaaatcagtggcagtttataaccatcgccttctctgtacgcacatcatcatatatatagccccggccagtgctcccaaaagtttctatggcaaaaatctctccttcctccatttttgtctggtcggagttcttgacaaaaggaacagatttcccgccatggatctggtaatgcttgatattatggccagtaatgttccgtactgcctttacggggaatgtcttccctccaatttcgacctcgtagctttccatagcctcttggatggcagcgctaacatcactaatacggacatcgattcccgcggtctacatcattagtgattttatgtgtctatttactaagaagcatacctttaggccggcattagtggcatctttgactgcggccagaagattgtcgtagactggatcaaaagtcatcgtaaaggcactgtccacaatccatccgttgatgtgaacgccgaaatcgaccttcatcacatcacttgactggagaatgatatccttttgtccaggattaggcgtgtagtgcgctacaacattattcagagacagtcctgtcgggaaacccagcccagccttaaggctatcgccaggttcaagaccagcgtggctctaggagtgcacgcacgccatcgtcgatatcctcggcgatttccattagaccctggcggggtttgacacgctcctgcgtgcactttcggacctggcggtggacctccgcagcctttcgatagtcgtttaaaaacgaatcatcctcgagatgactgcgagacttgtagcgtacttcctcggccgtggtgcgtgaggtgttttccacattgggctggtactcctggacctcgccgatagggtacttgccctgcaggaagagctgagacagcgggactctaggaggagaagattgctttgcagccttcttcttgcccttcttctttgactttctcttcttttctgattaccattcgcattggcattgattagcgcggtcgagtgcgcttcgccgtcatcatcttcgccgctgtctccgatagtaccgtctccgtccgttgcgagatgcatgccccgcggcattccaccaagggggcactcgacaggaccggttgtgttttctggccgtgtttaggtttgagagcacgagtagatttggattgaattaccttgacccttatggccatctctttcaggagtcttcgaacccattgtgccatgcgtatattacactgctgtataatattgaaacctgcagatcgaacgatagaaaagaacgaagttcgctaggcaccagcgtttcgtttcgtttcgtttcgtttcgtttcgtttcgtttcgtttcgtttcgttttattatttaacgtcactcggcggatcacgtggcccacgtgatctgcggcctcccagggggcatctggacgtgctacctaaacagaactgcctaggaactagctagatacaggtttgaagcagcaactatggacaatatatgttggaaatgagcggaagaagcatccggcgctaccctggccaggtcttcgagggcagatgcccgttttgactacctatagattggggggaggggccgtaccctttgtccaggtagatgtgtggactgtcgcactttcaagcgctccggcgggcccagttcgggcatatgtccttgaaaaaggatgattcttgcacgatgcggctgaattcctcagccccggcagctgtacttaagagccagtctattgtttttgacgggccatcctttatacatctccatctatccttccagcgttttctggtatatgggcaaaagaagaagtgtactggggtctttgccttgccgcaggtgcagctctccaggtagtctgtgtggtcaaaacgctggtggtatgccgtaaagtctccgtggcctgtacgagcggcgacgagtcggccaagtacccaccggggcagcttgtgctcgcgggagcggctttcttttgtatggggtctgatattcagggctttgtaggtttcaggcgccttattagcatatgctgtatatgtctctgtacggagccactgttttgcctcccgttgtaggtatgctggggagggggggatgtcggggctgtatatagaagaccctagcttagcgagcttgtctgccagctcattcccagcaattccagagtggcctggaatccagcggacctgaaggggcttccgttgcatggttaggattgaagggctttccatccactgggcggctagttggctaaaggtctctgacagaccatgtctgtgaggggttggcctatagcttgctagcagggaggctgcagctaggttatctaggaggataactagctgggtggagtagccaacgcatggttgtcccagggctgcgcgtaggccttccacagtacccatgatttctgcatcatagacttctgtcctggggcctgcgggaccatgtcccttggacacaaggatagggccaaagtagattgcatagccataccctgccccctggctggtctgtgagccatctgagtacactaaaatctgtaaaggggcagggctgtagcctttgttgtctgttgggagcatatataatggagggagaggcagctctattatagcgcgctctggcagggggctgaggaggagctgtaggatccttttaagcctggttttgggcctgcccgcggtagtctctgtggctatttaggcaattgggtgtttagtatcagggctcatgtatctcactgctgccctccggaggatgctgttgagtagagcttctgggtctggtaggtctgcttcgcggaggagtgctgcagtaggggtggtcttgtaggctgggataatagccagggctgctgtgcggaagagagaaagcagggagttaactacccctttttgttgtttgcctgtatagaagacttctgccctgtacagagctgttagaagaacacactatataactgctgcctgcatggaggctactaggcagccatgctgggtattgctaagtctctttaggtgctgggcgagtcgtttcccgcggctaaagaccaaattaatgtgggctttaaaagtaagctttgtatctagaagaactcctaactaccatgatatatagggatggtgtaatctcccctataccaggtagagtaactgtgggagatgctgctgctactttctaag

SEQ ID NO: 4933 - DNA, 2600 bp, Emericella nidulans
tgggactggagattagattctcttggttcctgaggggaaaactgtggctaggagttaatggctggtttcccggtcgcttacagaatttcgggagtgtgtacctatcgtgatgtgtagtcttgttattcttgccacgaatacgaacgaggtgttgctggaatggggtgtgaactgggatatttcgggctgaacagtggactatactgataccaattgatttgtcttgacagcgtctcatgtatttacgaggaaaaggctatgatgcaattgtacaaattgatccaatgtgctcttgtatgtacccagcagtatccttgactccatgcccgaaaaccattatggacagtagagaaacctaacgtatcaacgccgaaaagttgggtattataaacatagccattacctcataccagtattaaacatgtcgaggcgaagcagaacatgatgcagaccaagcaggaaagggagaccagaaaggcctacaacacctttgtcttcatccactcactcgtaccaacacctagattgagcccattacgagcccaccatttcctcacccgctcttcagcaccagacactgggtccgcgtcctcaagagcttcttcgatatcgcaggtcttgaattccacacggaggccgctgcgacgccaccattctagaacattatcgtggccatttttggtcggtccaacgagcacctggcagtcgaaaatcatcttggcccctttcagcttataccagaaatcaaggacgtgcacgtggccgtgggtgctggcgattcgtgcaacagattctgcatgtgtatacgggatacctgatgcgtcccaccaggcgagcgaagctgttcggccagactgagccgcgaggaggacggatttaccgactttcagaggtattggacgagagctgggagcggttgctgaagccctcttccaccattcaagaacattgacgcggccttcagcactggctgactctagcgctctctcggtgtagcggagttccaagcctgatgttcgccaccactctaggacatccacgaagccggcacgagaggctccatccattgcgtctgcaatgtattctttgttcgggagtgctggggcatctcgccaccatgtcaatatcttgggattgccgtatattgctgatgcacgataggggatgttggtgaggcgggaggtagtccagaggagatcaaggtgattctcggtgagatgagaaaggatgtcagttcgcgagaatttgaagatgaggtggcatgctaaatctgatagtggtttccaacgcggcaggctatcaatccgcttcttgattgcagcaaatgaaccacgaagaatagtgtactccagagatgcaggtgccgacatcttcaggagatgactctgccattccttaggaactgcaagtttcgttgggataccgaccgctttggcgaactcccaatcggttaagatgggtcttcgaatatattcaaccataattttagtggcaatgaggatgggcctttcttttcaaccatactaggtctggccaaacttcagactggaccggtgcgacttttggcttgtttaggcttctttaaactggccccaacttgcgatgccgtaaactcggtaggctggggagtcgattgccgtttcctttgctaacgagaacataagagttttttcaatcatttaatgtagctctgtcaaacccgcccaaggcagctgaaccagctccccaggtgcgttatatttccatagaactggcgatacaatgtcaatccaaggccaaaaccgacgaacttccagcagttgcctctcagttaacggatgctcccactctgagacggtcattccagggatgagaagaacgggctttgcagacttccagccccgcaacaacgccagtgtcagagtgttggtgaggcctgacagcatggagcctaatgttcccgcatcgactggtgcaatgaggaacaaatcttgccactcgcagagtttcccaagctttagcccttgagcccatcttgggcccccaatttccttttcgaaagtcctactatccaccgtttccatatatgggggaaccttggtcgtgccgtaaagaaggccgaatgtttcgttccggaggaactaaacctcgatgcacgggtggctgttacttggcccgtggagcctttatggcccacctcctggtccgtgaattaataaccccttggcggggaggcccagccttaatccctataggttgggccctaacacgcctgaacccgttaatttttcccgcccgtttgggggtttttatggtaatcagcccagacccggaacctttttggccccaggtctaattccggtggggatgggatggcaaacccaaggcttaacggtcttactttttgggagattttcaggaaaactcccccgcctttaatagatcggcaaaaattatattaaatgggcctggctcgcgccaacctcctttaaaagaagtgttaaattttcgggcgtcttgttttttttattctaaaaatgagaaaggggggacggcctttctcctgtaattataagagttcttatatgggtctgtatttttttgtaatatacatgtaggtt

SEQ ID NO: 4934 - DNA, 1587 bp, Emericella nidulans
atccttatagtagatagctgttttttctgttaaaagcctacccaatgctactgagggaccgaaacccaacccttgctgaataatcttagagtctagatagacctgtctgaaccccgttttccagtactccagtctttgtgcgccaccagctgttattccaacaataggggaaatacctgtacatcgacattttccataaccgagatacctcacggaaagtcctttaggcccatcgacctttagccgtaacaggagattgcccacaaatttaatactctgtatcgactcaagtacattatccccgatagtaccttccacatttcgcatatccatactctccccgagaagataaatatgcactttctgccccagcgccacagcaactaactctccgcaaggggagagggccgcctgtattcgcgcaaacggccgcgtgcagaataagcctccatgattgtagccgataagttgtcgtactgcatcagatgggggaaatatcgtgggtgagagttgcacctcatggctagcagacgtcgacgtcttgagtatgaatgtcatcccacgcaactgcgcgtattggcacccatgccgagattgaaccgcaatagccgacattggtcttactgttttctcctccgtattgctgagggaaacgttgctccgtatccccatgaggttctgccggcagacacggtggaatagtattctcagttctcgtggtgtcgcctgttcaatgtctgcctcggcgagtgtgggaacagtgggaacagtgttgagctggtgccgaagtacataagagcttaacgccgcgttccgccaatctttgcacgtccaactcgccgaaaagaacgactggaagtcagcgaataggagtatctcctgcaaaagttcagtcggtaatggatagccattgctccttatatccacgtttgcccccattctgggcacacggttggatcctggcatggtttttcctgaattttctattcttgcttttctgtacctggctgcttatgagatgccgggccgtagaaagagaacgtttagccgtgctgcaccggtactataaaaaccaaaattgaggcgccagtgatcctcttctgacgggaagccgattggcccaatttcggctaactcggcatgccgcgtcaagaatggcatgccatagggcaatgcagcctctttttgtttattatgggaccaacccgataaccattgatgggattcaaagttataacaccagtttcgtatgctgaagaatgcatccggccctgaaggtcggatgtacgacgtatatccatctttaactagtcatcattggataggcagattactcagcctgaatgacatcaacatgttacccatgatacaataggtcacacaaacaagcgctaagatgcacttggtatgacaagcccagtattccgtttcaaaagacctagatgatgaaccacaacatgaggtgttgcctcctgatccagtccaactgcatacgctgatgtatactcaatcaagcttgatgtaaatgctgcgactgcatttcgctggatatgaagaacaaagagagctttgatgggtccaatatag

SEQ ID NO: 4935 - DNA, 4987 bp, Emericella nidulans
cgtatctcgtcataaagtcgaagacgctctggaatctcttccaccggggtccctagaggaagcacaactgccagagaggcagcgtcttcaatagccacgccagctccctggccctgatgtggcaggaaagggtgggctgcatcgcctagtagagctaaccgtgcctcgtaccaccgcggaatctcctccatgtctagcagtttccaaacccggacagtcttggggtcagctttagccagcagcttaagcactgtcaagtcgaagctggagaagatctggagcattcgctgcaaatttcctgagtgaccccagccctcgtctgcctcttcagcggagatcgactccactgagggatggatgagcacgaaattcaggacattgttgtgcgaggtgggatacatcacaatgcgacggtccgttccataccagatacataattcaccgggccgttcgaccaacgctgcagtctcagggtcgtccaaggcagcctgcttcggtacgagaaaccgaaaggcacttcgaccacaacaggcagccttgacatttcctccaggaacagcacgacgcgtaactgagtggacgccgtctgcgccaaccagaatgtcgccgtggaactggctgccatcctctagagtaagggtggctgtcgcggggtcgacctgcactacgcggcttccggttcgaaaggggatggcttcgtacacgccatctgggctcatggcaatttgcttgagctgattatgcagatcgacacggtgagctagcagccattgctagatttgtggtgagtacaaagtaattgctctcaactcggcgcttgcttactcacatgctgccatctcttgttaggctcggccaggtcgattgctcgctcgactttcccgagtgaggtatactccactagctgaaaggaatcagctctcttagtatcaccatcaaggcctgggatcattggggccatggacaacactcttaccctctccatcaaattcgccccgaattgctgcgcgtcaatgcccaaccgcttcagaatcccgtttgcattaggagcgagatggagtgccgcgccagtttcgacagccagtcgagactgctcgaagatctgtgcctgtcagagggtttcccgtggaatgtacagtgactatcgaaacaacagacctggatatgatggccctgcttccggagggcgattgcggccgttaagcccccgatgccaccaccaactaccagtatcctcagggggggaacagttgctgtctcccgcgtgatggatgtttcattagggactgccattgcgaagattcattgactgtcacgcgcggacgtgggagatacgactgctgcacggggattagggagaagcggggattattacgtctgaaaacaggaacactttaaaatgtaacccctttgctattatgaggcagtcaaccttggtgggataagccgttagccttcggatgcccttgctgtcgggttagggcctgttcgggaccacctccccctcacccccctcttacccgatacccccacccggtgtaggagactacaactcgcccgaaccaggactatgagtcatgtatggctcaaatgagcgcttttctgcttctatgtctgagatactgtgccttaattatgtacagttgcgggctctggagccgatatcaggacatccagtcataccagggaccacggttactagggctcagatgcggatagtaagccgcatgtatatacaccgagtaatctgttctctttcaagatctgagtaattcctgatgccctgacacccaagattccaaagcgcgtattggggtcctttgatttgttgtatgaatcattatccacttaaacatggtaaggatattggactgacagtggtgtttcggttatattccgtgacatcagctacttttagtgtctgttcaactggctgtcattaccacgtgaaggatgcgagtcaacgctgcctcattggggtgcaactgagagcaagtcgctcggtagacgatgaactgaggctaatcatatgaccaagactggcttttcagaacgtggtctttacgatacgggctttgctcttttcttttggttctacttgtgcactttcctgtacttggataagatgctgcggacaagtcgaggtattggctgtttcaaggtctataacagcgtaagcgtagtgagtcacagatgcggaattttcgctgcacactgtttcctgtgtcaaaagactgtcagataggtcatacgagtttatacggctacaaattagagtagacgatctcagttcaattcggaacctctacattcagataccagcaccacttgttacttgctgacatcccgtagcctccgtagaagatggatcaggttcgccaccaaccggggcgtctgcgtaaagactttgtggtaatgatgggcctgataaattcaatcatcatctcaatactgcagtcgggtcctcaatgccaacgggctcttttgcttccccggggctctggaggaccggtactaggggctgcttgggaatatagcggggtacatcctcagtttctagaccgtcaagccatatatttatgcccagagccggagcgaccgctaattgtctatctggacagatcacgcgcaaatatactatgccgtaggcccacagcgtcaaactagcatggtatagggcaatcgccataagatctcgcaacgtttgcaaaggaagcattcttattgcccggacgacttggcccgcgtgccatatagcgtgccgcgcctgctcgctgccaacccactcccgcaaagcagaggcaggttggtccaatgcgagtgctcgactgggatcctcggatgtagccaggacttctacctcctctacggacacatacatgtgcatcagaaccaagtgcagctgcaccggagcctcggccccatgcgccatccggaaacagtcaaggatccgccgaagctggctatgtcgggacgccatgaggaggtcaccgtcccagtaccgcgaccccgcagctagcaaggagctcagctgccgaaactcccataccagtccccagattgaatgaatgactgctccacaggtcagacggatgtccgcgatgcggcggctcgattctaggaattcgaagtcagcgacgcactcgccgagggtcggaatacgggcattggccgatgatgacgcggacgctgacaatgcattgcatgcttccttccactgcaaggcagacctggcatcccatagcgatgatggagccggaaggggcagagacatttccgcgtaagtgattagcggtgcagtaaggagggccatcgagacctgggcttcgagccgaaagagacggtatactagtcgcttgtatgcttctttgtacgcccaggcgtgccatgcctcgcttaagctgtggccagcctcgtccagttgcgtcggcagaggcgcataggcagagtgatggaacatacctccccggcgcaccatagtaaccagcggctgacgaaatgcttctgaaatctcaatcttgcggctgttaccgctccatagtccaatttcgagatagagcaagtacgcttgatggaggtggagggcacgatggtcgtgtattccctcaaagctaggaacgcaggcgtcgactccgcatgcgaatccgtttcccaacgggatccggggtcatcaggcgctcgccaacagagagttctggccagctttgggattgaaggttccccggtggatccaagaatgcgctgaggaaaacggggcagtaaggtagtagcgaatgaggctgtccagcagctgcaccgaggggaaggacgacagaactgcagagatggggtgtttcatctggctgagaacgatcccaaggatcttgtcgcgggaagagaggtcgagactcggttccgtcgcacagggactgctgtttgcctcatcgatctcttgaggagtcatggtggaggttctcgcgtcggtgggcaagaggagattctcatgctcgcagtagccatggtcctgaggagctgggacaaagcgccatcgcaggtgttgtattgaccgcgtgcctccgcgggtgccttcttctgcttcccttgctcgagcctcgaatggggactctgctagaggcacgctaggagcctgtccatcgaactcaaaggggatatggctattgtaagattccagaaatccaaggtcgaccatgttcaggtcgaggtccgtcggtagggcaaacgtgatcaatccacggggcgtgcgtaccgccactgggcggctcagtgaacagagacgcggccgccagctcgtctctgagctcctgggagatgaagtcagggtgaatgcgactcggtgcctcctctgaatacattgaatggagctcgctcacctcctggggccaggcctggctggtcggcatatccaccgtaggagtgacgagggagtgagtctccccagcaccttcttcacccgcctcgacagggcgttcagattcagaaacacaattgcttgccccccgagcggcttgctcgtctgcgttaggtggcagaagctgtgcgcagttctgggtagacttgggcggagccacgcactcaatattccgtcgtcgacatctagcgcagggtttgtcttcgtcgcacttgaggtgatcgtccgcgcaggcactgcatgcctgggatgcccggggtgctatatgcggcttgccgccgtgatggcgtcttctcaaagccttgttattgcccgggctagagggcaacgcaaaatgccgccggaggcaggtcactatactcagtgggacaagaattgagaggtcagctccatgggagacgttccatttgcgaaccgttggttcacacggacactgatggggtttttttggttgctcagatagcgtagcacatttacctgtgaagggcctcagcaacagaacctccggaaagacatgggccgagggggaaaccggcttccatgaagctgtcctactgtatgttgaatcctcgctttttc

SEQ ID NO: 4936 - DNA, 5328 bp, Emericella nidulans
gcgcacgtggagagacgatcatgaactagagtgaagccgggcccagttgtagctgtgtagctgtgctgggtacgcttcccgctggaacacgccaacctgggtttcaactatgccctcttttatctaccttcaacgaacgggacaaaccatgatgacgacaattgcataatatgacctgtttagtacgggatcaaacccaggtacggcacatccgtatagaaaagagaaatatagtgccgcaaacagcacgttccaaatgggtatctatcctgtacagtattatacaaccataggctcatagatggcatttcaccaatccccacagcacccatagtcctctgcagactaataacttcccatccccacctactccttgtggcgcgccaaaaggataccttttccggccacttatgcgtatcaggcaactatgtcaatctcgcatgttggtgtgtcaaatgcgagctccctcaaacacagatctccacattgtgtattttgcgaagttcagaaccgaccaataagcggtctccagccccaggcacgaatgtgaaaaagattttcagaatatgaggagcccatggcccagatatcagggttggcaaatctcgcttgtcgctgatcgcagaacatgcctgaacgtaggataagcttcgacgcgctgaatcgaatattcgggtgatccgatgtgggcacggggctggtggcttcaggcaccgagaagcaaccagcagaatatggtctgaggtagatgtttggttgtggtcttgctgttcaaaagttgaattagccgctggaagacgcaaatctggcgttggagcagcatgagaattaagaacttacacatttagcggatttgcctcgcggcgtgtcgtcgcacagggtgtgacctggccagctcgaccatcgggtttagtgtctcgccatagcctgatcttcgaaatgcccaattcttcaaaaactccctggtactcatgaccggctcacgaccgcggaacccagtcgtattcaaagccgctcctcggaatttgggcggtatgtgtcggtaattgttgataatgtgttggtgggtgcagagtgggatatggagctgttgggctctctgttggtgctgacacaggtcgctgagccgactcgtacgatacgtctgggtgatgctgattttggggcggtatttctaccccggccgctcgaggacttggaccttgatacatctgctgatacggttggtagctgggctccggtagatgcgtagtattctgagggtgataaccgacgtgcgggtgttggacggacatcggtgcaggcacttgcgaatgactttcgtagccccagggctcgactttgaccggatactccgaatccgaagactcgcattttgaaggagagcgagctgagccgtaaggcggccactcacgcgaagtcgagatctgactcgccgtcgacagagccgacggcgtcctagatgacggattcgttccaagggcctcgggatattgaggggacggtataagcgaggcctgttgttggctatacggctcttctaccggacggtcgacgagtcagcaccatcaaatcgacgcagctatatgcgatcaggggccagtggaggctcacctaagctctggtaccctggactccctgttgccatggataactgatgtcttaacgctctaatctcagtctccagtaaagcatttcgccgcacaacctcgtcgaattaatcgcccttggctttcagctccgccacttgaagttcgagtcgctcaatatgctctcttgttcgttgtcgaatagttctctgggcctcacgatcgttggcgcgctttctctccagttgctctgcggtgagcgatgttactctacgtgtgccagcacgagtctctttcttctttggctgggaggggtcctgattggagcacattttggctccgcttcgactctcgctcggcagacttgactaggtagggattctctcgctctggatatgcctgggtgggaagcaagaacactacatcccaggtttgtgcgccgcagatgccagaattctcacgatattgttctgttcgtgccacatgggccgtcgtaagacaaagcctggatgcctggaagcctagaactgcgccagaagggaagacagaatgagatcgaaccgaagacctgggaagggaaggggcgtaaaaaaaggaataaatgaacggagccccatagcagggtgcaggacaaagataaaaggatctgtccctaaatcaagccactggaaacgcgcggatgtcaagagctgagatcggctcggatttaggccgtatggtccttggacgcaaactgaacacagtctgaagcagccactcgatcagtgaataataatgacattaattattattgacagttagccgatatggatcccaacaacattattattaagcattaatagtttgggactctggggccgggatattccgtggacactcacttcccaagataaacagtccctcaggagctagggcaccaatcacgaagtacaaggacgagaggatacctcgctggaggatgggagacgatggcgattgcaagcattgcgagcatagcgacccttctcaagaggctactattatgggtccgcgctatggaatcctccgacaaacccacccacggaacaagccctagtttccaattggagatggtcctgtgcactatgtagtagtccctacagacggaagcctcgcagcccgaaaaagcgttgatttagttgccctgcgtggctatgcgaagctaacgagacccgagttattattatcatagactcgcgggaataccgtttcctgatctgcattccatagcacagacgcacgatgtggtcgtatatcagacaatcctagaaacgaaacgaatcggtaacaccggtgtaccaagtccgcgggcgtacagagtacacgaggtttacccgagccacatggctgagtggcgagagaacgtacccagaacttgtagccagacactcgcggttatggcccagccccgctagagctccgtgaaggaaatgcatcgcgacccgagatttggcgcagtcctccgtatatgctaccgtctgcgaacggtcgtgcggaacgttgtaagacggttatagcgaaaacggaacgaattggctggactgaaaggctgaaatgcatcgacagttgggctactcagtatgtttgatccatacggatttctgctatcagtcgacgacctgcggtgcactcattgcactcattgcacgtagacgaggtaggcgaggtgggcttcccaactcccaagttccaactcccaattgcccaactgctcaaggaccattctccggagtatcgccggcgaaatgatacatttatggatccccgccctgtgaggacctcgattccacagatctgtgaccttggcggccgcggcggccacgaagctgtccggaccgatagatcgggcgaaactcagatgcggcctgtgagcggtgaataacatgctgaccagctaaggttggctagtgctcccctcagtgagggcccggcatctctccgtccgccaatctttcatcgttgaatcttggaagagacactaacgtggttggtaagcgagctgcgcatgtaagcgagctgcgcacctgcatacagatttcccatattttgaccttttaatcaaccacaacgcctttatattaattattatttatttggacaagcatttcttctatgcccaattctatggcaggtactacatgtaggtaatgcccgtgcctttggtgtttgtgcaccttctgctggtggcccgcatggaccaggtattgcctgaaaagacgcattatgagcttcctcgagctctgtagcctcttgtacagaaagaccattatcatgagctatccatctatgcgtacgagctcgctttcccctttgtatagcattttcagcacgtagtgccctattctcttgctccaatagtatgcccttttgcattgcaatttgacagcctttaattagctggtttagggcattatggggcggtgatggtggactttttgagtgctgtttgagaaaatctctgagtaaagaagcttgctttagaagctcaccaacatttgctggtgtatgtaggcaaaaagtacttgcctggctgcacggcttccagggggtgtaggtgtacaagcctgaatactaagctttgaaagtactggttcaggattcaatggcactagtcctgctgctcgaaaactgtttctgattgtatccagcttaaatatgctgattcgagcttgtagataggctgcaaggaaatcaagtttgttaatatagctaatgccaagctatattttctgaaaaccaagctggcatacaagtacttcaaaactacaaaacatccaatatcaagtagttatacaagataggaggaatatgctggcatgcagagtggtataatattatgatctgtatagatttgattaaattctggtatataatggcttccatggctatcaagaactagaagttaatatcttctatatatacaatgctctgttgacaggataaactgcttctaaagccagcaaaggctagttttattagttgtagacttgttaaacccaacccacaaaacccgccccaacccgccccgacccgccaagaaatgggttgggttagaccttctaattatctattgggttttggatatttttggctgccccaaagcccggcggagcaacctgctgggttgccaagatatctgaataggtatattactgtatttagattatattttcttacttagatagttataatacagtatttaaatacagtattttattaactatgtagatcactgcttattagagtaatgatatgcataactgggttattttgggttatttaggttgggttagaattatttgctaaacccatgggcggtttactgtgaaggtaacccaccccaaaacccgcgtgggcggatcagctaggcctaaaaacccgccccaacccgtggtttaacaagtctaattagttgtctatctatttgtactaatttcaaatcaccagtcaggcagaaggcctgtaaaccatgcttggttatactgcttgcccttaaagataagtattagtagaagtacctatctagaagtactgattgacttaattgcagtaacctattcacagtttcctggctgtagaactggtctttggccacatgattctgacttggtaatcactttctgatgtgcacaaaggcccattgcaaagccagtcttatcaaagttgtagatatcatctggtaggatcctgtattgttcaattgtggcttgtaagaattacc

SEQ ID NO: 4937 - DNA, 3016 bp, Emericella nidulans
tttcgccatgtctggtccaaaaggggtggtcttgttgctgccgaggcccgcagcccgttaagccggtcccaagagctgtcaacgccatctggtccggcctctcctttttctacatcttaggcgctttgattgtcagcatcactgtatttccgacaaacgggaatcttttcggcggtgacggcgtcaacgccagtccctttgttatcgcgtttcgcgaggccggcctaccgggccttgcccatgccatgaacgccgtcatcttcatctccgtcctctcttgcggcaatgcgcaggcctatggcgccacgcggacccttgtcggcctcgccgagattggtatggcgcccagcttcctccagaaatgtgacaagcagggacgtccttactacgccgtagccctaactttcctcgtcggcggagggctgtgctacctcaacgtcagcaactccggagctaccgtctttggttggttttctagcctcacctctctttgcaccctgtacctgtgggggatgatctttgtatgtcacatccgcttccgcgccgcctggaaggcccagggccgctctgtaagttccctcccctggaagacctggacgtggccctggggatcgatatacggcctcgtttggtgtatcctgctggttatcgttgagttttatctagctgtttggccgcttggtgagccaagctctgccaaaaccttcttcgccaattacgtttccatcgtggcaatcgtggtgctatatatcgcggccaaaatctactatcgggggccgctctgggtcagggcgaaggatatcgatctcgatgctggccgtcggttctatgtcgacgatattgatgcattgaaaaggcggacttttatgaataaggtggtggattttttcacgggtgatggaagtgtatagtgaccactggattattcttgggagtctgtgctctgtatgcttcgacgttttgactccagtttaccgcagattgacatgtggacttgcttggcatatatgctccgaggcagccgttattagccaatgcactgtatttcttcttttcattcttttcgtccttcttcccgctgccatgggtagggagaaggtcggcccatgacgataaatcattcgctttgtcacggtgcccggccgtcaagcacacgggtcaatatgcgacatcactaacaacatcagatatggtgaagctaggaataccaaatcgacccgactggttggggaggatgtatctcctgtatgcgacttgctagaaatatgcgaaagagtgtcgcagatgagcgaaatattggcaaaaattccttcagattcttcgggctatggactattggccctgtggacagaggcgaagacgaacagccttgaccatgagagccacaaactgttaagctgccgaatgtgctactagcgagagttgctcttccctagtagaagcggaaagccaaagggctgaaagtgagaactatatatatatatcgtcggccccatgggctacatgccgcctgtagcctgggacatatcagcaacgccaacacccaactagagcatagaaccagctataatagcctaggtactctactacattctcccttatactgtccacagagagcattgctggtgtggcttgacctagggcacatggtgtggaaggcttcgtaatggcaggcaaatttactgaatataaatgcaaataagttcatgtttaacagcgaccgccgctgtggcctagtggtaaggcgtgtgacttctaatctcaagatcgcgggttcgaatcccgccagtggttcgactcctcaatttttattggatttgcagttcctattggacgtgcgatatagtccatgacttcttttcgaccggaaacctatcgccgctgtggcctagtggtaaggcgtgtgacttctaatctcaagatcgcgggttcgaatcccgccagtggttcaattcctcaactttttatttcttttttatacccccttgcgccgtttacctgaaaggtcaatttatgctgaaactagttgaaagggctcgctttattggaccatgtagtgtccatgtctgcattgattttgtcatcgcctcacattcgggtagatttgagagaaaatgctgggctttatacaatgtaaatacaacttcctgcaggctattctgttccttttgttctgagtcagtagaggatcatacatcaccggcgacatacggaccccctaatgcttcggaaccagcatcatggaagtcacaacagtgatagtcaagcacgcgcgtcaggaggggactgcgaatgcatctcagtatgaacagtgctggcctctcgtcggggagcatggaggggctcaccggctccgattggccggtgcggacttgctgctatccatggctctttttggcttcctcggccagctcttctgctcttatgttcctgataaagcatccactcccacccgacgtgagctcctgcctctgccttgctatcgcatactcgtcccgagcactggactccctctaccgcgccgttcggacgccggagattactcgacagattgtcagcaaccttcttatcgccaccgcacactcgcgctcccacccacgtttccttatcctcacattacaccgcgccgcccgcttctattttttcgcaccgtgggattaagggattgaatactccattatttatcgtatacgtgtcgacatctctcgacaaccccattcttccgtcagaatactcttatcgcccttggaaatcccacccgtgcgtccacttccgtagtgaagccgacgctccggttccgggctgagaagagtttctgacacggtataataactgggcacatgagtagcaagctttgggaattcttcttacgcgatgatgttgagagctttcagcggtttctggccagcgccagctatacctctggcggccagcgcgcaacagccggaggagggacacatctcaatgcaggaagccccggtccgaggatctcatctctaggtgcttcgcgaagggc

SEQ ID NO: 4938 - DNA, 2137 bp, Emericella nidulans
gtcggcgttggcatatacctcgtacccttcatcgacaatggagagggtgaggaacgcagtgcctgcaaaatccagtcagtgtaagatcgagttaagcgcggaaataactatagagacttacaaacttctgtcacaatcccacctacaatcaactgcttttttccccgtcgccttgaggcgttgcggaactcctcgttatcccatgcattgacctcgccctggcggcggacagccgtggtgttcgggtacatatcgagaatctccttaagcatctgcccgttggggccttcgtccgaggaggtcgtcagcacggggatgtcaaacgccttgccgatagcagcgtgggcgaccatgttgttacggaagtcgttggtgctgtaggcgcgaacgacggtggcaaggccgacttggtcgtcaatgaccaaaagggccttcgcacttgtaatttctttcactcatgtctcatgggccgtctaaatggactggtggtgatcttacagcattatctttgtcgatcctgttccatgcgctaacgtttgcagacgcagccagcataagaccggcctggaatacttgaacgaaacgcatttgctcgatatgtttgacaaacagactggaaccgcaacttttgaactggcagacaagccgggacttgagactgctttctatgtactttggcgctgctgctgtctttccagcgccgtagcccgtccctttttatatccgtgccatgaatcttcatcttcgtgtcctctacggtaaacgtagcttcgcgttctcgacccggtttccattcttcgagtcatcaccaaaaatatcaaagtaaccccaggcatctccaccgcacgcaactatctgcaatgtcttggctgacaaacagatgccataagccatactatattaaccagccaataatgacgtcgaacgaacctgtaactcaagcctgcgtgcagttgtaagccgttggcgcctcgtctctcaggtagggcttacgccttaggggggcagcgggttttgcaggatgagcgtgaggtcgtagagggaattggtgaagccgaggctgacaaggaccttgccctgcccaccggaaacacgaacggctctctatactgttcatcagacactttcgtagagactcatacttctattcttctatcaggcactcactgagcaacagacattctcttgttatatacaaattagggcttcaactcccaccgaacaccgatcacagtttgaaacagttctactcaagcgattccacccgagagcccccaaaataagctgccatgtggtctcaccgcatgagccaatcaccggattggaacatgttgtcaaagacggtttagctaaatagctaatccagtatagaaatagcgccattctgaccacatcttgcatcgggcacatctggagtcttcctcaatactagcagattcatttccctcttgtctgtcatgatcgttcaccgacccgtctcatgcaatcgagcctgatagccacagactagggacgggatgtagcccactagcagcagatgcccgtcgtaaatccacctatcaccgcacaactcgtttccacatacctatctcggtatactgcacggccgcatccacccaggcgaaagactcaagcagcgccataagcttgtctagcgagtccacccctgcattttgagacaaaagggccatgtatgggactagcgtgctgggggcagaggcggtcttgtcgggcatattcagcatgctcatggctacggccacgcaccagaggatcacgggttgcgagacattctggttgcagagtctgtctaaacgaggatataaagacttaagaaggctctctctgaccggctgagagcgggggaggggaaaggtaacatgtactgcatagagaatcgcgctcaagcgaatggtgaggtaaatctcccgtgacagatcagtttcggcatcagtctgcccattacactggatgacggcttcagtgggatcgttctcgtcgggcagtgacagaagacggtggtggatcaggtttcaactatcacctaaaagatctaaccctgcaggactacatggctctccagacgcagcgtagtgctggatgacactggagtctggcctagatggataaaacggac

SEQ ID NO: 4939 - DNA, 3642 bp, Emericella nidulans
gccatcatacccgtttcttttcgagttttctggggattctcctctctcgaaccagatagggatgaaacacaggtctctgttgagactggcgtcgtgagcggcacaggattcaggtgcaggaagactggaagaggaggagaaggagggaaagaatcagttaagaatgatactcattcgtatttgaagatctggagttaagtggtgactggtagtgcgccttgtctgggcctgctgttaaattgcaaatcatgctgaaaattacatataaattacaggctctccagcaactagcaactctatcaaaggctccaaggaacttccattcccctccccactgaatccagcatgacctagtgactgtcaattcatcaagcatggcctatggcccgtgggctcaagcacgagtcaatgatcatggagccatggagccacggagccacagagccacagagccacagagctttggacgtcattttttgcagcccagttgccaactagctttttgatctccagattatgctcgacctgcacagacgtaccttcctttttcgtactctaaaaactcaaaaacggtcgcgccttcaggcaatacttcggtatagacaagcgcgttgctgcctggagaagatggcattgctaggtgggcattgctaggcaggctgttgctgagaacaggtgccagcatgtacagcaggttcagcatgtacagcaggttcagcaggttcagcaggttgagcaggttgcggccattgcgatgattcctggtctgaggatgccctgaagcgcaagctgttggcagcggtcatccagaatccagatgatccatagtcaacgtaattattctccagtcgaactgattgcagggttgcacagctctggacacactagaacacatacatacataccctgtcattcgcaaggcagaggacatggaacgtggggaagattcctaacaagacctccaagtctccggcggacacttacagcgctctggctgagcaggacgcagactgctcactcaaagtcagccttacagagacgccgccacattttgtgtcgttcgcaagctggatttcgggatatccagatcaagagcggtgagctgcgcaaaacgggttagctccaagagtgaggcagtgctggaagctggcaccatggatacttttgattgggctggattcgtctccataacatccttgctccagcctgcggtcagaggggtttgattttcataccccgagcctctgacaggcaagaccaaatgctgggcccaacggactcccgtaggtaaattaatgaatgtcgagtctatttctcgaaaggccagacagtggagatggtgaactgaccttaaaatgtactcagagtactctagagtagtatcagaatccgtctctaattaatttactcctgtgtagtgcttggctgcttccaatccatttcatttgggtatttatatccgcatatattcctacttagaggtgttttagatcccaaaaatggaccccagacttaaggagtccttaaggagttcaaaagaactcagaaagtgttgagagactggtaacctacgagcccgcgagtcttaggatctgtttccggtaggagcagtatggagcaatgtccagtggctcggcaacaacatacgggaatgggaggagaggaataataatccaggtgatgaaaaataatgagtatttgggaactgcaccttcaaaagatgaagatccaccagtggctcgagtggatgaagcaagatcaatgccagtgccagagtagagatgacgacaagtggccgtgtgcggagatcaacatctcatatctccagggtcatcatacatggagcggtaaaagagctacgattctgtaatctctgtcacaaaaggaggagacatggaatgagcactttctgttcccagttcaataatactgttgcaggaaaatgaagtgctaagtgctaatttcccaatgacagcactgtggcagtgcacgtattctagaggacctagtggaaccactagctacggcctggccactcatacagtagcttttgcttctgcactattcagaggtggggcaaaggagaacctaggacacgcttcgctctcccgaggctttgggcgattcttggatgccactctccagccagtcagaagcaggtctcccgggaaccctgaattgaatccagcctgccaggtacctttgtaattttgcatacgccctagccagcaccagaggtatttttttcccttttcccttttttaggtcgttgcacgctcttatctggcagattttctgatgtacaccgtgtacaccttagcttcatgtcggccatgaatcagtcggtatgccaaagaaagggcttatgctttcatctgcctgtctcggcattgcagctctcgagctgacgttgcgtatgaggaatcccccacaggggagcggaagggcatccagttgctggcaccggtcggcaatctcttctccgcgaggcaaggccgcataaaggtgataccgaactggaactgtttcccgttcgactattggttcatttgcatgagacttcgcactgctcctcgcccctggcgcctgggtcgagatcagggccgctgtaagttactgacggttgctgggcggctgaggaatgggcaccgaggagtgacggagttgcctattgtaggctcatggaggcattgattgttttaactcgattgtttgtacatcatttccgagcatcagcaggactagcggccatagtcggctgaaaagagcagatcaagcgatgggaacggctggtttattgagtaattccctcgtaccccaaaccaaggttttgctgcttgggcttgcagtaaccgaaaagaaaaaaaaacaaaaaaaaaaaaaaaaatataaatgaaaaaccgccgtcagccttaaagggctgcagagagttccggggaccgcttccggcgctttccaaatttgtgtcagcttcttcctcgagccccttttggccgcacggctcttttgccactggatgcagtgacttgcagtcatatagcgcgtccgtattgctgacactgacgacagtacttggaggtgcatgcagaggaaaccaagcattatttacctcgtactaaaataagcgtttggatgggaccaagggtactggagatttcttggccacagactatctggtcctagcgtcctgaagcgcgctcattcgtactccatacggagtagcctaactacacttcacatccattgccggtcaatgctgctggaaactggaagcctgcttgttgtacagggccagcatattaggtactccgtagagccccagagtatgatgacatcaggcagctctcatgaagtgacacccaacgagcaagcatcatctgatccttcagggtccaaacggaaaatgaagccgcacagactcatgcctgttcgagatggtatcgatactgaaagtctgaaactagctttcacagccttggcggtacaggcatgccaatcctggattaaggcagcgattatgaatgtacttgttgcagggtatcatgcatcagcactccccggagaaattatagctccgggcctcgtcctctaaacgacctagaaaaaccaggcctacatttgcatatttatagtctggtttta

SEQ ID NO: 4940 - DNA, 4765 bp, Emericella nidulans
tgcaattcctgttttggtccagttactttcgtcctctgatgtcgacgtgcagtattattgcaccactgcccttagtaacatcgccgtcgatgcatcaaaccggaaaaggcttgcccagaccgagtcccgattagttcagtcccttgtgcatttgatggactcgtctactccaaaagtgcaatgccaggctgccctggcgcttcgaaaccttgcctccgacgagaagtaccagctcgagattgttcgtgcaaaggggctaccgccgctcctccgccttttgcagtcatcttatcttcctcttattctctctgcagttgcctgcattcgcaatatctcaattcaccctctcaacgaatcgcccatcattgatgccgggttcctcaaaccgctggtcgaccttctgggatcaacagataatgaagagatccaatgccacgcaatttctactctccggaaccttgccgctagctctgaccgcaacaaagagctcgtcctccaagctggtgctgtccagaagtgtaaagatctcgttctacgcgtacctgtcaccgtgcagtccgagatgacggctgctatagcagtcttggcacttagcgatgagttgaagcctcatcttcttagcctcggtgtctttgatgtattaattccattgactgagtctgatagcattgaagttcaaggaaacagtgctgctgcccttggcaacctctcctccaaaggtatgttcttactcgcgttttccacgtgcccacactggcgtgaagtatctgacgttttgtagttggagattactccatctttgtccgagattgggcggatcctaatggaggtatccatgggtatttgaaacgattccttgctagtggagacccgaccttccagcatatcgccatttggactcttcttcaattgctcgagtcggaagacaagcgcctagtgggctacatcggaaaatctgatgacatagtccaaatggtaaggtcaatatcggacaagaatatcgagtccgatgaagaagataccgaggatggtggcgaagcagaggtcatcgcgttggcacggcgatgtctcgagcttctcggcggcggccctaagcagactcttgtagaaggttaatgtttccatcccatgctttttcccttcactgttttctgagcgtctaatttccattcgctgggctgtcttaccttttcatgtcctcttctgttcgctgaattgcttgtctcttcttactttgatatacattgcgctttcatgctactggcgttaagaggcatttgactcggtgtctgttcattttttttccagcgagcattcgggtgatacgatctatatttctctcttcatgggctttcttcctgctcgggttgtttgctgtggatgttgattgtattcagaataattgttgtgattgtgctcggtcagactgtgtttagctgcagcggtacctagatatattgtgtattcatttataaacttgccttatcccctggtgaataagccattcatatgttggttccacccgcaattattattgctgcggcggaatcggggaaactgctctccgagacggtccgctcgcgaagggaacttcaaaagtttcagctcagttgcacttgcttctcagcagacttaaactttttctattcgctacacgtgtggtctgctggtgatggcaagcgctctaccttcactggctatcccgggccagcgcctaggacctgctggaacttactccgccggtccaggtactcatgtttatcattctcacatatatgcatccatcgccggtccagtttctgttgactcggcacaggtgaattctccagcaaaatcgataatcagcgtctcaaggactatgaaaaaagctatagcagctgcgagcacatccacatcatctacaacgacagtgccaaaacccaagtataacacactacctgcggtcgactccgtcgtgttggcacgcgtgactcgagttcagaaacgacaagctacggtgtcaattcttgtcgttttagacgaatctgctagctcgcaagcactgaacccctcacaatcagcgtcggataacgataacattgagtcgattctggcgtctgccgcaaacccggagaatcacagcagctctgacgaacttcgattccaggcgcttatccgaaaggaggatgtgagagccgtggaaaaagatcgtgttgtcttggatgagatgtttcgcgttggcgatatcgtccggggtacggtcatttccctcggcgaccagagctattactatataacaacggcaaggaatgacctcggcgtggttatggcgcgcagtgaagcaggtaatatgatgtttcccgtcagctggaaggagatgagagaccccgtcactggggccgcagaacagagaaaagtggcgcgacctttctgaatgcacaatcacctgcaagatacacatttactaccacgacccttaaccgtctggcacggcgccattttatggaactgaatgagcactcactgagttgctgaatgaatgtataccccggtcacttgcaccgggctacttgcagcggcgccgaatccgcacatctgaggctatgcaacccagaacaagccgaataacgagccagacaccattacatagaagtggcggtgttcctgtgatcagaaatgccatcacctggtctcacgcacagaccacaagaccaaaactaattagatacccaatgaatttatcttctcactcaaaggacatttttgtcctagtcttgccttgtgcctggttcaaccataagacacagatcctcctcagtatccatggacctggcttttcaatgctggtctgtgtttgtcaatggaggaagagaaatggcttttcgcgtgatgactctcatcatcatgaccctggttctaagtttcttttccgataaatcgtggtctgggaaattctatagctagggtacatgcactgtttttgcctgcccatctctctgcttccatagagtggcaggtcattcattctagcaagataaaagcacaagcactgtatcttacagcggattaagacatatatatctatccaagtccccgccatcgaataaggaatcctttttaggaaacatagttctagctatatatgcacaaatatgactacttcttcagagtcttctgcttctctgcatcaatcaacttcttcccctgcacaaacaagcccttcctagacctaacagcatcgacatacatcttcgccacattttcacgatccgccagctccccaagatcctccaattcctcttccgttgcgggaacccaaaaggggtcctggtcgagggcttcaaaacccgcgaagattagttgaggttgggcggcacctgaggtgcgcttgcggatttcctctgcgaagccgaaagattcggcgacggggagaagggagaggattgtgaagaagggggttccttctttcattgtctcggagagaatgcggccgcgtcggcgggtgatgacgccgtagacgcggccaaggacttcagctgcagatggtgttagcatatttcatggtatctttcgtagcattcataaagtcgattgtgagatacccaggctagaaattgcagcgaatgagaaggcaagtacttactagaggcttggatttcgcaactgtacatggcaagcatgatccggggactccaatccaggaagccttgggagatactttcgcggacgagacggattgtctcaccggtaagacggccgaggtccacctcatcttcgtggttattgatttgaatttcctcgaggaagactgctattccttggattggctcctggcagagcgggccttgggctgtggcgagttggaaggcgtaggtgatcttgtcgcagaagtcgcggacgatgagtgcgtcgcggctggcgttttcgggaaggacactgggttgttgcttgggatcgtcgaggaggctagtggttttgttagtataggaatcaacttagggatatggggaacaaatacaatttctcgcatgtgttgactactgtggcgtcgataaggacattgggccctgtccgccgaggaccgaaggcgatgatcttatccacaacatccttccacagctccttgtcttccttgacttcttcgaaggtcttgctgagctcctttctaaaatcgtcaagagagagcaaggagacttctctagcctcgcctgttgcgtcggcggcctcgtcctgctgtgtactttcagaggaaagggtagcattttcaccctctgctctaatgattcgcttctgggactgtaggcgtttgatggtcccaacatgcttggtaaagaaatcagtaactgcttctggtagaggaatgacctttagtcggaccgtcaactgctttgatgcagaaacagccagaacaccaccccttcctagatctggattttttggagctgccatctcagcggctctgacaatggtctcccggtatggaacgattgtctggccggtttgaatctcgcacttcgcgaaacgttcacgaaggtctttcagacaacgctcaaggtgcagttcacctgcggtcagaataacatgttcaccattcggaagtacttcgtatagtgcgcaagggtcgctctgttcaagtaggcgcaggcccgtgaccatcttgctgagatctgacgggttgacaggctcaagggccactcgcacaattggcggcgtatctagcgagacacctgccaggttgatgcctccttcgagctgcgagcaaagagtgcctgtcttcaatatgtga

SEQ ID NO: 4941 - DNA, 5549 bp, Emericella nidulans
ctcgtacctactcgtcattcattcttgtaatggtcgagcgcctcaacatttcgtgcatagtgagcctgcgagtgcatccatctcggtgttaactgcgtcaaagaaccttgttccgaatctttggctgacggccgagctcgctagaatctcttgtagctacgacaagtacccggagtataggcagcaaccggggtgatgctgacatagataaatatccatctctagagagccccagattacccagaactgggcgagacaagactaataatagctatgtgccatctgggtatcttcctgcaagccatcccttgggggacacaggatctctattgacgaactgatcaaagttacagccatgtatactcattgctgttcggactacatttcctataatgaggggatccccaatagatgaccaaagttaccagtggcagacgctctaaataccagcttcgagattatatttattgatattatagcagaatggccgatctagtgacgtgtcgaggtcggtaagcgtgactgggggctggttgggttgaaaccaccgtctgggtaagcaaacctcgctgaccatgcagataaaccgtcagaatggtcacacaaaaaatccattgtctctttgtgacagagatattcctcctctgaagcgagggagacttttgaaactcgtactgtagggtcagccctcctgccaaagctattcatgttacagaagtttaagccagcaatattaaccccataagaggtacactgccttctagggtagtcattcggttccgtacagtttctcattttattcagatcatctttaactcttctactttcttggtgatcgcgatggagtcccaagaccggctccctgatggggtcagccacaggaaccgggtctccatgggaatcaccgcgatggtgacctttttggcgaccatttttgttggtttgcgtctgcgttcgcgacttctcacagtcaaaataaaatccgacgattgggtctgcctcgcagctctgatattcgcgtacgccaccctaaccactaccgtactcaccgacactgttggccgcagcggttgggatatctcacagtatgaccgttttactatcgagcgacgcagcaaggttcgtgatccacagccataatttaggatttttcttttctctgaagatctctgaatcagattgtgctcgcgaacaattgcctctacaacacgacggtatccctggctaaaatatcgatcattctctactatcggcgtattttcaccacttcaagaacattcgtggccgcgacctgggccatgggcgggcttattctgggatactggctcgcctgcatattcgggttaatctttgcgtataatcctgtccaggcacagtggaaatcgtggttgcctcacacgagtatcaacaaccaggccttctggatggccatgggcatcatcaacatagtatacaacattaccatactatgcatggcccagccattggtatggagcctgaagatgagctgccgtcgcagaatcttactctcaggtgtttttgctctgggcggattgtgagaaccccctttgggacggtggaaaaaagtggctgatacagtactcttttcagcgtctgcgtcacaagcatcatgcgcgcctactacctgtcatggtcccagattgataacatcaactgtaagtccgctgcaatcagggaaaagcggcggattcaccttcacgaggctaaaccagtttccatggacagacacgctctaccttgcaggaatctggacggcggtggagtctaacctcagcataatctgtgcctgcctacctatgcttcctagcctcgtcaagcattttcggggtcgatccgaacgagggctgtattcggcgggcttgggagagtcaagaatgtatctccgccgcctggatggggcaatatcgttctcaaaggctacagcaaaaggttcaaacagttttatcaacccgaatacttgctctcaggtacgcattcagacggatgtcgacattgagtgggacccgaggcgctcctctatcgagtaagagcatggaggaatccctagaaacttagcgtacctgttgggataaagaacaaattttattttttatgtccattgaattctagattgctcaacaacgtagcagctgattactactgccatcttacctgatttaatcgcgctaaggcttatgtacgtcaacaccaagccctccctttgcacggcaacccctatctatatagaaaatcacttcttcccattgtcgtcgaccttccaccaattgccaatattctcacaacagtaagagtaatacgatctcgccacctcttgcggctgttcagtccctccaccatggccagagtcagcgctcctgccaatcccagaactacgatcatcatcttgcatggcgcgtggcataatcccacccattattacgatcttgccgcagtccttcgagctctcggtcacaaagtgttgattccaagactcctattcatgagcggtgcgcggccggcaaactcgggcctctacaccgacagcgaccatattcgcagctatgccgaatccctcgccgacgcaggccactgtctcgtggtcttgatgcatacctacagcgggcaggtcgtaccaacgcactggccggattggacataaccacacgcaagcgattgaaccttccaagccgtgtcatacgtctggtttacctgtgcgctcacgcccttaccataggactgctcaatgtttggcatagtaaaagccgctggccgccaatttcgccgacgacggcacggtcgagtatcgcgatgttggcgagcgcatggttggaccgggtctctcaaaggaagatctggagtcttacattgcgcggctaaaaccctggaatgggcaggcgctgtatcaggagatccgggaagtcacccggatggatattccagtctcgtatatcctcagcctgcagggtatgatgctgccgatcgcatatcagaacgtcatggtggcgggtataggggctgcaggagggaagttgagacttttgggctagataccggccactgtgcgcacgctacaatgtcagcagaggtggtgcatacagtcgcgagcagggaaataaaggaacagtgacggtagaaggtgtcagtcgtattactcctttcctaggtcagagtgatcagcaaataatgtactacttttacacttctactactttcagacttctactactttccgactttcactacatttagtacattcgttcgctaaatcagcagggatctcgtaatctagacattcctgacttcactcgcatgtccccacctcccttgtaccactaatctgatatgtattccctctgcttttctttgctcttaagcagcagcttacctcctggcttgggtatggtcacatcaacaacccctttaccaaaccaggcagcttttatgcagccttgtgcccaacgacagtccttcacgtaaacgcccaaaatacgcccgcccttgtctcctgcaccacgtgcggcatgaacaccgccaaccactgcccaacggtcgtgctgcgcattagcgagagccaagtgggggttggagcccgtttagcccttgttcgccaacctgcactttttgaaatagaggctaggttgaccggtaagaacaacattaactatttttttataatcaacataggtccgtgcgtcgggtctgggtacaaggctgaaggctaatagtagcagttattatctcgggcttgattcttcacaggatcacgcatcaaattcattcaagtcaccagaacgcaaaggtagcccccgcacaaatacacttggcaattgatttaagttgacaccaaaatacttcagtgtgttgtttgtaaggccatccgtagtcttcttcgttgagagtttctacacagaagcctcgtgataagctcctgaatactctctaccgacgaataagaactcgcgaagtgtcctgcattgccgcgcccgagagttgttcatcgctataatcttcttgctcaggaacgagcaaagatcatcggcttgtgctgggtggttccgtgctgagagctatatcttatcccagcgaccttgagcccatccccatcaagaagtgtgatagcgtcatcatccctggatagagggcaattcggaatatcaaagtcttcggtagccaaaggaggtaagaccgcatctctaggaagaacttgttctgcccctgatgagttgcggatcttccatcctgacaatggtatccggcggttcatgaggttcgccagggtcacagattgccgctggtcctctgatgcaggcggattcacggccgcctgcctgataactacggaattttcgacaaggtcatcaagaaggacatctttccaggtcactcgcgatatggcgtggccagaaccattgccagtatgcaccgactgcgacgcaaacgcaagaaaaacgcccagccattgatgggactctgggaaatagaacacgagggccccgtcctggaacggtccatcgtcaccagaatacatagcaatattgccctggttcatgtggatattgtgcattccatcttgtgagttataccgctcgccaaagatgtgaacagtagctccttcatcaattgctgccttgattctaggctccaggacgtcgatgatgtcgttattcgggcctggaatatcatggggaagaactcgaccgctatcaacgtcgaagagattgcgtcgaatgtaatctaatcgtatatcgtctggagaatctggctctacatcgtctagagggtggtagccggttctgagatgcgagagtctttcaataagtcggcggtcgctgactttctcatccacccagtatacaagtcgagattcctgacgatctccagatttgatatttatggccgattcagaatcaccaccgccgttatcacgatggtataggagtagatgaggctttctcgtaccacggcgttcaacatggtaacgtactggatgagctttccaaacgccgtaattgtcaaggggcatgttgtctattagctgtgtaaatttttgaactctgaagctctatgaactgggaaatctctagaaataattgaggacttttctagggtgtaataaatttgaccaaggacatatactttgtaggtgtttggtgtgcggtgaggagctttcctataacgtcaccactgttgcttgataattcctctaccgcggttggctgctacgattacagatattcgaaccgcagtttatactggttactaatattgataattatggattcccataggaatggctgttatagtaacttagtccactttagatgagtggccgcccacttcaatgactcaattcctcgctgccggctgtacttctacgagctgcaaagtagctggcttgaactaactcccctcttgacaagtctctcctgtgcaccggtcgtgctttttccctcgttgagcagacaaaaagaggatgggtgaggtggggtggattggtggatttatcaacctgccatgggcatcagtgcaaggcgtacagattacgaggg

SEQ ID NO: 4942 - DNA, 8336 bp, Emericella nidulans
caccggcggtggcgaagcgaatggcgttgaccacgaactgcttctcggcgggaagaagagagttccagaaaagccggggctgcgaccaagcatcatcgaaggtggagctcttggcacgcacaagattgccgttggcagtacggtcaggagcagtaaagaatccgcgacccgcagtctggttggcctgtttgagggttgatcccttcagcgtgttggggctgtacgcatcggggttcagcggaatgaacatctggccagcaccgtcacggttgttgttgtgaatagcaacgcgcggctggttgatgggcaactgctcaaagttcgggccaccattgcggttgagctgggtgtcaaggtagctgaaaagacgtccctgcttcgagtcagcttaggtaaaaaagacaaaaaagtttgtcgctcgccgcctacctgaagaaggggatcctcggtgaagtcaacaccacgcacgacgtggccgggttggaactgttactgttagaaacggcaaagagagggatacagaagggggaggaggaagcctaccatgacctgctcagtctcggcaaagtagttgcgggggttgcggttgagggtcatcttgcccagcggggtcaatgggacgtattcctcagggacaatcttggtagggtcgaaaaggtcgaagccaaagcgcaactggtcctcctcgtccatgatttgcacgttaagctgtccggtcagtaaacatcttcgctatgtagtagaaataaggggtaccatacctcccactcagggtaccggccagcctcaatcgactcgaacagatcctggcgcatgtagtcggggttcttgccagaaatttgctgagcttcctcccagaccatacttgccaaaccttgcagggtcttccagtggaacttgacgagcttggtggagccatcctccgtgacgagccggaaagtgtgcacaccgaacccatcgacgtggcggaacgaacgcgggataccgtgaccggccatggcccagagcagggtgtgaagagtcgagggctgctggctgaagaaatcccaggcggcgtcatgggccgtggcagcctgcgggatttcacgatcgcccttgggcttgacggcgtggatcaggtcggggaactggatggcatcctggatgaaaaagacgggaatgttgttaccgacgatatcaaagttgccctcgtcagtgtaaaagcgggtggcgaaaccgtggacatcgcgggcgaggtcagaactgccacgactgccggcgacggtcgagaaccggacgaagacgggggtctccttaccctcagcagagaggaaggaggcggcggtgatgttggagaagtcgccgtacgaggtgaagacaccgtgggcacctgcaccccgagcatggacggcacgctcggggacctgcgcagtcagcatccaacgtttcaatcgacaattgaagagtcctcagtcactcacccgctcgtggtcgaatcgctggatcttctgacggaagataaagtcttccagcagggtagacccgcgcgcaccggccttgagactctgctggtcctcaattgggccgccgacgtcagtcgtcaggtacgagtccgtgtcgtcaaggtagtactcggacagaaattcctcagtggcctcggtagcatcggggttggtatcgcgacggccgagctcgcctgtcatatacggacagacggcattggcgacgccaacaaggccgaccaggccgagagctcgcatggtgaggtaaagtcaagataaagataaaagttggtggtttttaggaaagagggataggaatgcagaggaggtcgggcttgaggtcgggtaaagggcgctgcattcctagcgtaggacaggccacacgggtgtatttataccaagcgaggcaacaggacgatcgtctctgcaggaacacaatacggcctcccatctttccatcacattgatgagccctgcccggcccacctggcaggcacgggagctgcgagccggagccacttagcttagttcagcagcgaggtctggaaggcgcgaacgaatcgaatcgacgccgttgctgagcttctccacgaatccaagacctcccaccgcaaagcaagtacctacgtacgtcaccatcgttcagcagaaacggccagagcaacgctcgagcaacgctcggagcgatgtcttattcggggttaagcaggtggtgccgagcaggcgatctgcttggctatcagtaattatggtctgatgagtggttggggacctggaattgaggttgacggtgcgatgttgtataggtctcgaccagagtgcttggtaatagcagcgagctggaaggaaactcttggagtccccacagaaactggaagctgggccttgcaaggcttggcatcagccaactcgtacggggctatgccactattattgggccacagcagtgtgattgtgtgacggcacaagaaagcctgcctgcaaacagaacatcagccaatagccatcatttgatctgtccatcgtacaataattgcggccgctgtccgactttacaatcccagaatagcaacatactagagcccccagcctgcccggtttgaccgcctcagcgaaataacaggagagatcggcagttctctttgtttactgccgactgctgtgctcagacaatgtaggcttattggaggatatacaaccagtctcgacgagtactctgagcaggctctgacactgatcgacatcgagcatgcccaggctcggaattagggattaatctgatcgatacaaaactggggaagctaggcccgccctgaaattacagtggccgaacgctcaatcagcttcgtcgagaagtccagaaatgcttgataatttgacccttctgcttcgggtctgtttgagatcagcgtatctcgacgtattctgtattgaaaattcggattgttagcccgcagtggaccgcaggatgaataacgtagactcaccccagtcggccgggtaaagtcacatgactcaaacgagtatcagcacgcaaagtacggagtacgccacaactctatccacgataaggttagaaaatccgtagaagaaagtgatctagggtatacctcagattctatgctaaactcgctcatactactctacatgatattctacattacagtagaggcacaggctggatccggcgtcgcgggctgcccgactttgggccgaggatcgcccactcggccacggtcgcgcccacgtgatcttctccgtccgcctgggccagggcctggttccctgagattaccaatgtcgcgtaccgcccaaccggaacctcctgagcaagctcgatcctcgtagtattcccaacggggatcttgatttcattaagatccgtggcctctgggtcgtatggtcccgactgttcgatgttggtcaggttcgccacaatccgaacatgaggtcctggagagctcaatgccgccacaggatccgacaggggggtatcgtggaagatcacgcttgcgttaacgggtggtgcggccgcccagtcgaagtggaatccagacgccacggtttggactgaccgaccagtcgtggagccgaggttgacagtgaccgcactagcattggatgagctgggctgccagcgcgtcgacgcggtgccatcgacaaccgagatcggcaactggccttgttcaaacgcgacggtggaagacaccggactgcactggataaggttgacctcgaccgtgttattggtgccgatctctcgttgcggacagtcagggtccatgtgggggaagatggtgcaacgttgcgttgtcggccaagccaacaaacaccgggatggaggtgtttgcaaaccggcggtcggccgtgtccagcggtgcgctctgtgaacgctggagcacggtatgtgtgtagttcgactgggccgagatgggccatccgcgccagtagaaggttcggtacttcacgtagggaatctgcggtggcaggtttggttcaatgtggatggcatcatcgggaagtagccgaagacctagataaccgaagaggacgacttgattggcgccgccatgaccagtcaggaacgggtaagccggatgggtgccgccgtttatgctggcgttatccagcatctgctcggatagctggaagaacggcgcccgtgcataaggggcgtacgagtactgatggtaggtgtacgccgagcatcccgaaggcgaaacggcaccagcggcaatggaaaagatggcccaggtcatcgcaggaccatcagcggactgccggtttgcatagtagtctagatcagtaagggcggtttcggcagtgtagttgtcgtagccaaaggataggtgacgagtacaatatcagcctgcttcactgctgcagttccgttcatggtcgtgtattcgagcgtcactccattctcccggagcaccaagacattctccgaaatttcggtccacgtctcgttgggctcgaggccgaactgctggcggaattgattggcgtactcgagcgtttcggaaatcatcggcatagtaaacccaccagcgtcgatgtggttcgcatactcgtcctacgatggttagtggcgcagattgcattgcaaaagccgtaaaacttacaggatccgtcatgtttgtcagagtccagtaacttccatttcgttccacgatgctgccgtaaagcgcagcgactgaatcgtagatcggaaagtgcttctctcggaaggtgttggtatcgccgctcaccacccattgatatatcagagacagtccaatgtcgccatttaagtggtactggtaatcccagcaggccccggtgcccgtgcagttaccgaagcggccgcttgtccacgggtaaatcgcagcagatgggtcaatgtatgtcgcgtttttggagccggtgtatgtcgtctcaatattcttcttcgcctgagggtacaacttcgtcctgtagttcgtgacagcttgggcagcctccggatgggaggcgacgagtccaggctgcatccagacgtcggcatcccagaagaccaatccagcataggagtcagaaaccaggccgcctacggaaaagctgttgacgttgagtggtgcatcctgtgctgctcggatagcatttttgccgactgtgttttgcagcaagtagtaggtgtttgcaacggcaataatggctgagttaatgatgttgtcgtcgtcggggagctttccggtggtagggttgacgtagcgatcgaccgagtcctcatgcatgatactagcccactcttggacatgggagcgcagagaacgctgataaccagcatctaaggcttccgacactgcgcgcttagccgtcgcttgagggtctgggaatgcatccgtcgacgcagcaccgacgaacttggtgatgcgaactttctcattggccacaaagatgacatcggccgcctgtgcgatggacgactcgttggcgctcacatagggcttaccatgaataagtctgcgagacgacaaatcgacatgcttcgagccagtaatgtttgcatagaagtaagctgagacatcagggataccccacggtcggaccgcagaatatatagcgccgtcatcttcctgggactccacaaaatctgtccgaacagcggagtatccgtccaatacgttgacgattgtcgcgtgaccatcctgcgaaggtgttatctccatatccactacagcttgattgacattcaatttgtttgcgaacagtcgatacgtgattgcataggatcctttgtcgccggctggagtccaggtatacgaccacgataagacacccgctttgaagtcatagctggacttgaaatcgctaagcgtcacattatccacagttgaatcaagatagtcgtcgtcgcctagatcaagaatgagaccgctccagtgaggcacgccgctaatcacgctttcaccgccgtattggttcatccacgggaagtttgatccgttcgtttctgcctgtatgtcgaaaaaaccagaaatagtagcgaacgactgccgtcgcgaatagagcggccagccgttgatcacatcgccagcaaccggcagatcgagttcgaagaacgggccgacgctggagacactgatgccgatgtagccattcgcaactgaaccgcgagactggtaatgaccttggtcgagagagctagttgtcaaaacccactggtcctcgtcccacgtcactcccggaaacatggactggtaggtgttgttggagtgcctgaacttgtgaattccatcatggtttctcacacagttctcaacgcgcccatgattatttggaaggctcgcccctccgctagggagctgggccagcaaaggtagcaatgtaaagacagactgatggaatttgctattagcccaagcgatatcatggggcgtttgcgaagtctcaccttgaagcgcattttgaacgctttctgaacccacagagaggatcaagaaaggaaccttcagcgtgccgttggataatcgacgaaactacgagaattaataattttcgcacgttgcagccaagctcatggctgtgctaactgcatatccaagatgagcaggcagaaagatgatctctgagcgctgacggacgcccagaccccagacccccgcaaagcctggagaagccggtaatccgatgcgacatcacatactgactcactttcccgaaatgacgtttgactttttgattcttctggaccattctttggtagcggggaatctcagccacggaagatcaaggccggtccttgattggaagggaagttcaagggacagccacgcgggagtgccctgttcgtaaccagtccagctcccggccgccattgacgttgcagtaccagcggacggttgcttccggcgcaacttgacgcgtggtatactttccgacgtttgcgggtcctcaaaaagggacactgcgtttggtctgacgatgaacaagtggatgctcgtggaagagactattagagaacatcgtcccacaattagcccggtaattcagcgacgtccgaagtcggctcactcggtcgggaatgggacaaaacaccggggtctccaggatttgcccgacgaagggggagcagacgtgataatacgacataccattagtatattgtgaacccctcagctgtatatgtcacccagtgttccataattcgaacttctttttgagacagaagcttgtgtcacacgccgcaatcagaaagaccgtggctttgctgaatttgcgaaagaccactgcgacactggccgaatgccgaagcataaaaggcaaaaagggctagcacgaagaaatggggtgcaataaaacgcaaatacggtccgatgaatgggagacgacgggaagcgagaagatggaggtgccgagacgaagagttgccgttcacaatcacagcaaactggagatcggcgagacagaaattgcagcctcagggttcaggcagcagatctcacgcagtcgtccatgaccgcctagacgggaaccaccaacacttgttcctaacctcagtcctgaggaccaagcatgtatcgttgaacttattcaagtttagttgagtttatcatgactctcggttgtctaaccagatatacatcggcgtcctgagttgcggacgctatatctgtctgtcgccgtttcccagccttgctacggcaatctccgccattgtgctttgcgtctataccaatttcgaagacaatacctacggggttgatagagaatatccgtctgattgctatacgcatctagccccccggcatgcagacacccatcgagttactccacatacgcgagaaaaaggaatccttagcgttgcgacagtcaaacgcgttgtcgatgacgcaggagtggacaatgaaacacttggacgggattaggtttacgtgctggaattaaggggctcttgatcaggaagctgtcttggagaacggcgccccgactatgcggagatcagtgcgaagctgcaccagagttgcggaccaatgctgtgatggcgcagtggcgcagaaattccacgaaccacctggcataacagctctagtatttgaaaatggaaaggcatcgcttgagtttccccagtcgttacattgtcacgaggttcagtcccattgttggcatgatatgatttgcggagtaatgcatatcggcttcttctggctagtatagtatgatccgtgcacctcatgcagaccacccaatacgcctccatgcctccctccgcaatgcaatggccgtgtcccgtgttcgttccatggcagactggttttcaatcgaaaaacgcaggaggaagtgaagacactcttccagtgacccccacgcaagacacttgaacacacctggcag

SEQ ID NO: 4943 - DNA, 1437 bp, Emericella nidulans
aacacaggacaatgtcttactgatacccgccgcctagtactcttgaagaactgcgggccaacaaagtttccaacacagtacctcaacgaagatgaaggcgacaacggtcgatttcttcgtgaatccggcagtattgcttgcaaacaaggacatcattagagggaacgcgggggccacagctgtgacgagccaatatcccgcaaggcgaggaatcttcctgtcataggggagaagcttgaccataagaattccagccatggccatcaggaagattgcaaccatagcagccaacctggacttgcggatgtaagttgtgaaaagggcggcgagtatgactgttgtgagctggaaggcagcggctggcatgcccatgaggattgtctgaagttcatcgtagccgaagctgttgataataatggtattcaactatagtagccagctgagtcagttcgaagtatgtagaaggtggaggaaatgggaggcctacgctggtggtaccaccgtttggcacgcagattacaaaggagaagagcaagaaccaccatgtcttgacgtccttcatggtctcgataaattggcacttatcccactttttggtctgagtagtgcgctggaacttctttggccgcaaagatgcgaattctctttctgtggggttaaggaaacgcgccgacgaagggtcgtcggggaggaagaaccataaaaagacagaccacgcaactgtgatgagtccaaatatgagaaagagcatctacagtcgatattagaatgtttatccaggaataactagcaacagactgaccttccatttgctgaatccccctgtgtattttaggatgccgtacgcgatgcctgacccgataagactggcggtggcgttttcggcaaaccaaaaagagtgccgagagacatgttctttgggtgtataccacattccggtgattagtgaaaagccagggctgatagcactctcaaatataccaagcagtgctcgtagcaccatgagaccggcatagttctgggcacaggcgtggagagtgaggactacgccccaaagaaaactgggcatggtcaaccaagtagagcgccaatagacaggagacaacttacatgagagcgctgagataacgtcccagaggaaacctgacgaatccaagtgatatagggtacgaggcagctagatacccaatgtagaagataccagaagcccagctgaactcttgtccatggagattctagattgctattaacttggagcttcgtatcgagcgaggaggtcgtacaaggtcttcccgtaatccaagaatggcgctgtaggataaactggtttctgcaccgctagtgagccactttcgggaaatttgagggttctgaatcatactgtcaagatattgaagtccatagctgatatccccaggaggtatcagacaattttcg

SEQ ID NO: 4944 - DNA, 5142 bp, Emericella nidulans
cccgattgtcctgtaccgcctcatcaacgaaatcgggtcccctgggctgtccgtgtgatcggattcattgcgctgggaacgttgctgatccctatatcgcttatgaacgtccgcgtcaagccgccaagggtccgcgcactggtcgatgtcaccgcattcacggatgtcagctatatggcattcgtgttcagctcgctggtcgcctacatgggtctcttcgtcatcctgttctacctatcgttctactccgaagcgaaccagatcaccgatcaatcgctcgccttctatctcgtccccatcttcaacggggcctccgtctttggccggacgatccccaacaaattcgccgacaagactggcccgttcaacctgctcgtcccagccgccttgatttcaggtttgttgatgctgtgtatgatggccgtgcattccaagggcgcggttatcgttatggcgctattgtcaggttttatgagcggtgcgctgattggccttccacccgtatgtctggcaatgctgacgggggacaaatcgcgactggggacgcgcatcggaatgggatatgcgatcatcgcgctaggtgtcctgatcagcgggcccagtagcggcgcgatcctgaggaatgggacctcgctcgattggcatgctctgtggacgttcggaggggtaccgacctgtgtgtcggcttttatgtatgcggcgattcggatggctaagtatgggccgggccttatggtgaaggcgtgatttgcattctattagtaatttcacgaagaacaagaggcgaattatcactgtaaattaactgacagctggtgatttctccttgctaatgatctacatccagcaccacctacgactggtcatatcaagtcgtataacaacccttgtattcggtttatctagaattctttcaaaactttttggatgctataactgtacattcacaccagctagaagaacaagactttcgatatatttgttcatgtagcccgtgacataagggatcactattgtactttgatagtcttcagcgcctgaattagggcaaaacgcgaaataactaaccacatcagcagactcgttacattcacactgttggatacattacgacatcaatgttggtgacccaggcaggatgaaagaattatggtgtcaatcaagtgttcaactgggcttcgatcccattacgaactgggggggtggaccgtttcatctctacgaataatatatatatgtccatgccctgcactctgcgcacttgcctcattcgactatcgcaatgaaacggttctagaggttacttgatgaaaagagaaactaggagtatttcgaaactagtcatctaataatacgtacacagcaaacgctcgtaaagaccactattaatattgctgaaattctacggcggggtgcagcaaacagaggcaccttacatctccagatatcctagctagatccggcatctcacagtaacttgtccaaacgaaaccactagactcctcgctgaagataatgtccaaaaggtcacattaagcagtcctgacaccgcacttgaatggctgaactagagcacgctccatatcccacacccctgcctccacaaacggattcttcgcgatgatatcccgcacttccagctctgtaccggctcgcagcatcaagacactgcctgtgatttcgagcgggtcgtcggggttctttggatgccgtgagagggtcggacccgcgaagacgacggtcctgtccaagacgtagggtttaaggtgcgagaggtgcgcctcacgggtttcggcccacgcttccatgtcgtctgcattgatgggaatctggacgagccagtcgtatatttgggacattatgaatcttataccgttttctttttccgtttgtgggttcctgggtatgcgagaatcgtgcagtaggttgggaatgtgattttgcttgtagcgcatggtcgtccgacaactgctttcttttatgctgctgtccttgttcactccgtatggttatccattcatgcaggaataaagtgcattgatcagagaacaaatccaatcattactgtatatcgttgggtggggttacatttgactagataagcatggcgtaggatccggagttaccttttgatgcctctgacaatttctccgagtcaacgttcagacacaaacttccagccacgtggatatcagatagcatttattgctataatatttcattacaatgattcgaagagatccacaattaccggactaactttctcaacctgcttctgtagccagatacgtcagtcgtggtataagcaacggataatagttctgggatggaaacaacccgccattcgttcgaaatgagtgttgcactttggtgatgaccattaataagtcaagaaaaagctcctgctctttctagattatacgtgacctagcgtggtattcaagcgtggtattcaatggcttagtgatccttctgttgtccaaacccaaactcactgcgagactatatccctccacacaatgggcagcatcaatgagacgcagactacctctatcccaaccgtggacatcggcccattcttggacggccaggccgcgcaggaagcgaaagacgccgttgttgcggccatgcgccatgcctgctccactttcggcttcttctacctcgtcggccatggaatccccgaggaagaccgcctgcagattctaaaatgtaccaaacggtatttcgatctccccatggaggagaaaatggagacttggattgggaaggccatcggccggtctttccgtgggtatgaaccgccagctctccaggtgcatcaggagggcctcctccccgatacgaaggaggtaggtgctcgtcgacctggtaatcagaacgggatactgatcgtaaaagggatttattctcggtcgcgagacgcctgcagatgcgccggaggctggcacattccacactggacctaaccagtggcccaagaccctgccggacgaagagttccgagttcccataatgagataccatgcaaagatgatcgaaatggtcaaagtgattctcaaaatactggccctcgggcttccggcagaatggaattgtccatcggatgtgtttgatgagctgaccattaatccatcggcgccactgcgtctgctgtactatgctccccagcctgtcaaacatgagaaccaatttggcggtatggcttcaattaatttctttacacccgctgtatgctgtgaaaactgatcagagatccagtgggtgcccatactgactttggcaatgtctcggtgcttctccaggaagaagactcagaggggctggaagtcttctatccgccaactcaaacctgggttcccgtcccagccaaaccacattcctatgtgatcaacatgggggatatgatgcagaaatggaccgcaggatactacagaagcgcgctccacagggtcgtcaatagcaatacaaaacctcggtacagcgcgccgttcttcatgaatgggaatctggatgtcaagtgctatgccctggacggatctggagaagtaactaccattggagaacatattcgcaagcggctgatggagactatcggcggcgaagaggggaagaaactgggtctctgaagggaatggaataggtccttaagactacgagttgggatctaacctaggataaggcttgcactagaacgtagtttgaccctcctcggcctaaaagaggatttctagagcaagggatcgttatctctcgcatttttcgttgttaaacggaactagtctgtttctaatgtacttttctctagtcctggtaggcatcattctagtactgtaggtgtaaaaggggacaaaccgtggtgaagattgtaagctgcgcccatccactcataattacaagtcgagcaaatgagacgattgttgccttataattcggtccacgtctgaatcccggtactcattctcaagctttaaaacggggtgcgccatcaaatataaaatatattgcgagaaccgaaaggaacaccgaagactatgacagtctatgaagtaaacagatgagcatattaccagcgttatcgtaccacacaagctacaaaatggatggtgttcaacaggctacagatcaccatggctggataggtgaaccatattctcgcaccacattcccaacgtcggcgtctctctcaccctcaactaccctccggatagtattgcctccgatacttggatcctgcgcaccaagcttcttcaagagctcagtgctgccacctagagaggtcgccaataagccgggagcgactgcccacactttcacgccatccttcttcaatgcctttgtccattctaccatcaacatgttaaggcctacctttgcggaccggtacccaacaaacggcagttgcttgggaagccccgcggccgggatgacatttttcggatcagtcgtgtctgatgcagcttgcagtgaggacagcccactggtgatgaagagcaagcggggatcttgagaattaagcagcaatgggagaaatgtggtagtcatgatatgggctccagtcacattgacgtcccaggatttgttccatgcctggcgggttgccatatctttgtcaatgtacgcatcgaaacaagcgcctgtcttcagtcagttaatttgtagagaagtatcgatccgggagcacacaccggcgttatttatcaggcagtctattcggttgtacttggacgcgatatgcttgaacgcggcctcgattgactcatcgctctcgacatctacctggaacggctccagtacgtgatgggcggattcggaaaaaagttgcttggaagccgcctgggctttctctagattgcgcccgcctaggaagatataatatcgctgattcgagcgcagcagcgacttcacggtctcgaagccgatgcccgtgttggcgcctgtgacggtcaggtctcgctatggctctcatggagagggctcgatacttaccggtgatgacaacaatctttgtcaagtccatattaatttaggtgacttatgtggtagtcaatatgtgatttgaactctgtcggtgtgaaatatatggcccccaaacccacaggggattagatgcttacgccgcggcacttcgcgcagggctta

SEQ ID NO: 4945 - DNA, 9540 bp, Emericella nidulans
ctatgtccctgacgagcactagtctgaagccggcgcaatttttggcaagctgaccaaggccttgtcgtacgaaatgggaacacccgttaggtccgccatcaatcgatcatatcaagaaacgatgaataagcttcttgtgctggcattgttagccacgcttccgctggttccattgagtcttcgtatgtcgaactataagctggataaggtcagttctagtgttgagatggagcgacgcgcctaaagtacctgatttagatgagcgaatcctctgatcatgatgatgcttcaccaagacatggattggggccaggagaaagagcaaaacggccataggccgtgatgcgctccccggcttgccctttgaggccttgcgacggcggtatttgatgatccgctgaatacaattcttcggcatgataacgaatctatagtctcatgattcagtttgtgacttctcgaatatatttgctgtggcgaaacgcatcacagtaggaagcagcttatcagcttcggccaggaccgaggtgtgaaagcatgcacatacattttttgattatcagcgagtgttgacccgcattatgccatgaaaagcatttatcggcgtactggttcctttactttcatgatcttcaatcatcaccaattacgacaggcctgtctttttatgtgaccatctctatctacacagtatacatagaagaatttcccaatagagcaatacagcgtgggatgtgggttattatccttttattgtttctgatctaaagtgaggctttgatagagccattgtgctatgctgatgacctgtgtccggttaagaggtggaagccggccatatcagaccgtaccgtaaccatactccccagtaagcggagtgagagtataagacatggcggttgtgctgccagggtgctgtggccatgaatcgatgtaaagggtcccaaaaaaagagagagtattctaggctatggtcaataataggaagtgtctgttgatactgtatcatggctgccccctcggcgcatagacgagcgattgacagggtcctccagacacttcgaattttcgcaaccgctcgggctaaatactattggaagaaagcgagcgcaataattacgattggaggaacgacaggggaatatcagaccttttcgctgtaagcatttgcggtcttactagtactgggtttgaacgaggtgctgctttgttcgggccctcaaacatctctagctttcaactcctccttttccccttctgcctcgtcctcccgtcagtatcctctcctttttataccaactctttcttgtaggatcaaaaggtccttgatttcacttttaaccttaacttaagccttggaaccccgttctgggatcatcttttcgttcttcgtcccgcggctttccgtcctaccactatttgctactagcctacccctccttgtcagaaagtcatcgatctctttgagattgtcaggcagccgggatccaacccttcggctaccatcagtatcaggcaacagagggaatcctgggagttccgcttcaaagcaggtatccagttggtccggccccgggtgagttgtcaaagtcgtggcagcagattatcgtccgcattgctttttccgcgtgaaggttatcacatagatcttaatttcaatcgagccgttgcccagaacttgtgaggattgactggctgcaatacttctgttggccagtcttttgtctactccctgatcttcaccaattttcggatttctggaaggtgcaagattctgggcaaatctgcaccctatgaaagaaatccaggctactcgggatggtttaattacgattgtgataacaaacggatgaacaaaaaaagcccggccagagactaggctaaccgtgcgttccagcagctttcaactggcaataatcatcttctccgcctcgaccctcccacattggctggccctccgttctttcaccaccgacagcatcacaccgcaccccaaccaacattcgtcaaacctagcgactctttctcattgatatccttctagtttcctattgaagttctcagcttccaatcttctctccgttcctgacccgtctcgcttttccagtcactgcgctcgatctttccccctctcattcaccgctcctgtcccctatcctgcctgtctcgggtctagacagtcgtcaacggtctctccatcctttccaccagagcatcagattcggtcgggttttgaaaatggtcgtagcaactatcaagtccgtcctgccactctttgtccatagctctcgctatatctggttcacatttccggagccgttcccaattctccaccccttttcaaggcgtatcgaccgccctctatacttatcaataagttgttaacttcgcgcttttcctccgcaggtgtgttgtggtcggtgatggtgctgtcgggaagacctgtctcctgatctcatacacaacgaacaaattcccttcagaatatgtgcccaccgtgttcgataactatgctgtgactgtcatgtaagtggatttttgtgttttcgccgtgacaccccggttcgattttcgcaggcttcctgcttctactcgctctgcgatgcgtaaagaatattcctcgcccggtttttttgtccgaacgtcgggtctaatactaccgatacttctttcaactttactgatcgcggttttatggaacaggatcggcgatgagccctacactctaggattatttgatactgctggtcaagaagattatgaccgacttcgtcctctctcatacccgcagacagatgtattccttgtctgcttttctgtgacctcccccgcatctttcgagaacgtgcgcgaaaagtggttccccgaagttcaccaccactgccccggcgtcccatgcctgattgttgggacacaagtcgatctccgggatgaccccgccgttcgcgacaagctggctcggcaaaagatgcaaccgattcgcaaagaagacggtgaccgcatggccaaggatctgggcgccgtgaaatatgtcgaatgctccgcattgacccaatacaagctcaaggatgtctttgacgaggtgggtttgtcctaagtttcgctcagggctcgtgattgactaaaaccgtctcaggctattgttgcggcactcgaaccggcccctaagaagaggtcgaggtgcgttctgctatagatgaactccacacattatggagcgggccagcccctgttatagtaaaatcggtcccttgttaacaaccctggtggctttcgcatgtgtcgcttgatttcaggacgactgggagggggttgagaagcttggttcggagcatacagtggcttgcgattatacgaacactttccgctcttcaggttggtcagtccttacacagagttctcgttgctatctgtggatggggttctgcataatggttatgtagggttagccgttcgctgcctgccatttacggcccattatccattatccatacttctctgagcgctgcgttgaaaacattgtgcaaacaagcagcctctctcccaccagctggttacttggcccccaccatattccgttctacacctattgcgcctattgttcccatgatatctagcctcatcagttatcaccccgattccccagcgcaatccttccgttcaatgtggccttcattcccagtctcttctcactccttttataacagctctcatcgtctgaacttggcgttggaagtcgaggcgtcctgttttggttggctctggttcgatatgttctttttatgcgctctcaattgtcaagttgctctcatgccctacccatttattgtgccattttagcgtcctcgtttcgctgagtcgtggactacatagcacagatatatccaatatgaagatatattcttgattcatttctagaacagtgagtgtatctttttagtgcagcttcagtgtcgaatactgagtttgtaggggactaaggcgctcattcaggtatgtacaatgtgactgtttcattatctcatctacatgtttcatatctcatttaaagttcgtccttgagcacggactcaggctccggcacttcggcttcaacttcagcttcagcatcaaccactggaacagactcctgggtaacgctttccttacgtccataccacccacccaagtccttacccgcaccgttcttgaccatgctagtgatgatctcatacgccacctgcgcagcggcgagggcagtcgtctcacccttgttatcatagcttggagatacttcgacgatatccgcgccaactatgttcaacttctcaatcccccgcagaatgcggatgaactcacgggttgtccagccaccgggctcgggtgtcccagtgcctggcgcagtagaagggtcaagtacgtcaatgtccacagagagataaacaggctggtccaaatcgaggccaatacgctccataattttgttgacgacacccatgggtccaccaagctcatcgatatcgtcagcgtgaatacgcatgaacccttgctccggcgttccgggggccgtgtaatcgctgtcatcgataccggtaagtcttgtccgcagacccgcatgtgcagaggtcgagttgcaaattagcccctcacgactcgccttgtggaaaaagctgccatggttgaatgccgactgctccgactgccagtacgccgagtatcgcactgggttccaggtgtccaggtgcgcgtcgaagtgcaggacagtaataggcttctgataaatctgatacaacgctcgaagggcagggagcgcaacgctatggtcgcctcccagcgtgacgagcttgctcttgcccgcggagatgcccttgctgccatactcagatgaggcgggcgtgacggggctgcgggtgccgagttccagaaaggcctcgtacatttggcgctcagcgagcccgttgtcgaatggggtaatggggatgtcgccgcagtctttgatcgtcgcccatgagctgtatgggtttatccctgcgcgggtgttgtaggatgtcccagccatttggcgggcgctggcggcgcggattgcgcgcggaccaaagcgagctcctgctgcgcattagtatagaaacgtagctagttatatattggagagttgatttacctgggcggtagctgaccgcggtgtcgaaaggcgcaccgatgatggcaatgtcgtacttctcatccggctcgaccagacatttgacgggcttcaagtgcgcaaagctggcatgtccggagaaagaccactacatttgctagttagtctatagaattccactgatactgactgaattctcacctcttgattccatttcttcagtagctcctctcgcacctcttgaggaacagactcttcgtcatgatgagagcagcacagcgccgttccagccaacgcccacaatccagcccaggtcagcttcatggtgaaaccagaacacgagaagaaataaccatgtaaagtaagggctctagcgagcaaacaagagtaaaagaagacggaaaggaccttaatatatggaaaggcagtggagttacttcggagtagagctgtatgtttggtaaccgtacggtcagattggtaatgcaatctcttatcgataatagtgctggtgccgattggctgcatgacaatggtcttctcgttgcgtcgtccagagttgcctcttcgggttgcttttgatctcaagttttgccgcggtatcacccagctaagaggttcgcatcgaggcatcgacctctaaactattatcctgcgcgtttatttttggaggctgaattcgggtgctgtcctttcacctagctaacatagttccaaactacatctacaccagccgtgcatggagcagaaaagatgcgatgcggcgagttgtagtaacaggtctcggtgcggtgacacccctcggcgtaggtgagttatactatttcctttgatgccctgctgttgtctgccccatcatcgcccctccaaaataagaccagaaacaccaaaagcatctcgcggcccaggacggtgaaagcgatgattctgcagctttctcctagcatctgcaatgtctccactttccgaaaaggaaggtcaattacaggcgccgacgcttccaaacaaggtagctagagacgatacagcgctgtacagagcaccctattctaagatttcttgggggttctccgcacctagctggctacatgttcttgtcgtcgttcattggttctttgctcggcttttctccttgggcagtggccaatactgaactactacttatactacaggggttcgtcgaacttggaagcggctgcttgatggccattgtgggatcgttaacattagacatcgggatgctcgatatgcagacttgccctgtgagattgccgcggttgttccgagcggtgctcgcgcggaggggagatggacggcatccgaatggttgagtaaagatgtatgtctcacgccaggtcaatattgggtatggtgtgagaagctgattaaatggtgacaggatgagcgcaagatggcacgattcgcccagtatgcaatggctgctgcggaagaggccctggaggatgcagagtggaagccaaaggctgaagatcagttagaagcaacaggagtctgtctgggatctggaattggcaattttgatgagatttatgatgcagtggtagcgtacgacacaaaaggctacaaaaaactgtctcctttgttcgtaccgaagttgttgatcaatcttggggctgggcatatatccatgaagtatggctttatgggccctaaccattcagcaactaccgcttgtacgacgggtgcccattctattggcgatgctgctcgttttattgcttgcggagatgcggatgtcatgcttgccggcggggcggagtcttgtattcacccacttgctattggaggcttcgcaagggcacgaagtctagcaacggcgtacaatgaccgtcctgagaagtcttcgcggccgtttgatgctgaccgtgatggcttcgtggtcggcgagggtgctgggatagtgattttagaggtgactcacccggagctagcacaaaaccttggtactgaccctactttttaggaactagagcatgctaaggcacgaggtgctcgtatatatgctgaggtgaaaggctacggttgttcaggagacgcccaccatatgacagcccccaaggcgaacggtggaggcgctctgctagcaatgaaaaaagccctaaagaacgcttgtctcgagccctcagctgtcgactatattaacgcccatgcaacttcgactgtcatcggcgacgctgctgaaaatgccgcaatcaaggctctcctccttggccccgggggtaaacagaaagcggctgatgtgaatgtcagcagtaccaagggagccataggacatctactaggaggagcgggagccgtcgaggctctatttactgtccttgctattcatgaggttggtcttacgttttgattttgtggtaccgctaattgccttctagaatgttatgccacctaccattaacctggatcgtctgaatgacggtttcgactttaattacgcgcccaatgaggctcaggagcgccgtattgatctagcgttgacgaatagcttcggatttggggggacgaatagcagtctttgcttctcgaagcacgggctataggtcgttcgggtgcgtctggcttgtacgatagtaatagattgtataggaaagcaatatgtactgtaatgcctgtgcttttgacgttgacaatggtcaggatacatcttgaaactcgtggtgtatccttccaatcctagcgcttctttgccctctgaaaatgtctgctcggttgacaatgtggacttgtctgtaccgggtcactcttagcttacaatttgttcccgaataaaactcactaatttctaaacataagagcacgaatgataagtcgaagaaatcgaaatgaaatctgatagttccccaatcctctatcaaaattccagctctaccgtcttcctagtcgacattcctgcgtccattgcacgagcgcaggacctcttaccacagccacatcccgacatttctgatggaactagatcaacccctactgcatatctacatagaaataaacacaaaagtcgacatcttctatctacacttccattgaaacaaccatacgctgtcccaaacgagccaaaatcgaaatctgcgcaggcaaagattctcgcgcggatcccgcaatcggaaagtgaattccacgaagcaatccgcccggtagtattggatgccctaagtgaaatccgacaaaattattcacaaggctcagactggtgtcttcctaggcatctccttggaggggcgaatggcttcaatccaggggcgaatccaaagcaaaatgaggacgtgcgcttcaaacagctagacaagactcaagaggggaataatacgagagaaaatcggaaactgcctaagagaggttataatcatgcgttcaacagagaggagcaaaatcatgagtccttggctatacaagtactcccgcgcctgcgaggttctgggtttacggcagatacatatgacactgtccagattcagcaccagccgcctctgattctgtcaccaggcaagaatcggttcgaatatggagatgagttatgcaacaagctggtgaagaacacatcttccgatgcggcaatcattgaactacggagtctgtctacagtcaagtcgggcgaatggctaagtccggatgctgaacatattcagaaccaaggtcaggtgtacctaattccccctctatcgcgattcattctgcgcgatttgccgatatcaaaagagctggattatacgaactcttccccaattcccggcctcgacccggaacaaaagttcaatctcattgtccttgatccaccatgggcgaacagatctgtccggcgcacgggctactatcagacgcagacttaccatgataatgaattgcttatgggctatatatcatctgtacttgctgtgcattcttattcgcatccttatctgcctcctcagattgatgacacagcagacttgagacagtacagatcccagtccggctccaacctttccaccgccgcaatctggatcacaaactctgccaaatcacgggcgatactcacagtgcccttaacgagtcaggattttctgtctgtgaagaatggatttggatcaagaccaccgtccaagggaagcctgttacaccgattgagggactctggcgtaacggtacgaggtcctcgttattgggaaaagggagccagaacccgccaccacttgcatcaggagtactggtgctaaggctgttttgagaagggtcattgctgctgttccggatgttcattctcggaagccaaatttgaaggcaatttttgagaaaattttctttacagccagctctgagtctgcagacatcggacttgacactgtcaccggcatttctgaccaaatcataagatatacggcgctggaggtgtttgcgagaaatctgacagctggctggtg

SEQ ID NO: 4946 - DNA, 5637 bp, Emericella nidulans
tctccggtaaaggaccagacaagtgcgagaagaagcttcttcgagatgtacgactcgatctgctcatactcaagcgggaagtcaacatgctggatattgtattcaagaatattccgacaagctttgttcagaagactgaacaaagtgttaagggcacggatttcagtaaactccatgatatgattgtacttcttggcttccccaagcgatttgtgaacaagctcatctgtctgcaagagttgagagagaatagttgacagcatatcttggcagtcctgggtcttgacagcactctgaccagaaggcacactgtcgtcatccaagtcttcgaaagtcttagtcttaagtgactcgacatagttcgtaatgatcatcgaaggcgtcacggtatcttcgttgaaccagaccataccgcaacgactaacagtagccaaggtggcatatttgagactttcgacttcgaacatgatgcggacatttggaggcaagttcagacgttctccgttcggaagtgtcagtagtttgttgtcgtcgagcacactgttcaagttctcaacccattcagggtcgacgtcgccgtcaaaaacgatccagtggcgttttgtgtcttcaccgcggaggttgtccacgatctttcttaaaataccggtaaacagaccgtctgtccactcccgcgtggtgctatcgaggctaccgtagagggcctcctttgacatgaccttagagtcaatgatatgagagactccttccactccttcgatccgctggagggcttgaagcagaatcttccacgccgacgatttgcctgaacccgacttgccgaccatcatgacgccatggtgtatgctttgaatttggtaaagctggagaatcttggtgatccacatctcgctgtcgacaaagtgctgctcacgtgcaatctcccgaatagcagcagtaagcgcctcatagttggctggcacatattctactccagcaaagtcttgctcctggatctgcagcatcgtcgccacgtcttcccgaactaattttggagcgatagtctcacgaagactctggacaatgatctggggctcaacaatttcatctgggccaaggtcgccatcggagttggcgatacgggcacgcttaagacctcccgagctgaccagaacactttttagggcacgaagaccaaaatcgtagtgagcttgcttagaaagtcgcgtggagcaatgatcgaagaatggtacggtctgctgtgagaggcgctttgcttgtttgaagccctgggagaacaacatgacttcggcaataagctctttgtcgggcttcgacatggcgacgcttcggaagagcttcttcaagttgtcgggcaggttggatctaccagcatagccagggttcatggtaatgaagataccagtgttcatgttcacagtcaagcgcctgccaaccagatcaatctgagacttttcatcagtctccttgtttctgagaccaatctggatattctggatttgttgcgagacagccgaaaggatacgttcctcaagacggttgaactcatcgaaacaaccccatgcaccaacctggcaaatacccaggaagatacgacccatagcttggaaatcgaaggtgtcgtcacaacagaagacgagagtgaaacgaccgagttgcagacccagggccttgacggactctgtctttccggtacctgcaggaccgtaaggagagcctccaagtctttggcataaggcttgagtaagcgtaaggaaacagcgatccgtaagaggcgtgcgaacgaggcgttcaggaacaccgaggtactcgaatccgtaattcagcttggcgtttgccatgtgcacgtacaggcgctgcaggaagtcgccctcagcctggtagacataacgcatttgaagaagccagagatagtctgttgcgcttgtggcattcgacgctataagcttagaaatggtatcacgttgatgaacgaactccgtaatgaggtgctcgcatttctttctgctgatggggtccagatctccaagaacggttactgcaaggagttcaagtatcctgacttgagcatcatagagtgtagggagggtagtgccgctgttctccagggacttctgcacctcattagtccaaaccacttgactagccaaaacaacaatctgagcagggtagttggcaataaaatcgtcaaatgcggtgcggtcaacctcagcagagttataaataggctcgaattgctcaattgcctcagccaggagctcagcgagggttaacttcatgttgctctcaagggcagtcagccagtcgttgattctaggcgtcttgaccaagttaacctctttcttcagccttacttcttcgccctctttcgaggtgaacccgacaatgttgttgtcgtcgtccatcagcacgcctgatagaccagcaaacattttcttgaaatgcttcgcgactcggaagatgtcgttactgtttccgatgatctcaaggaggtcctcatcaccaacaaagtagaaacgagggaaggaaactctctcgcgttccaagtattcaccgagagctttctggatcttgttaagcagctcggccagccgttctaaagacttctggacgccattaatggcgagaacgtcgaggacaaacggcgatttgtagaccttcttcatcacagcgaagaattctgagttgatattctggaagcggctcgattccaggggaagaaggtgcttgatgtcagcattgcctgtgaagacaccttcaaggtaaacccactggcgctgaacatcaatccaaacatcgaacaagacgtggactcggttcagtttgtcttcccaggatgaggcgtcctcctcaaattctttgtagtaaggtgaatgcctcatggcctgcagggaattcaggttctcactgcacttggcaaagaggtcgtcaaagccccgaatcaaccgacatttgttctggtaattaacaaggtcaagcgagtagttttgccaggtctcgcgtacggacttcaagaactcctcaagggccatttcaccttgggcctgcgcaatgatattacgaattacggtctcgctagccgcaagttgaaggtcccatacatcacccagagttaaagagacgagcgagaacctcattcccggtttaagggctttgtagatcttgagccagtgtcgctcgcgcaccgcttcggatttcatgtcagagagcagcgggttgaccttcaagagctgcttgaggacgttctggatatgttcgaacgcagcgtattggcgcatacgactgggcatctctttggtcatcttgatgagaccgtcaatagactgacgaagttttcttggctggatgctcgtccagagcgtgtctctcaggtcattaaggctcctccagatagtggaaagtgccgcccaaacggacatgaaatcctggacctcctccagaattgcgggcagagaagattcggcacttggaggaagatcaagagcctctttagcctttgaaaccatttcgaactcagactgtagagattcaaggcgggtctggaacatgctaagagagcgggatgcctcctctggtggaattgtaccagacacaggcttttcttcattccactgcgcaatagcctcagtgatcttgtcgttaataaccttgtcctcagccgcgatcttggctcgtaacgcttcggtctgctcctcaacaatcttgccctttcggccaagtagttcattaagagcggcccattcaccatcgacgttctcaacatgaagccaatcactagggaactggtaccgttgacgcacaagagtagcctgaccttggcggaaaagatccacttcaggctcccataccttggccttgcgcttgcattgttgcacactggtaatgaaggcgactgcatgagcagtagaagcagagtccaaagatttcccttccagtcgtgtcgggcggtagcaatctcggaatgtacttcgcgcatgcggtttccgagtttagagccgaacttaagcagtatctcgtgctgccactggtcgtatttcgcattgactctcgtctgaacttgctcgtagtcgatcttaatgttaccaaacgaccggctgacttcagatgtgtcaaaagtggctcggctcttgcggatttcctggagaagctgaagccattgggacagatcatcgcccaggatgtcatagacttgctcagactgcaagtcccataaagactggaattgcagccatttatcgacgtactccgaaacttccttgagtctagtttcaatagcactgtagaccaagataagctcatttgtgcagtgctgagggagatccgcaaagcatgactctgacagctgaaccttttgtacttcaatggaaatctgataacgcgatgacttgatcttctccaggttgcagatgatacctagccagttatcaaagtgcgagaaccaagttgcgcgagcatactggagaggtggatcgagatgaaggacctggttacgcatagaaatctcgtgagtcaggcctgggaactcaatgttgtacgctgtggtgtctgtatcgccatttccattgaccttctgcataggctgaccactttgtgattcttggaatgagttcatccactcgcggatagccttgtgcagacgttcgctaagaattccctcaattttctggttcaggttgtgcacccaaaatccgaggttgacgtaattttcgagatttagtttgtccacggcggcctggattgcatctaagcgctgcttgaatgcggagaactcgtatgggcaagtcttgagttcgtggatcgctttttgaatggtatcgttgatggaagccagaactgcggtcttatgttgtagaacggcagcggaggcggcgaactctcgcacaaattgaacgtgtttactttcaccccggctcggaatcactgagtcaagagcaccgtttacgagagccgcttgcttcacatgtagttcgtacgagtggacgaaggactcccatcgaagagggatgcccctcacaatcatgctctgggcgtcattcatgtatccattgagtaagattgcaacgtcagtcatggacagaatagagcggttagtttgaagcagcgtccgaacactttccatcaagctgatagcgtagggatacactcgcttggcctccttcgagatgttgctaacggcatggggaacttgaaagttgagccagatgagattccgaatctccttgaagagggcgataatttgagcatcaaaattcacggcgagttccaaggtgttgcctgcggcgcggttacggataatattgaacagtcgtccggaaatggtgatgcggcgcctttgaacatcatgtagccacgtctcgaacacaggccgcgtatccaacttcttcctgaaaagattgctctccgcttggagcttctggccttcagtatgtaggtgccaatcctctccaaggacgtcttcaactttccgcatgtatccgtctagttgacgctcaatctgacgtgcccaaacaatggctccagacacgggagggaggtcgcgcagttgagccatcgcgtgtgcctcggaatgaccatactgctgcttgaaccgctcatgcaacgcagaaatatcctgttttcgttgtcaataggtagttg

SEQ ID NO: 4947 - DNA, 1907 bp, Emericella nidulans
  unsure (1)..(1907): unsure at all n locations
gccgtcgccgagagtgccgagggagattagttttactggtacctactcctcttcttgcctggtgtgctgctttgtatgggttgcggatggctaacctacggtcctgctatttagcacactggctcgcagtcgaaggcgtacaaccgtctataccgcaaaacccgacggccgcagattcgcgtaatcttgaactaatgtccaagggcccgaacgccaacgctacgctggcggctatgagcgggaatggaaacgtcgcggttaagccgctggtcaagcatgtcctgtctaaggagctacagctctactttgagaaagtctgcaatgcattcctggacgagtcgagcgagaagtatcggacatcggggtatgcgagcttgcgcgaagatccaggtttgcaccagcttgtcccctatttcgtccaatttatatcggaaaaggtcacgcatggcttgaagganttttttgttttgacgcaggtcatgcatatggctgaggcattggtacaaaataagtctctttatgtggatcctatgtatgacttctcctcaacttatatttctcagttatactgacgaacagcagatcgcctcactggtccctcccatcctcacctgcttaattggccgtcagcttggtggcaccgccgacctttccgaacaattcgccctccgcgatctcgctgctgccctccttggcctcattgcaaccaaatactctcattcctcacacactctcaaaccccgtctcgcccgctcctgcctgaaaaccctcctcgacccctccaagcccttcggcgctcactacggcgccatcatcggcctccacgccgtcggtggatctgaagccgtccgcgtcctcataatacctaatctacctatttatgggaatctactgaaggatggtcttgctgatgatagtgcacgacgccctgaggcggaaaaggtcctgggcttgctgctgggtattctgacagctctgaaagaggaaaagcctgtgctgacgaatgggcatgggcctgggatggttagtgaggatattaagaggaggctagagggcaaattgggcgcgttcgtggcggagaaggtcgcggagttgggggacgcgagagttgcgcatgctattttgggatagtagactttctatctaggtctacagagcgaaacaacctttttattggggcgattttgcggagggcgggtcagttaggctgtgattataatgaccatcacctactataccaacaatactaatgatttcacgagtcttagcgacctccgaaatccaactggaggcctgtgaactggttgatacttctaaggctctccagaacgctcctacggatcttgcttggaagtaaaagctttacggctttgttgcaatagccgggaaggctttgtaggattactcactagccagctctgctcagtgaggaattatctctttcatttcattatagtatatgacatgctatgcaatcgggccaacagcgggattactttacggctgtgcttagtcattgtttgccacgttcgctggatgttatatacttcttgctcaacaagatatgttatagaagtataccgtgcttatctgccctgtacgcattgcaacggcagccctaccacataatgcgaatggagggcaggccatacctgtctgtacgccagcctgttcccatatgtccttgtaaaagtattcaagtgcattttggattggtcctcagacccgcgcatgactcccgccgtcctattgtatcttgggttcgccaagctgatcagcatagcaagtatgatattgtacacataactatgcgggagtcttggcttttacgcagcgcctaaatggcgcagtgtggttgtgagatattcaatctgatcttcttaggattcaattatccaaggataagc

SEQ ID NO: 4948 - DNA, 5006 bp, Emericella nidulans
  unsure (1)..(5006): unsure at all n locations
aaaaacttatgaatacccccggggcagctcgtagcgaagattgtcgcatatgtcgaggcgtctctttggtcggagcgagcatcgttaaaggggccattttgaagcggtcggggtctccagacggccatctggtactgtttatcggcttcaaagttgacaaatttatgcagcagatacttcaagctcttcttcgggtagttgagagcacaggctgcatgatacgtgtcgaacatcccaacaacatagagcccaaggtcgcgttgcagccagataatatccatgctcgatccgtggaagagtttcagtatgttagggtctgcaaacacctcgttcagcatttgcagctcctccctccatggcttgagcgtatccaccacccagtccttctcgcgggtactgatctgcatcagcgatacaagaccgtgataagaatgtacatcatgatgttccaaatcaatcgcgatctcgcgcgcagatttcagttccgccagcatctctttcacaccgtccaaagtatccacgaaagtcgcagctgtcgtctcaaagggcagatagtcaatcgggggcgatacggtatagacggagcttgggtactttgcagcacggatctccgtctcgtacggattacgagaaccgtgaggcgcgtcaattgaaggtgtcagcgactgctccaacggctctatagcatgcggtttcgtcttcagcagaggtctgaaaggcgacgtatccgtaggatcgacttgatgttcaaattggagctgaggcttagggatttttgacgggccatagtcgtagattgtcgggaaattctgcgccctcctcatattcgaagccgcagcacccctcgcctctgcatccttatcctgcgacggactcaatttcttgataacgcctgtgaattcatccaaacacgcgtccgctttttctaaaagcgcatctatcacatccacaatgcccctccaattgtcctcaatcgaatcctcgtccgagagtaccggcgcggaaatatcggtgccagcagtagctgcctttagaagcgacgatgtcagcgacaacaatcggccgctttcctcgtctagcccctcagagacatttgcgcttgaagttcggtggaagttgagatcgttcacggccagcgctccgaccgtacgggtaacatccatgagggacgtttgcacccgttcttggaacggtgcaaacccagtggaaggatccatattgatggatcctgctgaataccggtttctcgaataaagtccgagaaaccaagctctggtgagagttaagttttgtcaaagaaaaggtaagcggagttgagaaatttctctgcaatagcttaccgcccttcttttgaagcggatctccgtaactgccacaagattctgctggcctttgctaaaactcactgacgttcgttcctcttaactagctttcaatatcgcctttacttgccatttagcatttttattctattcaagccaatatggcagcttctatagcgcccgagtgcaacgatcttaaagagtgtgcagttacagtcgcccacattatgaaagacaaagctaactcgtgatctgcccaggaaatatgacacttgctttctgaagtggtacagcgagagtatgctccattcctcctaatatcactattagaagcccaaattaagacctacagagtacctccgtggcaacacaggctctactgaatgcgaagaactcttcgccaagtacaagtcctgtttgactgtatgtttgccacccaacctggattttgcgcagtggtcttggagaaacaaaactatgaaactgacttattatcatacacagaaaacgctcaaggaacgaggcattgatacaatgctagaagaagcgcggaagaacacaccggagacagacgctgagtacaatcggcggtcatgacaccaaccgcgagcctcgccaaaatgccggcgagtctaacaatgtagctggtattccaagccggccttgaaccatcttgagcttcttgtgtcctgctctatgcctcctatcactcgattttcactccgctcactaaacaagacattgacggacctctttcacccacttgtatacctatttttacgactgtgtacgatatatatttgcatctaatcgaggcgctcggtatcggtgatatgatattcaagcattttacgaagacatgctcagttcttagtcatctctaaaacgatctacctgcatcctcttatacagaacccggcagccaattccgaggtgctaggctagttagaaatggggcgtcgtccaaacctaagaatgtctttcaagtataccccacgacgacacttcctcactcgcctccgggacctctatcgcctgcgcttgcgcacggtctatttcgctaatgtcttccgccgctgcctaagcatgtacgaatacatcatgatagaacctgacttgtcagctggatagaagactacaatcataacaaatacataacaatatgtccactcaccaggtgcatacaacccaagacagaagtaaaagatccctgctacaagagaactactcgtaactccagcagcgcggtacatcaaccaccactcggcagaaattccaatcggatacagtacaataaacagggagtacctgggaccatgttagtggatcgtggccgtgatgattagggtgacaaggttcatgtacatacctcaaccacctcaacacggaaggcacatggagcccagccaacaaaaccacaaagtaggaatacctcactgcgtccgctacagcccacgcgaagagcatagctgcgtatgcccgcgacgacgccgtcacagccggaaagccgtagttaatcgcccagacttgcacactccgcgcgaaaatctgcgtgaatgttgtgaacacgggagagcgagttaggcctgtgatttgcgttagttatgcatggatctccgacgtcaagcttcgtcctgtttcaatcaaggattggattttaagcgcaccgatcgcagcatgtaatatttccgcaacggctaatgtctgtgtccagcggacttgcggctcgaggactgtgtagagggttggtagggagatgacatcgaggttttgggagtaggctcttaggacggtgatgaggatgcgaagccacaggagcgcgttaatggagttatagaggaggagatatattctagcagtgggggactgagaggccatttttatcaatttgtagaagtacaatgaccgtctaagtgaaacctggagatgctgctcttgagatgatagattttaattgttagcgtcgaaattgaacctcggctttttgcacctttcatcttgtctcatcccagtacatctgcaggagaatgaaacatgaggtttgacaggaatcgatcggtacatgttgcatcaccctagccctaagttgatatcaaaactgacctgtattatacgtagctatatattccgtaggttcggcaggcgttgaaggtctagcctcgcgagctcctgcacaaaattatagccgactgctattggtttgaataaagcctctaataataataaaaagccatttacatatatatatatatataaagaaaaaagaaaagtcaggacagggcatatccgctttcgccgacaattaatgacaaggttgaagaaaaagagtgaaatgctaattctgccagctaatatctgatgattgcgggttcgggcaaacctgtatgtataaccaatgtcgagcaaaaaaggggcgaagcatagactgggaatcccctaagacttgaccgattgtctcatgggtttatgcgacggttgttataattgtagtagaatttactaggtagatatattgccttacagccatgatgagctcgtgttttatcacctacttcgccccgctctggattctctcagaaatttactatattatacaagagagttaggtaaccagactcatcagagatacccttctgcccggtatatccctgatcttgcccgcagccacagcgccgtgtgtttgagcaagcccataatgcgtcaagcagtgagcaatgccaaattgggtcctggggccctcccccatagtggacctggcttggccccaggtggaggttgtagatcgagacagaaaacgaggtcctagttaaggtgataaagtggtgacaaatcagacagacaaatagcagaacagagagatattacgccatcagcaacacgcttttgactattgcaactgactcgagattgtattgtaagccccatctctacccttccgggaggcactgctggcgagacccaatatgtgatcaaaagcaacgcaccggtatctattcggcacacgacgagctcccaatccggtttcccaaagttcaataaaacgtcagacgaaaatgcaagcataatctgtgccccggatcgacaagcctggattgaattcgggagacttagccgtccttatcgggatgacctcgtatttgcaattgcatgattcccggttaggtttctgtgtaataaaaaatggcggggtagcggagaaggcgatcacggctattgaagcgattaagctcgtacccctgagcgcactgacaacagctacgaggactgaggtggatgctcttattcttacgccgctaaaaagaagccagaaggacggtgagcctggctatctaatatcatcacggtgtgggactgtggatttgatgacggataatcctcatttgcaggttcttatccacggttcagcggtaaatcatggtccatatccttgtccattgcctgttgctgccgcgctgccaagttcttcgcagaggatcgcggtgccacttgtactaagtattgcgtagagtctgtggtatcggaattcaatactgaaatgacctcagtcgtggtagaaagtcaatatcgagaacctgttcggaagaatactcgcctaatttaggattccgaggtcgcancagcaccgatccactcggcatggtagggtctgctgacttctgaaccgatcttccgctgacctgtggc

SEQ ID NO: 4949 - DNA, 2008 bp, Emericella nidulans
acccggagtcaacagcgtcggcccggtggtcagcagttcggtggcggtgcattgggtggagcgatcaaggcataaataaaataaggttttttataatggcatgtctcttcctttttctctttactcacggtctaatgttcttactggaatatgacacgtatgatcattccttgttcttacgtatgatgtctattagaggagttatttcaatctctcatttcttcacctgtaactagtgcaagtgagcttggctagagtattaagggctcataggtataccgaagttccatgcttgcagagatgtagcagcataatgatagacggtgaatccagccccaaccactatcgcaccatcgaagtggctattgtcacttgtagtcctcgacaattggttgaagtttgatttaaaatacctggtcgctgcacggagccccaaaagcccacatcggtaggctgaatgatggtactacggcgacccagaatagtgaattacgtgccgtaacatggtttatcatctgccgcgaggattgaagcagttgtcagaagaaaagctagatactttcttgaggcgatcagcagcgtcgccgtccgaaacgaggttctggggtgaccagtattcctcctccgcggactggagatccacccaaacaagaccatctgctagaagatcatccataacggtttttgcgcgaccttttcccagtttagattgatttgaagcattgaaacgctgacgtagcctaagacctgtatgacctcgagcacagtcgcttggtctgtattcagctctttcggaattgaacggatatattgtttgctgccgacgaggatggtagagaagccagaccccagcggctcgagtgccttgactgcacggagaatgtcgtcgctggaatgcgaaagtcatgattagttgatctgtcataaggtgcctgggactcggctgcatactcagtaacctcaagtccactgcctatcgccctacctttcccgacacgcttccggcactcctcgacaccaatcaagcccccgttctcccttcgagtcttgcggcaaagctcgacaacccgaacagcaacctcaaaatagaagtcattcatgtcaccgcccataatctgtgtccaaaagctggagccgtcacccaaggccttgcgtccgttcttgcctttgacgttgctagctgcgagcgggtcgacgccgatggcattgcacatacgagcaaactccgcgcggaaggtaggatttgatttgattgttgagctatgttctagcgcgaagttgtgaaggagggtctggaatacggagagctgggtctgcagcgaggaagtgtgtgtagaccgtagatttgcgccatggttggcataagattgcgtggcttgggtacggttcgcgaaggcgccgagcccaacgccccgacgagaggccataatctgttgctggaggatagtcgatgatagagagctgggttgcgaggtcggagggacactaacgtcttgctggcgatactgaccgaggcttatcggtcgccatcagctgataagagtagccctaaaggtgataagggcactgaatcctgattgggaataaggcgtgttagtgcggctttaaccacagaaggctagtgcgctctcggcagcccacaacgacttcttcatctgaaatttcgctttctcgaattctctccatcgacagctttcgccaaccgcccaactcgcgaactcaacggaccgtcgcaatggcctcgactgctacgtatgttgcatttgaacacccaattaccggctgatcgtccaatgagcctgtaaggttcggtttatagtcgtccttctcgctggagatgctccgaccagaaatggccgggaggtaccagctcgatttttcccgcgaccctgtccttaccttgcgcttgcatcaatggaaacgttggaggcggctcaatggtttgagagaggggatggggtgttgaggttgaaagcgcaaccgcttctccttgaaaacgattgttgag

SEQ ID NO: 4950 - DNA, 8069 bp, Emericella nidulans
  unsure (1)..(8069): unsure at all n locations
taacatttaacagcctgatctcctacccgctcgccattgtaaacgtcttcgtctccgccggtctaatctacatttacctcacgaaagaaaagaacttcccgaactgggctcccggcatccgcgcaaccctccctgtaacagttttcttttgcctgtcaaacatctacctcgtggtggcgccatatatcccgccttccgccggccaaagcgtctacgaagagctcccttattacctgcactgcgttgttgcattgggaatctttgcgcttggctagtgctattatcttgtttgggcagttgcatgccgcgcctcggcgggtacgtccttgttaaagagacagtcgtcgatgccgatgggtggagtaggagtgtttttacgaagatgcctgttgcaagggtgaaggacgaggggttgcatttctagtcgttggtttctcttctctctcatccccaacagcgagacggatggtgtctgtactgtagatatttgcatttgatatattctccgctacggagtaacgagtctagcacatttggcatcttgcatcacggagcaaagcaagggtaatacatgaacttcataattcaattcgcattgtcttatcccgatattgtagctcgatatggcatgacgtgctctttgtacctgacttttctccctactgctaactggacactagccaaacagccaacaaacttgcatctacgaagccctcgcgaagagcatactatgaatagattcctccagaccctttcagcgaaagaggaggcactaagaaagaaggtgattgttccaaccatctatggaagcccacccagtaatcaatccctcaaagctcttcaagagcttgagggatcgtcatagactcctcaaaccggctgttttgctcttgcaaacttactctgtctagtaaactagccagcctacatgcgtctgccgcaaagaatatgtacttacggcattgctgtagaaagctgcgtgatgaatgatatgtatgtatggattgtggaagagtttgcgcgggcgattgaaaaaagcggtagccgttccgcggtctgacacgtgatgcgccacttagatctaactacttttggtctaggttcgagcatttttgtaatttatgcctcaggtttccaaggtggcatatcaggtcttagcgtctggataactgcctaagttgcacttggacagttaaacataggaagcgaagcagaaacaaacaacgattcaaaatccgtaaccggagctcaactgaatatctcacaacccattagatctccgtcagaagcttcttaagagcttagatcacgggcgccactattatgtagaccgtccattctcagtatagtctgtttttgaccggtgacaaagtgggcactgagatataggtacgggtctatgtattgtttgttaagttggtaaataagagaatatagcagcgtattgatcaacaactcccaaaagatcctcttttaagaccccataaccgagatctacgttaccgcgaattcgagaacgctggctggaaccgtatccgtatgccatgcgccaacatcttcacctccattccatatgccggccggcgagaagaatagcggataagcgactcgtcaacctaatatagccaggatttctttgggcggttggtggctgcaagaggatggtttgacgtcttcggaactcggacgtgagtcgatcattgatgccccataatgttgattgaactcccagtgttggttttgggtgtggagggctcagaaccgagggacgaaggttgcgaagtattgtcctccagagggatggggaaaccatgcggtgaatggttgttattcgctttgttgtcccggaaccatggcgataataggcatgatggtagttgtgatggcggggcatgagcgaacgcttatcaatgtcaccgcaaaccttctatcatccagtagaagccagactgggggccaatcgaccgcgatgttcctgaaaaatagtgaggcagtcgaaatgtcacccttccgccgcccctaagcccaaggctaatacttgcgcttaggctagcaagtgaccagggctagcgattctcagctcgtaacgaccactgggtagaggagaaggcaacattagacgatcctcaatcaagaactctaccaattcagtcatcctgcaccgcaaatagaacctttgtgtagaggctacagccgcgacaaccaacaacaatctcgcccgagtccgcctccctctccaaatcgctctcggaaagtgaaaaccctcgctcatcaccacacctgcacgccatgtaccacatagcttcgtcaccgccctcatcacaatccagatcttccagatcaacaacctccagccctgtgtgaaagaccgtaccgttcccgttcttatctcccgccccattcacccggtttctatctagtcggagtacgcgatcgtattcggcacgctggacaggatcagagagggtcttatatgcggttgtaatggcgtcgattgtaatcttttggtttgaaggtggttgcgcggggccgtgattggatgaggggaggttttcttttgcaacagcgacggctttgtccgggtggtgtttcagcagcgctttgtgatacgcaattttcagctgctgttttgagaggccggtgcttgggaatgggaggttgagtatctcgtagaatgagggggtcgttgtgggtgcagctgaagtttgtgtcattttttctggcgcttatcgcctctagacgtcaaagctggctgtttcaagggccgcaatcagaagaatgttgaatcacagtcctattagagggatcaaccaaatagaaagaagccacttgagccagtatggtggaagcgggaggttgtcgttactggagagaaatatttgcggggaaatttttggagtgcggaattggatggaggtcacccaccgcattgacgtagcagaccaacaactgtcatttactacgcagaacgcctatgattagaggaatacgggaatgtatttctgcttcgagtgatcctcgatcaccgctgctatgcgttttgttaggtgggaacgggaaactcttcgtgtattgcacctctactcaagaatctatccgatagtggtacaatctagtaatagcaaatcggcagagatagccagaaacatcccaatatgacgagtggcagaaaaaagtcggatatcttgacatagaaaagcagaaaagggggtatgcgaaagaaccccagctgaacacactaacaaataatcctgtcgctgagtagaagcaccttactcagacctcttgaagacatatcggtcctcaaccttgctgttgaaaggcacaccaagctcaagcagcttgacaaagacctcagagaactccttgaagaaggcgtcgctgtccttagcataccgctcaacatgcttcctgaaccccttgtcctggacaagtgccaggtcagtcgggaacatcatcagtgtcttggttgtgttatcagtgaactgcttggggccgttccacttacgcggctgccacttctcctcaaccaacaggcggaaaaactcgtttgtgaagacggtagggctgaagttccagggtccatcgaaaccagagcggtccgtgtgagcacgaccaagagcgtgtgcaccgatcaaagcaaccatctcgcggtcatcgaaacccatgcgtccgaaaatggcacggatgtggtcttggttcttggtcgcgtcaggaagacgggccgtcaggtgtgcagccagaaacgtccttgtcctggcggccagggcgccaggggatgtctgggccgccgagttcctggatcgcgcaggctcccgcaagtgtccacaagtcggagtaggtgatccaggggaatttggccttgatgggctcgaggaagtcacgggcgtacttgagaccggcgttggcgccgtggtcagactcgggggcgaaacgcatggtcgcgccgttgctgccaccagtaccggtttctgcgtcgtaggtgccgcttgcgtgccaggctagacggacaaggacctagagagtcgggacattagttggagagcagacacaagcacgagaccgagaagcttacaggtccatagctgccatcatcgtagtcggtttcgttggcgagacgctcggcaatggcattatacaccttctggtagtcttcctttgtaggagtgaagaccttggtgctagcgccaacatcgccgccctggaggtagaagtatgcaccggcaccacctgcgagagcaacaccggcccacaggagggtgttagaagacttcccggagctcgcctcggaagagtatccacggcgagaagcaacgcggaggccttgagtaggaagagcaaaccgggagctgcggacagctggtctgagggaagagcgcaagaaggcgcgtgatgcggatcgagcagcggaagccatgatggatgtggacaagacaagggcagaatataataaaggaagaaagggacaagtagagggagatggaggaggagaagaggataagaggagagacgatcgggatgagcaggaaggacagggatacaaataacccaagcttataaggacaaccgaccccaggaacttagaatgctatcgaacacgacgctcagtgctcaccaatcaggggggtcacatctgagggatccggacccagaccttcgaattgagtcagcagcagatgtcttaagattggctccaaagaaagctctccgcattatttgtctttgccgatgttcagggccgctgcctgcagggggtgggcgacacacaaagagggccaacatgcgtggcaatatcaggccataggcggtcgaccatggttgtctacattgtggcggcattactcatacagaggatcgaaacaatctcattagatgtgaattcagaatgttttccatgatgattaatagaggtgttcttcgactctgtagtacggtatctgtactctgacgttgccgaggtgttggacggatggggctctctcaattattattaacagcgcacttctctttggtcagcgggaaattccgagtgtactccgcagtcgatcttattcatcaggctcgtctagctctcatcagaatagctgagcccatccatcataaaccattgaacgctttatccgctagaagcgcgaagagaggttgttgcagctgtggtataacactagtttctacaggccttctacagggaaatactgatacatccatcgacgattacaaaagactagaaaatgtatgagaccaataccatttgtgctaactgaatgttcgtcgtaaaaatagtcctgctgttcaacaatgacaaacaccagggtggagtagacgcagtcctgctaaaaactgtttggttttgatcttccactgaacgaacttgaaaaaaagtacgcctctatgccactgtcaggctagacgctcactgtgtggttcgagctgagctctgctcatataactgagaataaagggtttgatacggccgcatcccatcatcaagggtgcgatccgcgtcaaggtgcgaaacgcaaagtcgttgacttttgagaaggtaagatggagggaagggagaaagaaaacagaatcgactgttagcgtgcgctcacgtgactgatttcttcgcttaccaaggtcatgtgctcagctagtccgtgggacagttcggtagcattagagcttgcatcactttaccttgcgagatatgtagttattgacgcctgattgtagagacatactctgagcactcaattacgattaaagctttacacctggtctggtagactctctacatcaatagtcgccatctcgatgctttggagtgaacatttctggagactctgtccgtactttgactagctacagtcaggctcagaggacactggactctcgttgctcggtgttatggagtctaccacattatgattgcattcaggtagcaaaaccgcgtacgtcgaaactgacagctttgacaataacagcttcacagtgcccactctaagtacagttatatggagccgcttgaggctaatattgaggcctaaggcatacacacgtgatccaccgacgctataacttgcccatcagaattcgcacgcggtcctttccttttctccttcacacttttcatacctcagaacgcataatcaacctccaattcctgtaactgtttaaggttatacccataggatggtaggtcatattggcgaacgagattaagctttgcacgagcatcttaaggctccgctgtcgtgctgggtttcttcagaagcttcagtgctgtggtggctggagtcacctgctgctcatacatctttttcgaactcgaaaatcatcgtagtcattctggaaccttnnaacagagctcggactagcggattgtggtgtgcgtctgctacctgggtttactgagtacatcaggtacgggcctcgctgaagttcgaaggcatgtcttccaggttaaacaaggggatacaccagacgcttgaccaagaccagacgctccctggtcgagcccagaccaagccgtaaccaccttacaagaacgaaaataaaggttctgaaggggcgagtgacatggaatggccgaagtcgtatgagctaagcccttccgtatatttattgggcctatatctgttcccttgagtggccaaaaaaatacatgcgacgaacgtgtcggaatgtctgactgggccaattcgttggatttaccatagcagcttaccaagacatgcaatgtagcctgacaagactgacatatgtgagctgaggaatagatgaagaaaatgctcgtaaactcagctaaggcgcaccttgtgctcagtaataacattgagggccatggccggccggcggtttccccacctccacaccttacctgttgcttctcactttctccttttactgccactcttccaacttctcttctatcatcactttcgattattcccaatagacttatgacagcacattctttggtaaatatgtgctgcttatccgctcgttaattctgtacattcccttatcccgccactatctgatacctctggcctgcccgagccaccaggccgcgcatctcctatccttaaataaagctctccataattcgacatggtttctggtatcagtaaacgacagcagctgcgcaatgagcgtgctctacaagatctcatccggtcggttcccggcaatgaccggtgtgccgactgctcggccatgaatccaggtatgatcaactctatcgcagcatattgtgccctggctgactgattgcctcgttttaacaggatgggccagttggaatgtatgtacttgatcgattccaagccgatcgtccgaacaaggcagctaatgcgggcggatatagataggcatattcctatgcatgcgatgtgcagccttgcacaggaagatgggaacgcacatttcgaaggtcaaatcgttgagtatggacagctgggcctcagatcaagtcgatgtgagccatccggtccgaccgcacagacagaatcagacggctaacgagtagactcgctagaacatgaaatcgcgtggaaacatcctcgtgaacaagatctataaccccatgaacatccaaccgcccgtccctactgatatcgatgaatgcgatgcatgcattgtgcggctcattcggcaaaaataccatacaaggacattggaagatgggaagccaaagccaccaagccgacaggaccctagctatacacgatcgccggagggctcaccttcgccgttgcctccgaaaccttaccggccgtttgggttcggtcttcggtctgcctcgtctgctgtgaacctcaacagccattctgctggcagccatggcccagactcgcctgttagcgattcgagtcgttcgtcatttgagtccaagctcgccaagctgagggatatgggatttacgaatgagcgcaggaataccaccgcccttcgggaactggatgggaactttgacatgacagtggagacactcangaggcttggagaaggatggcaacacacatgttcggacgcatctgcatnggcgcataactaatccttcgatcagtgatgccaacacc

SEQ ID NO: 4951 - DNA, 5091 bp, Emericella nidulans
  unsure (1)..(5091): unsure at all n locations
atgattcacggggcgcctcgggtctcaaagacggccaacaatgcccggcggaagcctctgcccaagctcatgaatggtcttgccatctcacccccctaatagtatcggacgatggttggtggagcatgtcgtcccggcatatctttatgggatcctttcacgctgctacgttacctatcagacacttccaaaccaattgcgggtctggtgctccgcgcgctgccttacggatacaagatcttgtgtctctgactggtggcttggtcggcgtgaaacacctcccaccctgttttcgcctaccgcggcatcttctgcattgattgcagaggatctgacgccattaccacataaaagttcttagactcgcgggcgggacattttcgttttccttttgactacgtctactcgttcttgggctggcagcagagacttgcagcctcgcagcggacgccgtgcggcctcaagctcagtgatcgacatctgcagcctgtggtctcatgagcttttgccatgactcgctcccgctaaatccatgcacacttgcagtcccaatccttgtacagttattggcacatacatgcatcatagacatattaatggcccgttgcagcacggggattgaggtttattggaggaaggcagagtatctagttatttggttgatggatctgctcgatgtctatttctataccctcgatacatcttctgtatgtgctgagacggtaatgcagcttctggtccacgttgatgatcacatatattgcaagcgtggcgtagctcagttcatggaaggagctgccctgtctcacccagctgagccacagggttcagtgtgtagtcagcatgttcctgaagccgtggacgaagccgaccgacaattatgtgggtggcaccacgtggatatggattatggcgtggtcttatacctcaagtaaggactggccgctttaactctagacagaacctgcgtgtgtggtattatgttgattgtaaggttctgtactgtttcgttacattcattgtttcgtaaagcaacctcctctcacaacattgggtccatcccgtgtctcgattcttcagcagcaacactaccgtccgtccagggtcccatttatccaatttatcctgatcttccttcccctttcctgactccctctgtattagtatagaacgtgcgctcctctgccctgattggcggaataattggttccggggcgaggccggggaaattggaccgtcggggccagaaagtccctccactgagtccactcttccacacttgcatggcccagcagctgccgcctctcacctccccggatccatctctccatccagacctgcccagcatcaccactgactacgactactgagagccgactcgcgggactgagaaatgcccctccccgtgccctcctggtgtcctgctgccagtctccatcactcttcgccgttgccatcaatctcatctcggactaatcccggtcggcgcgccttcttatcctgacccgtcccattcctgagactgggttattattacttaactggttactgctgcaagtctgtttcccgttctttatatactcttcgcctttgcctacctggccgctctctgtactgactctggaaggaaatcggtttccgttgatcatcgatgcgactcgcttcggtccccaaattatccgtcctcttaaatcgctgcgttactgattcccgtatctgacattgacgtctccccgtggcccctacgacctcttattaccccccgatttggcgacccaagtatgccgtgaaagatgatgcaaaccgccgtccaccatcaacctgtggctaccaccctcagagccgattcaccggtttccgtggcctcgactagtcttaaggggacttcagcgtccgctgctcttccctttcctcaggcgcttccgcaggagccatctcggacggtcgtcgctgtatacggacccgggcaggatgccatcgtgcaggtggttgcggatatcttgggaaagccatggacgacagagacgtcgctgtccacattagggcggggaagtagtgcggttgttgttgggatccgggccacggatctcccgggaagtctggacgggtgcgacaagtcggcatgcatgctggtcaatctccactgtgtggatgacgggtccttccctgaggaagggctgacggaactgtgcgactacgagttcttatattcgttgcggagtccattctttcgccgggaccttacgcggttcctctcattaattctgggacagacccggccacatgaggatctgaagacgaagaaccgaacgaattttatctctaccacgttccccgatgtacatgcggcgctgccgaacttggatattctctcggtgggctctgatgccgttgagatccgcgtggatttgctggtagaccctgacccgctgcctcaggatcaggggtatcccgggataccgagcttgcgatatgtcgggcagcagttgatgctgttgcggcagcatacagaattgccgattatatttacgacacgatngcacgaagagaatggaaagtttcctatggataaccctgcgctattctaccggtatccccggagggcgattcaatggggtgtagagtatatcgacgtggaactgtggctgccagagaatattcggcgcaagctggcaaaagtcaaaggaaacagcgtgatcatgtcggctttccacgacttttcaggcgagtgaaagtggacctcgcccgaggcaccgcggatctttgaagaaagcgccaagtacgcggacattgtcaagatgatcgcgatggtggatagcgtggaggcaaactatgagcttgagtactttcgctccgcgattaagcagacgcatgggacatatccgctgttatcggccgtcaatatgggccagctaggacagctatcgcgtgcactaaacacggtgttctcgcctattacacatccgctgcttcctatgattgcagcgccgggccagttgaccgcagcggagattaatgaagcgctgcatatcatgggccagctgccgaagcgggatttgtacgcgatcggctcgttccgagcgacgccccagtcgatgttcatggagaagtgcttcaacgagcttagcctaccgcacactttgacctctatggaccgcgggcccgccggctcgctcgaacgggtattctcacagcccagtttcggcggcgcggcattacacccaccactgagcagcacgtcacatctccccgccatcagcgacgcagcccgcgcaatcggtctggtagacacgattgtggttacgagcccaggatccctggtcggcgaaaacgccacgtggaaaggcatccgcgcgaccctgacccgcgactacgtcccatcggcataccgcggccgagcggccattattctggccggctccgaaagcgaagcgtcagcgagcattttcgccctacgcagtctcggcgtgggcgccatctataccgtcggcttccgggcaacagggccgctggccgagggtctcgagccgtttacgtcgatccagtctgtgaagctagtagaacagccgtttgtgatagtttcggcactgccgcccgagaaatcgctccttgtgcaagccgctgctgcgtcactaccggagtacgggccgggcgtcgccgccgtccactagggggaaagtgtacctcgatcttaccaggggcgagcgcaccggcgatccagtgagcgtcgccgagcggtctggatggaccgcgtatgggattgaggatgtgaatgcgtggacgaccgtcgagatgctgcggctgctggtcggacagaatgtgccgtttgattttgtgcggatggcatcgtatagtctagtttagttccgtcttcaattagctcttcagctcttcagctattcagctattaagctatcaagctattgatatcgagtgacaatgcctatattacagggtagatgcactgaatatagtacagtggacctgacgagtcctgggcctgcccggacactggtccgttctgccttggggaaaagcccgagtaattagccggcggagctagcgcgcacattgcagagcaccccggatgcccgttgcttaggactggatgccaccatccccgcatcggttgcaagtccggtgttagcccaatttagcgtctttggctagtctgcttctgcttagtcgcgaccattcgacctggacctggatcatttgatgccatcccccgttgtgggtgagtccgcgagtcgatgctggggtccggtccggggctccacgtttctaatataatggcaccctccacttccttttcaccatctccgctctgtaccttgtcgattcttgtcctatttcgtctttatcctgttcaaaccgaccgttctccagtgttatgtcgcgtccaacggtcagcatcgaccggctgacgccgcgccgagtcacagctgaaccccgcgagtctatgaactgcaagtcctgcaggaaacgaaaggtgatttctttttctgtccctattcgcctcgatcttatctgggacagtgcggcggctaatgctcgggtcttccagatcaaatgtaaccggctccgtcccagctgcgacgatagcaaggtcttccaatgaccctgcatttacggtaatatccctctcttctataaggcgtctattttctgtgtgaaccctgttaattgaaatgtgaagacgcggtccctaaaaaacgaggccctaaaacagacgtcttgaaagcgctgctcaaacgggtcgacgggctgaagaaacggctccaggatgatggaacacatccgctctcgcctgcttcgccagtgaagccagatctcccgcttccttcaagtacttctatctcacatcctgcttcgcattcgcatgctgcgcactcccatccgcctccacacccccaatcccacccagcggcgttcccgctcgcgcctcctgcggcgtatgcccatgggcatccccatgggcactcgcagggccacggccatcctccgcccggtcgcgttccggatgcaatactggacgcgtactttgcacgactgcacgggaaaccgttctttatcttggacgagacgtcg

SEQ ID NO: 4952 - DNA, 5232 bp, Emericella nidulans
ttcattctttcgtttgtagttccaccgacatctgcaggtagaaacggcttccttgcgtatgtgaagtcgttgattcgggcggctctagtatcggtgaacgaggccaggatcgcgggagaccgctcatgcttcaccatgaactgagttcccaacaatccaggtttgctcttgacgtgacttcatgagttgagtatgccgttttaagtccttcgatgacagttggtaagcagctgatctattcccaggagcaagcacccagtgtgctctgtgtgctcctatcagattgacaaaagtaaatgcatgatggacgcgcaagcaatgaaggggccaagaaaggccaagtacgagtccagatgccagcgtgagacatctcaaagttgtagaatcatgccaatcaaaggtgaccattaaggtttgagagcccggcggaagatgtgaagtcaatcgggataatgagcaatgcgtccaacaaaggagggctgggcaatgcattcgggagtacgaagctttcataaacccaagccgctgatccttctatggcagcgtttcagagtttttgcaatttttgtcattcctttccttgggtatataaagcccagattcaattgccccggggccttctgtctgctccatcgtcctcatatacaaatctgcccagtaatcacagaccgggattcgggatcaagtactccatattctctgctaaggccctcgtactgggactctgtaagacttctttatctctttgttccttttgtcccacaatggatgtgctgactcgaataggttctttcgtgggggcccatatcgacacattctcgcccggcggccagagcgatattttttatagcatcacagctcccaggagcactgtatctaccggctcggggcctatcttctttcagattcgcgctccgacgactttgcaatgggtagctcttggtcaggggacacagatgacgggtgccgacatgatcgtgctcgggttgcaactgaaatgccctagagtttgcgaaaaggacagaaaagaagtgaacgggcttgtgctaagcggtcaagtattttcctcgttcagtgaatctgaacgcagaaacatctgtaggcggcttcaaagcttcgatgggatcattccatcgttgtatactttctgggaggatttcaagtatcttgaatgctgcgcacaatgcataaggaggctttttggtcaggtgaatggatcgatatggaatacgatgaagcatatgttcgtgggaactgcagacgaagattacggcatcgtccaaacctccgagttttcatttcgtcgccagaccgcaggcaataacgaacgacttgatctaggctacaggcagctctggctgtacgcaatgcgcaactaccgtctcctgcctcagccagccaaggaagaggaagagctcttggtcaagccaagtcgtcgcgaagctgatgaccgcgtcctttacgaaatggctgaactggcccgtcgcctagggttctggtcggatgagatccgtgccttgctagacggttcaccagatcgccagatcgcgcgtgctgcgttgctacaggctcgcaagcctgatcaatttcagtatgatcctgttcaactggaagggcttgtcgaccgtgttgttgcgtgtttttcagcagccattgaatatgttcgccaacccccagagcttcttgcggacagtgaagtgtccacaagagcacgacgtggattgccacaggtgaaagcccacgcccaggatgctccacacctgttccttgataaagtccataacgaagtcacgtcctcatccgccacgttgaccacgttctttgttcgacgttgtgtatatttcgctttcttcgggaaatgttcgctcagtggatctagggttagagacttagggccaggtggccccccaggggatacaccaggtctctttgtcaatgagaacatgcaaacaacaggagcttcctccactgttcctgaaagtactgttgctcagggttcgggaacccggccgactcatgaagatattccaacccggcagcgcctcgaaggacactcagagccgatactcgaagacggtgtcggcagatcctctcagttagcgctttcgggtgaaaacaccggatatgatgaaatggccgatgagggtacaagatcacactcgccagcgaatcaagttgcaacttctggaattcccgaaagcctttcgctcggtctccagcgggtaagctctgcagatgcttctagccttaatggcgagcaattgggacatcagaatgcggagcagaccccactttctcgtgattcagactggccatcaaccccggcagaaagcaatctggacacttcattgggagagcaacctcagcctatggattattctccctccatatattctgtacgggagagtggagcccggaatactggaactggagcagaacgacagtattcccaagaacttgaaagagcaatccaagaacgagagagactcgacaatgactgggaacgagagagactagaacaagagctgggtctcccgacgtctagtagcgcacagggtgagattgcgcctgtacaatgcagtaaggaggacgaggtacccgagacgttacgacagacagtcgaacctccggatggttctgatcaggagccctcttcatccaacgtgggaacaaacgaccaacaaaccagagagccactcacccaaggagatcggccggtgactctactcgatatccacaattctgccttagtaccatcgggaagacaaggaggtcagtcccccacagcgggcgccttcgaggattcccgcgtggaagatcggatggaactagttgagttcaccttctggtcacttgagagaggacaatggcgaagagcagaccatctatgggttgatcctgctgacaccttccgcgtagagctgattgccaagaaatacatatggaaggacttttcattgtatgatcgccactggaatagcctcagccctgcgcagtgtttccgtgcagcgaccgtggatggcagcaatgctatttttgtggtgtcggaggatgaggagcggagactccaagccgagggaagaagaatgaaaatgactcaaattcaggcaatatcccacagagccggttcggaccccacggaaccggagaggcagttaaagaggaaccgtctctaatgagtcctaagagcagtttacagcctatgaatagcaacttgagagcatattgtgtgtgagataaactccttaggacattttgcggcttatgagtatacgcggtataggaaaatcctcttaagaggagcgagaagacgtgcttgagacggaatcggtcgtgagagacccatcacaaacagccccacttcctagggaattcatcacgtacccacgacgtgcttcagaaatggctcccaggattcttttgtatgcttatgattggctgctaaagcccgtacatagggtacggagctgagttgaaaccattcattgggtgaacagcaaaagggtcgcgggcttattgccacggcatttttcccccatgtcaaccccaaaacgggacggcgcgagggaaaccttagttccacttattcggaataggcattcaacagataatcccatcatctaaatagagggtcagaagacctttcggtctgtccctgagcccagataaacaaaatggatgcgtcggatgatcctcaaggtcatcagttaaatgaacttactgcccagagactacagtgctaccagggatgtgccatcgttcgcctgcagaacttggagttcgagacgaaccctctgcatggaagcctggacttcgatgaacgcaaggttgagagacttctcactatttttgagattgaaggttgcggcaaccttgcgccggaacatagagttgctgccctaattaaccgagggaccctgtcaaaagcgatttcgcagtcaggcatcacatgggagtcgctcttagacccaacgatccaaccacaacttctcctcgaatgagacgtgcgtctcgcctgtgtttatgggagacatcgtttggaggccgcagaatctttcggagagagaagctggttagtggatctatacctagacggtgggcatttgttcgcacacatcgacgcagtacataagctaacaaaatccctagacatcccttcggaggctctcatgcaactttgagctgagtcgaccggaagcctcaaattgaccgatggcgagatctatcgtgcgctcagactgtgccaactttcacgaaataaagctcaagaaaacaaatggtggtcgagactcggttctgatgagcgacgtaaaaatattcgacgcttacagcacaacgaacgtctgttgaacagtctggacaaactgttgccatttgtaggactgtggaaaccgctgaggacatcgcacattgagaggatgcttgccttaaaatacccagaggtatggtaaactttatacaatttatttcacacgcttattgagccagatattatgtcgttacttgaacctcatacaccaaagctggtcacacatctgcgaggggcaggctgcttcgtctgtggatccaatgtctgtccacctcgttgaaggcctcatgccccagagctctcttagagaccggagccgcatcgctgaactcgtggactcaggcccattatttgctctggttaccgaagttagcgccagagaggctatgcgagaccgcctgctctctacaacgggaagaatcatatcccttcatacgctcgctcaggacacgttgtacctcgagaaacccgctaaggcactccgttgtctgtgtccaccaaaattcaaagacagctttagacatacgatgcgtcgccaatggagcatagtcgggagcgggcgaccacttgagattcagaaatccgagcatgtgtttgcaacaattgagccgactgcaaatgcattctccctttgcatgatgcagctttggcttttgcactgaggcactttgtacatcaggagcgtcgtgggaaaaccggtcgacatgaatttgagtggtcaactgaagacgtcagtctgaggaggctagcagcgttggctgagcgtttgggtttccaatcagagcagatcacatccctccggagtcagaacctggaccagaatattccaaaaggcttcatcgaagctttctcaaaaaaagaattctataaattcgacgaagcccgagtacaatcgctgtcacaccgactgcaaagatttctcg

SEQ ID NO: 4953 - DNA, 1444 bp, Emericella nidulans
gggcatcggcgaggccgctctcagtaggctcgtagcccttatcggtgctgttagtgttgatgtggctgatatcagcagcgacacctgaaatgagtccatattagcccaattgtccaaaaagagcagcttggttgagctgtgacgaaccaggtccaccgcggatatcgtagagagcaagctcggaaacacgggggttaagcttgaggagcagggacagaggctggccaatgccgccactggcaccgaggacagcaaccttggaggcctagatgtcgcgcaagtgatcagtgtgctgttataaacacgccttcgatcttacaagagcaagagcagaagcacgagctgcgaccgagtccacgtacctggctagcagaggccgagaaggcccgcttctgaaggaaaccgaaagattggcgagcagcgaacatggtaactggcgcctaaggacaagaggtgatatatcaatggaagatagaaagacgggggtagacagagaggagagaaaagatgaggaagaaagccgtcgacagatgagaggtgccggttgcccggtgaagattcggtttaaatcggtcccgttccggtcacatggcaacggaacagccagctaagctcgagcaactgaagctacaaggcatggtgctttctgagagcttttgtttttgttatgaagctgtgggccaattggaatatgtcgaatatagaacactcctggtattttcgcaaatgcgcgataccagaaagctacctaggtaacatcgtaacccaaaacccaatgaacgccggcgctagtgaaactgtcaagccagccgacagccgccagtacaagcaaatgctgtagttacaattgattcaaaggaaaggtaataatgtgctatctcaagaagtgcaatactgcccagcagaataagagaaagagtaccacccctgcccagaaaatccatttgtcctgcttcgctcgtcgttccacttttcgaatcgtctctccactcactcctagggtattcgcaacactgtagaggcgacgctgtgtgcccttcaatacttctcgctgctgtccaagatcagcaagtaccgcacggcctcggtcaaggaattcgtcgatttgagagcttgtatttgacaagaatgattgctcccttagcgcatgcgcttcccgggtatagtctgaacctccgaacccggaccctgatcgtgacgatgaaggtgcgaaaggtgatgcgtgagctgctgaaggttgcgcataagggttctcaagggtggctgcgtgatgccgacagcggcccgaaagctaaggcgggtccgtacaaaatggttagggccaggggaggtataactaatatcaatgggctgtcctactaaaggcactaccgtattctccctttctttcgaagttgaacaaaagctgtcggaattttgagctttgccggaaaatcttactcgt

SEQ ID NO: 4954 - DNA, 8345 bp, Emericella nidulans
tcccgtgtagggaaggcccagggtagacctaagttgcaggcagaaaggagtgaggttcatgtgccgctaccaatccgtgcctgctttgagcgggatttcaatggagaaccctatagcccctaggcttccacagttgaaacttgtcagctccatcagacggccggtttctgcgtaccccgataacattatggtggactgcgttttgttctgcctgtagacgagcgcttgcctcgaggtccaccatgggctagggcatggctctagagatcgaaggacttctgggtgtgacccgcaagacaaaattgcatctggttatcctcaagcacccttattgatcaaacgctcgggtgctacgagtatgcggatagagtcccttctgtatgaaatgagtactgcgggagtgttactctttgttagcgctggaggtcccctctttaagattagagtaggccaaagaaagagagaagaacaagatggcatggggcattgagcgaacgtgcctgtaccaacctgcaaatgtagatggactgtctgttgtgcctctcggcatgacgaggaagaaaaatgtcgatttgtccataggaagaatggaattctgggcggtgatgccagaagtgaaggtcttgcgaaagatgtgttgaagaggactgaatgggatgttggcagaattgctgcaacctcaacgctgaggtcgttggagtctgatcagagaaccttccctgggttcccacagcacggttcattttcttgtacctcatacaacttaaagaactttgtctttcaaaaagatgacgacctttgatgctcatcgttccttagagcccttgtacttggttacttccacagtctggttcgtttcttcgccggcgagttcttcatctctctctaccgtggtgagatcattcacgaagaacctaaccccgataccttctaggagtcgatcgagattgtcaaaaagggatagagtgatataagctgaaaggctgtcaccctgaaacgatcgctgacggattggctaagcgcagctaggcccacggtacctatacggaaaccagtcgttcgttttttcgatagccagaagccctgaacgaagtcaaagaacgtggtataatatgcattaggattgggaaaattcccgaagatattattttgccaggacaaagatagtccttccagactagcagagacgctttctccagcccagaatggatgagctcgagttcccatatactatcttgacattgtccagcggaggagccacttgaggccaagcaattctctttacattttttcatgtgaaaactgaatgatggcgtacatggtctggcgtggcattgcccatgcatcactcttcggggcttcttacgaatgcaggccgcagtggctggccagcacgtcagctccataggccactcgccgagcggttttgtgggagaaaagggtacgtcatcaaaagaatatcactgattcggggagtgcatttattcaatctaatctttcggagtcagtccgagtcaattcctaaggatagctctgcgaagaacggacaacaaccgggcggacgccagagctgccgtctttcgaaacaagcgaaaaggtagctttcttgcaatgttgcgctcaatgcttctccagggccgcatgaccggcttcaattgagcgagccctcggattgggatgaatgaagggacgggctctccctggcattgagagattcacaacactcggaaacaacaggttttgctgggcttgttgggcatatgcaaaagcgtttggctcgttcctccgtatatctgtcctgtcgtcccagggtcctacattatcccctcccgtataagcgacaaagacgatcgcagcagatgagtgttcagtctttaagtgatgggcatcacttcctaggacgccgaactcggccacaactggagcttgaggaatgcatgacaggaaaattatggtaatagaacccgccgcgcggcactcagccaaattatacatgccaaggagcaaatggctttttgaatcaagaacacgaggtgtcggctacgcatgcactacattgaaggcttagaaacacgagtgttagtcagcatccactttgggcgaaaggatgcggaccgtgttcattgggagaatcatgtttggaataaatatggtgaatggccctgggcattgggccgggtatgcggcatgtgcttcgggtaatgcttgacgaacgagtctgtgttgaaggccaaaaagctacttggtctggactatggatcctggaggatctcccagaaacacaatcaaagcggacatgttttattttgcaccctgaaagttggaggcttgtgaccggtgagtcagaaaagcgagtctggtggatcaagaaagcgcgccttatactgacatctggggatgacaaatggagcatggcgccctgccttcgtgaagaatgacgccagctgagaaatctgtattgcgctcaccgcacggtagttgtcgtaacttgtgactcagtggcttcatattctcactgacaaatccgtttccaacggcatggggaaccttcgtttgaaatacggcaagcaatagcataagccctgcaatccttcgtctggagtctcacttgtgccgcggagcctggttgacagagggtggaccccgatcgtagggcgtcattgcacgccctttgctagcactagccaacttggctttgggggcttgctctgattcgttgatttgacaacaacatcctacaacgccctctggcatctttcaatgttcttccatcaagacaaacaccggcggagcataactatataactttgcagacaccccacttggggtttttgtcttctctttcaacctcactttcctcaacgacctagtcttctgctacgcccatgtccgcctcactcctctccgctggcactagggcagccgatgtgctgtatccctttgccagtccacagataaaaatcgaacttgccagcgagacaggcagcgcggcccgagcctacaccaccggagaccgtattgaagggactgtcaccgtcaccgccaaccatctcatcagtttcgatgaagttaacatccagctggagggtatgctttgaacttcatgcatctgaatccacaaggtactaattgcccgctccggctaggatctcaagccgttcttgtggaacgaggcatggtcccagggcgcacaggagcaacccaaacattcctgagactccgccaacccattgaagactccctctatccaatgccgcgcgttcttgagcctggccgcagctatcagtttcaattcacttttgtcattccccagcgtctgctaccgcatatctgcagccaccacaaggcaaatgcccatatccatgactcccacactctcttactgccctcccttggcgaccccgttctctccagggacggcaggacggcattggacgacatgtcgcctgacatgacgcgtgtcacataccacatccgggccgaagtgttgcagagacctgtcgtgggtcctgcaaagaccctgaagttggcgagacagaagattcgcatcgttccagccgtcgaagaggaaccgcctctgaccgttcttgattgcgaccccgtctactgcacccggaaagaaaaagatgtcaggcgcggtaccctgcgcccgcgccagggccggctcgtggtggccgcctcacagcccaagcccttgcagatgaacagctttccgaacaaaagctccgagccgacgagcacggctgctactatccatctgcgcttcgaccccgtgggggacgaagaaccgcccagtctaggcacggtctggagcaagctgcgtgttgcgacttactactccgtacgcccttgggataactatccgactgcttcggtagtttctgcatcggacatgtcgggacagggtgtataccaggagatcctgccattatcgagcaggtgtgttgcctctgcgcaatggactaagcatggcatggattcccttgcacgtcgatactctctccagtcagcttcttctgcagagtctatcacagggccgtcggcctcgtggtctggagacaactactatacagcctcggttgtcgttcctgtctctctaccgacaaacagagcgtttgttccgacttttcactcgtgtctgatctctcgcatttacatcctggagttctgcatctcatatcacaccccgaatatgaacatcatcacgccgacggtaactctgaaggtccctatccagctgacctccggtcaaccaggatctgttctggcgcagtcatctgaagaaatcacccaggaggaagtcgacgccgagtttttcagcccgcgcactattgcacccccagtgatgggttccgcaagcgctcctccagattacgcagagtatacatcttctttacccagcgcaagaccctgggaggtgcgctgctcataaaagtgatttttgtgtcctttttctttctagctttggagtttgatacccaggtttcctaggaataacgagcaatgctgttatgttatatagatatagattagcattagttttacatgaacccataatgtctattttatgcatttcgccgtcgtcctactccactgcactggagtattcactcaagctcatctggtctacttgactcgtctgatacagtcacttgaagagcaagactcgcgcattctgccaatcgcctttcaagtttctatctattcactaccttcaccttgcaactgttaggttaaggctcgcccgttagcctgcattaacggctagtgttacatatgcatgtttgctttgctgtgtttcagcggaaagtgaagttatacttcactctgcgctatacacctgggcccgggactgcataagtatctcccttttgcgtcctcgagactactctcttctttcctcttcccttatcttcctctattcatcagttttctctccctcagctggcttccgttcgtcaagatgaagcttcccatcctttttttctctactatcttcctcgtccttgcgcaagcagccactcttcccccactctaccatatttaccgaagcctcaactctacctccaacaacaacaccaactatgcccataacaataccaccggcagaggccccggctatagccccggtcccatctccgatcctagttctggtcaaagagaatatcgctcaatggcatacttcgtaaactgggtacgtccccggctatcatttctccttccccagtaccgccttctaacgctattccaccataaataggcaatctacgcccgtcaccacaatccacaagacctcccagtctcccacctaacacacatcctgtacgccttcgccaacgtgcgccccgaaactggggaagtctatctcagcgacacgtactcagacatagagaagcactatcctaccgattcatggaatgaccagggaaacgacaacgtctacggctgcgtgaagcagctctttttgcttaagcagcagaatcggcacctcaaggtcctcctcagtgttggcggttggacatactcgaagaatttcgcgcggatggcagctacagaagaggggaggagattgtttgcgaaatctgcggtagagctgatgggggatctgggtatggatggggttgatgttgattgggaggtgagctttgcttgcctaagacatgaagttgggcagaatgagggctgatatgaccggatgcctgcagtatccagaaaatgacgatcaggctagtgactttgttgagttgctgcgcgagacaagagaagtatgcctaccaataatctcttctacgtatcagtcctaagtaggcaatgctcacaagctgaacccaggaactcgaccgatatgctgccgacaacgacagcgacaagcccttcctcctgagtgttgcgtcgccagcaggtgcgtcattcttccctcctatttctcagtaaccctaagttccataccctaatctccccttacaaaacgaccaactgacagagccaggcccaagcaaatacaccaccctgcacctctcctccatggaccgttatcttgacttctggaatctaatggcctatgactacagcggtagctgggatacaatcacaggacacaatgcgaatctcttcgcgtcaagacaaaaccccgcctcgacacccttcaacacccacaccggcggtaaccgcttacctagccgctggaatccctgcgtcaaaaatcaatttgggtatgcctctctacggccggtctttcacacacaccgacgggccggggacggagttcgagggtgtggggtatgaggggagctttgaggcgggcgtgtgggattataaggcgttgccaaaacccggggcggaggttgtggaggttgaggagattgccgcgagtttcagctacgacgaagacaagaaggaagttattagttatgataatgtgggtgttgtacggcacaagggggtgtatcttatgcgtttgggtatgggaggtgggatgtggtgggagtccagtggggatcgggaggtggggagtggggggagtttgattgagacggtaagtttgcccttctatcgtcttctctacttggccttggtacacatggtttggaagacaaagggtggatgctaatatgacggttgggtgcagttggtcgacactctcggtggggtgaatgccctcgacaagtccgagaaccagctggagtatccggcgtcgaggtttgagaatctgcggaatggatttacttgaaagcttgtagaagtgaaagcataccaggatctcttaggtttacttgtccttagcatagccggactgtgcggattagacatgtttctgactacggtgtacggcgtttggagtgaatgtaggaactttccaagcgcatggcaacaggtggaaccgcaaacaaaaagaggccaaggtatctagaatgcttctcaaaccaaggccaggataaaaccactgaagactgaaaacttaagataggtttatgtcacaccggacttttacatatacaggcaatagacaaaaagaagcagaggcaggcgacctatatacaacacctcaaaacgccctcaatcaaccaacagccgtctatctcatcccaaccaatcccgcaggaaagaagagaagggaagaggagactaagtcaacatatcatccaacctctcccccaacacgccttcaatctgcttaacccactttctcacctcacgttcaacgccctcatcctcatcctccatcagctcgctgatatacggtaacatctctggcaagagcgcaagccagtcttcacccaggtgttccgtgagcgcttgttcggtcttcagcgccgcaattctggtttgcgggttatcgccgccaagaccaggaccggccctcttggtactgctgctggaaagggacgcgctagacggccgcaggaaacgcataagcacggtgtttagttccttatgattgtccgttgagtcagcagcgacggcgagctcggtgattgtggggattgtttccgtggcgacaagggctcctgttgtggtggaggtggcgtggcggaggtgggagattagaggtgtggagatcttggtgatatgtgagggggattgccagaattctgcgcattgttagtaatgattctctgcagaatacggagggctagatatcaacgtgggcggagaaggaggtacttaccatcctggtcgtgctcgaaggcgctgcggagcatacgcattgttgcaagccaaagggatttggtgttcgggtttgaggggctgtgctgtttcgagcacggaaacgacgctttcgataatgtagctggcgtagccggtgacaatggactataggacgttaggactttatctgtgaacgtggggaatctacgcgtataggaacgtacctgaagagtaccgaaaaagacctgcaggaagcggtagaaggtagtcaaccttgccaagccgccttgggtattcttctctggaagcccggtcgcccactcgacgagtttgataaaaataggacggaacgctgtgtcgttgagcttgtagatcattttgatcgtgacatcgttgatcagatcttcaatctcctcgagatctgacgcgtcgaacgccgattcagaagactgtgtctgctctcggcggaggtcgaatgcccggaagagaattgttgtcaggacagaaaggttcttcatcgtagcagacttgggatgtttctcgatgctgaggctaatggcgtccaaaacctcatgcgtagcggaggggccagcagaaacagcttgtgtccagttgcgctcgatggaggcaagtgctacggccatatctaccttgcgcgccataaagtgcagcgcttcttggcggttctcattgtc

SEQ ID NO: 4955 - DNA, 3248 bp, Emericella nidulans
  unsure (1)..(3248): unsure at all n locations
ttttgtccataacgttgtttcatagatcttgcttcacgtactagtcgaaaagcaaacagcctctgagcgtattagagaacatgacgatgagaggcggcgtcgttcaatcggattggcaatggcgagaagctgaaagccgtaaagggttcgggcgcttctttttcatgctgctgtttgttgtgacagacttcgttcaaccaatgatatcctcaacggtatagccgcatgtgcgatgtatcatagacgaggtaatgtcgtattagtgttcaagatcttttcttgtagtatcgaacgaaaggaagacgtgcgaatatcagctgtgaaagaatcgtttatatcgtattccagcgccgcgtcaagatacctccttcgcacttccttaccttctgtgataagctcatagaagtgtccatggcccatcgtgttagctggaacccactcgctgtgatcggtggtgcagcgataggagtgagctgctgtttcgaggttgtaggctgaaagtcgataactagagatgatttcaggatcagctatcagtaaatcagagaagtaaatgtttgacatctgagtttactttgttggtccctggcgactttggactacgctcgaagctcccgctacaccgtagcttcaacatcattgtgaatgtaggcaaagaggacaagaaaagtgggtttccgtacctaaagccgggataggcgcaagcctttgtgaagcctgatgcagagcaaggtgaattattttgtcgagggcgagaggtttggcagcggtgtggtcaaaatggaggcatgagggaaagagagtcgtaatcaaccatagactagctaatatctacggaagacgcgacaggttacctacagtcgcggtctggactgtattcaaaacggcaggaccggcccgcaatggcttctttaagatgaatacaatgcactcgttataggcacaccgccctgacctgaacacagaagccgtaatgcatgtccatacaccatgtaaagtgcgaattaatctatttgctcaagtaggcgtagacgaaccctctatacctttcttttttcctcggagagattgaccggttccctggaaacgaggcttctccggctcaactacgtttccgccctcgtctcgtttcggcacaggttttatggcatagccaaagaacagctgattaggtggtaggcgtagtggctgtgggccattcgttcttttaacgggaggggggtgactggggtttgttgctcccggcgtgggagttngaccgttggcgttggggttttgctgcctttcttggcattcagccggtggccgccggacaggaagttcgaggaaactgcccgtgcacctgcagcagcatcagtagactctggtgctatggctgcatagttgatcgactgggccatggtgccgtgtgggtggaggagcccgccagccggcagtcttccgctcactacgctccctggtgtgctagtgccactcgggcgctgtggctcctcgtatccaaccggtggcgcaaaatcgacttcaagatcggtctcgagaacagatatagcgtttgtgtcattcgcaggcttcgtttccagcacagccatttcatacacctgatcattgtaggcgaatgtgaagacatcatcttttgtaaggcaagagaaatttcgaaaggcattttctagaaccgcctttgggtcgctgatgtcgaggaaagaggttgactgggcttgaagtttaatgaagcggccgggggggaggtctgtcgatttgatctgtactaggtcgccgggctcgagcaggagtgtttgcatcaactatggtgtagctcgttagcaaaagtgatatacaaggcaagctatcaatccaccatgacttacccagtacggtaggtagatcttcccctcttcggcaataaactccagcacaccagcgtgggacatcttctcttttgcaccattgtgtagctcgaatagcatgggatatgtgatatgtagtcgagttaacttgtccagagcactgggaggcataatgactttgccgccgtgattcacgttctctctttcaggaccgggcatcatggccacgggataacagcggtagtattcatcaaagcggcgtgtcgctccatgccggatcattccttccatgggatcatcctcccagtagctacctcgaaactgttcaagtcagcagatacccaagaagcgaggtaaacactgtcaagagaggctgcacgcggccatggcggcttgtaggttgttcaatcccgatcttctattaggcaagcaaagagcccgtctttgagaaaggctgagcaaggaacagatctcgactcaaatctcagctttcaagtaagaagctgggagttgcggaagtgaggccggagtttctttgatcgcccgcagtgacgcaaaggctccacaacgattttccgacccgaccccagacaagtcgcatccaggagctgcctaaatctcaaactttgtcgcaacagctatgatattctaagaactgactgttgattggagtcaacaaaacatgtcgacatcacttccgcggccgaaacgggccggtgaagactttacgcgcacccattatcaggaagatctcgacgactccggtgcctccaaaaaaccgcgatttgacctgcgaaatccgtccactcttgctccagacgcgctcgaagatgacgcagtactggacgcagacgaaataggacggcgcgggcaacaagttcggcgaaaagccgtcaacctagatggctacgaatcagacagtgacaacgaaggcttcgacgcgcgatcctctaaaaaggcacgccaaaatgaagcaaaacaagaagcagacgatgacgacatgttcgccgagctgcaggaggactttggcgccgagaacattgacggcgacgcagcgctacgaaagaataagaaaaatgtgcggtttctacgagacgacgagattgaaggtcaggttgcgtcgtccaagagcgggcgaacattacgcgtggatctgagccagggtggtaacgatgttaatattgacgaagatgatgagagcgagagcgacgttgccgaggaagaccgtgcgagggttgacagcggcatggacgaagaactaggcgctggggcaaagaaaaagcatgcgccattattggatgcgttcaatatgcgtgctgagcaagaagagggccgatttgatgagcaagggaattatatccggaaagccgcagatcctaagcttgggtctccctatagtgagtg

SEQ ID NO: 4956 - DNA, 6865 bp, Emericella nidulans
aattttccctatcaatctgtcaatctaatcaaatcagataatcagccgtaatgattctcatactgtaactatggattgacaccacacgctggctatctaccacgtaatatttatcctccccactcacaatgcccaacgcctactagtctaggtgaaaactccaagctctcacgcccagctgttcgtgattcacaattattacttccaaaatcctttcaatagacattgcgctctgcgaccttagcgagtggggtgtaaaactttttcctccgcctagctgcagaagtggcttttttcgtcagcggcttgcacgctattatccaattgtatctgttcttccacattagccgggttgatcgccgtctaatcagatgatcagataaatttctagggacccagagggccagaattgtctgtcgttgcgttgcggtcgggtacacgatcggcatcaaggctacctcaacctgcagagcccgagctcttgggttccgcgatccttgagacattccgccggcaggttcaattctggagtctgtgctagggttgtgcttacatctcattacagttgacacaattgtgcacctctgataatgtcggttgggctcgaaccggtgagtgacagctcgtcagtatgtgaacttgcgactggtaaaacgagtaatagttttgatccggtttcggtgccagattcttggccattacggcgtcgtacgaggctttaccagtggaacgcgaatttcaggaaccgggctgtcttcatctgcctgagacccataatgaggggtagaatctgaaaagttcaagtggtagacagtttctcctttgcgccggtgtggatctgccagaacatggctgtcatgtactggtaaaacggctgtatacgctaaaacggtaactggtattgtttttcaatttcagtcagatagtgggtttatcaatcaaatcacaatcagataagattgcacccccacttcacctgcgaggacatcctcagaaaaagaaacatatgcaggaccaagtttttctctcgcacggtcagttatgtctcttcatggaaatgtgtagcgaacataaactgactccacctgtctcagtccagtagtttcttatggcgcgttgtcgacccaaatttctgggttacttttgacgagagatgtccgcggggtaacctgcaggctgcagctacagcagagagtagatactccagttcagcttccaagatccagattctgagggctcggccgatctctggggcgatgtcggcgatggctgaccagaactagaagggtggtggggtgtctttggttgaccgtcgacgggttccgttgtggtccggatcagataactttagttgtacagtagttgggacgacgaccgggtctgacggctgggtcaatgtgacgtcgcccctggcatcgcatttctgatatcaaacagagatataggcgaaaatcggaacccaggggttctagcaggatcgctttctcgaatgtagatatcccgaactgtagatggttgtctgccatatagcccatactcaaatataagtgtttgtgtagcgattcaggacgacctgcagtttccaaaaatgatggtacctgaacgcaagtgccatataacgtaataggaagtggttgtcaacaagaactagacacctctagtgtgcttgcatgaccaggtcggcggaaagcctcacagggcaagggccttgccgtctaacggccacgacgtatgaatatgggaaacgcgcagatgaatcggtagcccgactttgtggcgaataaatatcagaacctggaggttttcaggtctgcctactccgtctgctgcatttgtcgcttacaagctgcccagtgcccgcatatcgaaggtccctgacgaactgaagatcattatcccatttcggtcgtcgaaactcctatgcactgattgttattctcatgcagctggtcgatgttgttcataacaaagcattgcccagcatggagcgtcgcaaatgcaaccgaaatcaccggagaagcattattcaggaccctacaattgagcatagctcatagtctatgctcaaccgttcggtagagtatgttaaggtctgcgacaagccgtaaaaagacggaaagctgttttgtcggcgctaaggggtgatgagcgaaccgctagccaagattcaacaggtcctatctccctcaatcgtcccctgagaggatatccgatcgtggaatcggttactcaccagcatttaggactgcgtagtttgtcttccatcgcgtcgagggttgcaggctcgagtggtagagctcctgttaactaggttcagtctcaagcggccgttgtaaggcgacaagtgtttaaccatgctctcttatacagaaagtagaagtatgagaagctggaacttactagacaagacatacaccacctgcatgtcctcgcaagcattattatatttttaaagttggtgcaaagacgtgtaaatgcaatgctggcattattgacagaaggataataaaagactgccagtcccgagatactgagattctgtctacgttaggtgcgtctcacactccaataggaagataaccagccattctattgcagcaacccttgccgatcgtctttcaaatacagcgaatggacatcctgaggacgagcgggcgaaaatatagtcgagtaacaggtaacaggtataacctgtgtcgcggcacccaagcgacacgttactggcgtcagggcgagaagccatattgaccctttgagatcgttattcgtgtatcacgcacaaaatttgacctgcacggcgggcttgccacttagcacagaaactatgaagaggcgcttaagagcgaatctgtaaaaccgccgacagatcgcttacgatactatagcggaccgaccgtctaaaaatatcgttgagccctatgcttagggctaaatatgactcgtcgatccccagtaatctccctgacaaaagcggatggaggccctcggtttgggattgcagaaagcgtcggccaaccggagtgaagatattgcatcaacgccctgagtctatgatagccggggttcactcggagagccgatcttgccgtggaacattcctaaggtcggagacttgttgtacggtttccgcgctagtatagagcgacaaatatgctgtaggaaccttgttagcacggttgatagcatgagcttgaatgctatacaacaaagggaataccaggtgaatgtggtcagcggatcttgccagcatcagcaaggatacacaaacaaatgagaagctttccgagaagctttaaggctgcacaacccggacagttcacttgcagaaggccgcggcatctgcatggctttttctgtctctgttccctttttttcttttgttctttttcttttctttttttccccctcgctgccgggactttcagccttgtcagccctattctccaccggtcagatcctggatccatatgattatggacggcatctgtaacaagacacgtagcagtccataccacagataacctccgaggtccccgtgtcagcaatcatagacaactaagttcgtggaaaacccaggcgcctttgatgagctcctcaacctgaattgcccagcgccactttcgatggacgacgaaaatggaaatctgacgtagagcttcggagcgcccgctgaatagtgttacatggcagtatgacctggtgcagcctggctgtggtgcggcgatgggctggtcgtaatcgcagggaggcccctggttaagatcagtgcactgctcgtgcatcattgcttgaccagagggcattcacctgtccaacatcaggacatagctggagctgtgagtacggtctttggatcacagatactctcccaagtctcgctggctcaaccaagtgcaaaagatggtgctatgccagtgcgagataggcggacagccgagagccactggatacgtgtctgtcgtataagcgaaccatcgctctgccgtcctttattattcttatattcttgtcgcgataatattgtagaatgtagatgtagtcgtatttctgagaaacatcatctcaagtaggtaatgttttggtctaaacctaattaggaaagcaaagagctttctcggccgtggctcaagtgttgtcgcgtctcgacgcgtgttgcaacaatcggtttcctgtactcaccttatttcatccacttcatttgacagtatccataactttgaaaaccagaaagcatgtcctcgcgagaccagaaagtcccagaaatccccactgagccgccagacgagacggatctgtacctgatcttgggcgtcaaagaagatgccaccccggagcagatcaagtcagcttacaggaagctggctctaagacatcaccctggtaagtcatgtcgtgcgttctgagtttaatatgaagctttttatgtttgacagctaactagactaaagataaggctccagcagatgctagggaggaggccaaccaacagttccagaagatcgccttcgcctacgcgatattgtctgatccgcgtaaacgacagcggttcgattcgacaggtagcactgctgaagcggtcgaattggatgacgattttgattgggtggattattaccgggaacaattttccaccgctatcgacacgaacgctctcgagaagtttaagaatgaataccaggggatctgagaaagagggaaaagacgtgctggccgcttcgaagacctacgggggtgacatggaccgggtctacgaatcggtaatgctgtgcaatgttctagacgacgacgaacgctttcgtgccatcattgacaaagctattgagactgggaaggttaaaggatacaaccagtatacagaagaaccagagagaaaacggcaacagcgactaaagcgtgcacagaaagaggcgaaagaggcagagaaactagccaagaagctagagaaagagaaggaggtgggcagcgcaaaagcgggggggcgaaagtccaacaagggcagcgcggtagagacaaatgatttggcagccctgatccagcagcgtcaggcgtcgcgcgccgagtcttttttcgaccgactagaagctaagtacaacccttcagggaagaagcgagtggcgatggatgagcctccggatgaggcgttcgaagccaccgctgcacggaggggctcgaagaagacaaaatccaagacaagggcatagaggagctgggataaggcgttggattggatcttggttggccatgataggctgggatcaggcgttctggccatgggagttcacattacatatgcactgtctgggatagtcaagctagcattcgtggtttatcatgcatgatcttcataaggcattcgattcttctactgcggactgcgactggtgatacaaatacctcaacaattgccttttcgccaactttgggctcaccacagccacacagagatcgctcacatcacacggcatacgtccgtcagccccgtcggtatcagtgactccatggtttcgtgctgtgtagatcgtagctctccgcaggcttgtgatcatggatgcctaattggtgctgtgaatcattcctaatgcatgccaactattgatcgactaggaagggagctgcagtgacaccttttcgtccgacagcagaggccactttttctccgccttcttgtagctgatctgctaagctaacgaaaagacgcaagggagacggggaggtgttggacaccattgatgaatgagggaggcctgcttggctcgaggtataccccgcatgccgagcgcgaaggcgaaccatcctgtttccccatgcgaagcttcacttcccccgcgatgatttaacttgacttcagccctcctgaccgatttcgcctcttgctttctctgctcgcgtgtcctctcttaccttcacgacgaccttgtcgcgcttcagtggaaacgactgtcctcctcgatctcgtcctcattccaccttcatcgctgctaagccacaaaggccccttcgccggcctttgcaggggaccctgcaggaatcttgccgcggcttgattggaagtatcaaccgtcggctccgttcaactattctctattcgcggtgtgggagccaaggataggccaagcccgaggaaactcgcaaaacaaagggagaatccgataggtcgtgaggccgtcgcgtgcccgcggtgtccgggatctcgtccctacactgggtctagattcttagtattcaccaagttttgcacgtggatgacgcctccgaaacgctctttagctttgagttacggtctgttagctgcagcctagcttgcatgcccagaattgggcatatatgaatacaatacccccacctagcttcaaattcgtctgagcactaggtaaaaaggaaaagaaaagcccgagtttccacagctgaagtgcaagcttttctgtaattgactgtcctccttcagatagctctcgccaaattacagctgggtcccggttgtcgcaggtttcgcagtgagcactcttctccacagctcgtccacagccgtgggcggcgccacccaccaaaatgccctctaatcgcaggcccggcggcgtcgcgctgccctcgaagaagagcgcctcgagcttgcttctgaacaccgcagttcgtccacgcaccgctactcgaccacaagctacgcccttccgcgacgaagtatacttgacaccgccactggcccgtcacccggttttgtcgttcctcggcatggagccattgcgggcatcggtgttggcgtgactccgcccgctgctcgtggccacccggaaacaccaacaaacgtccccccatcacctcgcctcccctgccgaatgaatcggccggacctcccactgaaccgcgc

SEQ ID NO: 4957 - DNA, 3460 bp, Emericella nidulans
actacagaaaattcgtggtgggatcttcgctcccgccacccggtcgtcgagtatcccgtcgagggcaacatcggcagctgcgaactgaacaccctcgcaacccgccccaacgataccggtatcctttctgttgctgcaggaaagagcgtctaccttttcgatggacatactcctggaagactcctcaagaagattgacttcgggtacgaggttgccagcgcggcggtgaacaatgatacggcccgtttagttactggcagcgcggacgacacctgggcacgtgtatacgacttgcacacagatgatgagctcggtatgccgtcctctatgcgtgtttctctcgcattatttgattctataattatactaactcgcaatagaagtccaaaagggccatcacggccctatctggtcagtgagcttctcgcccgacggtaaattatacggtactggaagtgaagacggaacgatcaagctctggaaggcatgcagagagccgtatggtctttggcgctgattcggactgcgcatgtcccaatgaagacaagtgtatagtcatatagagaatctaataccaataacccttcgtctaattgtgtcgtaagatttacttctctaacctgcgtagaactctagggagggtgattctcgcacaagcctaagacgggtccggttaatatgaacagagatgggataatattgaatagacctctatgtagacccgcatatttgagggtgcgacttttgaatatgagaattgccgcctaaatagctactcgcaacatacataacgaaaccatgtgtgggaacaacggtcctctattcaatcatgtcaatatcatcatcagcagccggtgccgccgccgcagcaggcgcagcaacggcagaggcagcaggcgcgggttctgctgctgtttgttccggagcagcagcctgctcagctgtctcagcagcagcattggaaccccagtaatcctccatctcctggtcgagttcctcctgcgtcttcttgggtcgtgggtttccacgacgaccatcgccgccctgtcgtcggccaccaccagcgcggcgagctggggcttgttggcccggaatatagcgatcaatgtggtcgggggcgggcttcgaaacgtcgctgcgacggtagtttccaccaccgcctccgcgacggcgacgacggcgtccggcgccctcagcgctttcgcttcgactctcaggacttaaactgcgagcatcgcggggtctttcaacacggtcaaagagactgccccttggcttttcagcggtatcaaagggattccggtctcgtcgcgggccggaggaagtgatagaaatgcggatcggttgccccttggcgttggcgccgtcgaattcagctatcgcggttttcgcatcgttgtaacggctgtacgtaacgtaggcgacgccttcggagcgtccagctcgatcatagacaagggatacatttgagattggcccaatgcgggagaataactcctatcaaaggaaggttgttagagaataagatatcagaactttatggaataacgtacttcaaggtcggtctctgtgatatcgtagtggagattctcaatgcgaagtctggtacccgcagacgcactactggcatccgtttagcgtcgtctatagtccaatacatctgagtaaaccataccggtccggggacggggagtatcggtctacgcgaggccgtcgtccgccacgtgaaggacgtgctgaaagtatgtgtaaggaccaaagacactgggcattccaattctgtcgttgaagtaggttcagaacgtactgtctcgatcgtcttcatatttatcatgaacccaatcactgtattccgcggagagaagcagttagttaaattgagaacaatcgcaggtgagactgatagggcgccgccttacaggtccaaatcaacacgttcatctcgataaggctgttgtgatcagagtaaaagaaacaaggtcagcccgaaatcaaatcaggtgtcatgaaactgctgcatcattttctgtggcgattctcgtagcctccaggtctatccaaaagacaaaacacgggcgcacttgagttttgcttatgacaatgctggagcaaggcgcgaaagaagaggaacaagaggtagaggaagatgaggaggaaggacctggcaagtgaagaatagcgaattagtcaaaataaactcctttcggctggtgctgagcttggcccaagtaagctgtaccttttttacgccgttggagcggcgaccttggttgcgtggacctctgttctggccgcgattctgcctctgctagataggcacatcagcgacgttcaacggaatagaagactgctgcggatgtcgcggactgaccggccgttctgcgatgatttcatccaaactgcgatccattttgacgcgaaggagggatattgcaaatataaggagaagaatgcggtcgatctagataatatatcggagtttgtaacacagatgattaggaggaagatatggacgaagtatgcatagggattccaagactgggatagaagcttgccaaaggcgcaggcgaatcacgtggcccaggtaccatttgtacattgaagcccgatcccggaacaaacaaaatcagtttgtttctacttgaacatggttctgtttctttttctttttctttttctttttcctcttcttcttcttttttttggtgggaattactgcttcatatcttcggattgtctacacagtgcaagtgatgcgtaggtctccatgtaaaccagaagacaacgaacgagaaatatcacaatgcaaagatggccatcgccaacgccattgagtaccaatcaacacctataccacaaacaagacggtaatttaaagaaagaccataaaattgattaagaacggatcacacgctgccgttgataggcgcattgccctgactggagttgtcgttcatcatcctctccatgaagctgatgtagtcatatttgggaaggtctctgtcttctaacaaatctggaccttcgtgctgaggcatagtcttgacaaggtgctcgataatctcgtccggaatgagagagtgtcgaaggtcaagctctgtgacgtacggctatattgaaaaggtcaatttgggccctacttattcagaccaccgaaagtacataccttgccatctgcgacctctcggaagctttgaaatacctgttctgcagtgttctgatcctccgttacgctgaccataaaacgtatgaactgctcgaaactgacacccgcaccttgagctagcctagcaggaccgcatgtttccacgtagacctggtgcatctcttcctcatcatacacaaggcccaaactggcaagcgcggcggagaactcgagttcctgaagcgtattggatgaatcgcggtcaaaatgtcggaacactgactcaaactcttccaattgaataggagtgagatt

SEQ ID NO: 4958 - DNA, 7148 bp, Emericella nidulans
ctcattttcaaggcgagcatagcgctcagtttcttgttggagctgtggaagtcagtactgagcgtataacaccgagaacaatcaaaccttcgctgtaagaatctcatgctccctttgcaaagcagagtagaaggacagacctccatcggtctccataggcttctctcccaatgcaatcgagtcatgagcataatgtgacggtcggtctgagatggtaacagtttcattcaggccaattgcagcctcatcatcaaatacctccgcgtccgactctcccacgtccagcgatccatagtcgttagtcaaaccagtgtgcagctgtgcaggcggtcgtagtgtggcattggcgacattgatcgggttaatctgggcataacgaatggtgacctctcgctcagcccaattctgtcgcggttccggctctcgctgtgtaggatgttcggcctgtgtagcgcgaaaggcatcttgctcgagctgctctagagcatccgggggtagatcgtcgaagccgtcgtcggaaaaaacatcatcatcgaagttttccatgcccaagaagtgaggccgccatgaatagcgccgctttattggcgtagagtttggtggcgcgcaaaagttggtagtctggacagccggcaggctgagaaagcgaggaaaacacctgacgtaggtagctggcagtcacccgcgatcgagcctcaaccatttccatcctcaccttcccctcgacatcatcgacctttccccgtcaacgccggttgatgacagatttgcccttgttttgcgaataattgccctgtctatgggcatcgtcctcgccgttgctttttctgccgccaatccctcgtctctcacatgaaattttcctaggcgacgatcacttgtccccaactgttcacacgcactccttgtttccacctttcctcctcctcacacgttcgaattcatcccctctagacctgctcggcatttgccgcccgtccaccatacttgactctccagattccgctcagctagtcctgccccccgcatcggctctgaaacgcccctcaggctcccctattccataatgtccaagtcacgccggagcgttcggttccaacatcggtccgatggtcgacggccgagtatatcagatgccagtgatgctgcttctgatccgggcagtccgtcgaaaaatggagtcgttgctcaacccgcaacaatccccgaggaggtacggatctgccggtttgccggggactcgatgctgacgctgttttagaaaaccgaagcacccccgcttgacgaataccagaagaagaaacaaacttttatcacccgcacaatatggacttttgttatgattgccggcttcttcattgccatgttctcgggccatatatacatcattggtcttgttaccgctgttcagatcatctcgttcaaggaagtcattgctattgcgaacgtgccaagcaaagagaagaacatccgttttaccaagtcgttgaactggtacttcttgggaaccagcatgtactttttgtacggtgaaagcgtcatctattacttcaagcacattcttctggtcgacagagtgttactgcccttggcgtctcatcaccggttcatcagtttcgttctctggattatgggtatgttccacttgtatgaaggtattgctcatgctaatctcgataggcttcgttttcttcgttgcatctttgcaaaaaggccactaccgtttccagttcactcagttcgcttggacccatatggcattgtatttgatcgtcgtccaagctcatttcgtcatgaacaacatcctggagggtatgatctggttcttcctcccggcttctcttgtgatcacgaacgacatcttcgcctatgtctgcggtatcactttcggccggacgcagttgattcaactctctcctaagaagactgtcgagggattcctgggcgcctgggtttgcaccattatttttggctacttcatgaccaatatcttgatgcgctacaaatactttatctgccctgttaacgatctcggatcgaacgttctgacgggtttggagtgtgaccctaacccagtcttcgtccctcaagcattcgagattccggaatggaccggattcggcaggacattttacgttgccccgatgcaatttcacatccttctgttcgccacatttgcctcgctggttgctccttttggaggcttctttgcctccggtcttaagcgctccttcaagatcaaggactttggcgagtcaatcccgggccacggcggcattacggaccgcatggactgccagttcattatgggcttcttcgcgtacatgtactaccacagcttcattgccgttttcaaggcgagtgtgggcgacatcattgaggccgccatcaatggcttgacggttgatgaacagctggaggtgctccgcggcctgagcaaatatctatataaccagggagcagttcccgagtcggtacgtcgacggctttcatactatggtacgctggctaacttttgcaggttttggagcttcttagcacggaactgcagcgtcactaaaccctataaacgacacctagtgccttggtgacgcttataacctttgaaacgaatacattctcgtgcgagacacctattgcttatgactaataccttataattgacgtcttcacctctcggtcgtctgacggtacggctgggccttttggatgagttcttgtacatgtgaggacaatgtctttatatttcgataccgtgtctttttagtatctcattgggccggttggtgtaatggccagggcacggcggacgttgatagtccggggatacttctggtccgaaagtgcaaaatggtacttagcagacagtcaatacaccaccatctgtattagactatgggttctctatagaggaagtcaattgaagtagaccatctctgtcccacacttcccttcacctcacgccacatgtcctcctacctcttcatcagcccctcgccaaagtcacaggcactaacaaccgcatgtcggcacagccactgactcttcaaaagcgaaagtcagaaatgcgcctggaacaccggtagacacctttggtactccccagaaaccatgactcccgtaaagcgggagatttacctgtaagatctttcgctccttctgttgctccgcgttcttctccaacctcgtcctcagagtttcccctcacgtccgatgaaggaccggcttgaagttggagcgtaagggtcgaccatgcaacaactgtggcagtatcagacttgcactcggcttctttttctctacatactcctacctttggcgtcgtcgttagacgcgctgtatcagtcttggtattgattgttcttgcgcgcccagtaccaggtactaggtgcggatcgtctgcgtcaaatatcaaggtatacatttcgtttcatcttggcacaattggaggtatataaagagctgttcacatagcgtagtgatgctgttctacgcgttatgggtaggaaggtttgacacttggtatgaaagaaggggagtagagcagaatgtttctgaagcctttgatgatgctctgatacaagagtgaataatggattggtctgagctctgatatcatagtccatctaattattaagtccgattcattgatataataggttgatttgagtgacacatacttcgggccatttttattaggaggctagggtacggtgttttgtgtaggaataactatttctgaagttgggtcgaacctcatgacactcatcttgaaatcacttcaagaaactcatcgaaagcgccactgtttaatctggcaataaatttcgttctctttcctgctgactggccactttcccgacattcggttctattctcatgactggtctttatgaattattgtagctactgaatcaaacgcggcttcaggaccacgcctatcaatattcgttgcgaatcgacgcgtcatacgtgacctcccatatcaactccatgttctgcagcaggcgaatgtttcactgattttttcgctgagtttcagccatcatgtaaacagctaccctacagtctccacaagatgaagtagatatatcagacttcgagacattttgaaggctcagagggaggaggaggagagaggggaagaccgttgaaatccttgctcccttattgctgtgagtgctgactgtgctggctgtgctggaggactagagatcctggttctgtacttgagccagtctgttaaagattttgcggttgtttatgagtgagacacggctagtacgctacctggagcttaggttccatttgcagcaattgttatctccaaccccgatatcgtggcggttccggtatgcagatagtatacaatggtttttctctgtaattatgctgagatacgtaattgagtggctgtccttgacgtgtcggtagggtccatttatcactcaagtttgctaggcttcgcactgtgctaagagacttgggtcgtataggaggtccaagaattgggctcactgggttattcgccgtgcggatgcgtatagtcattactggtgactgtaggtttagatctatgtgctggatgtaggagctgctatggactaagcctgtatagcaaaccctaatatgaaagaagcaaggttccctccctaaatgttttctctgaacttgtccggctattcggcaccagccggggccagtagaggtattgtctgaaacccagtcttccgttggccagttgatagcgttgctaaatttctgatactcgacgtacagcatccgcaaatatgcccctaggggtcgcaaatgtacgcgggacgtaaatcggccacattttggaatcaggccgaagcgtttaagcgattttcaaccaaatcatggtggatattctccatccccgtgaaaggacagactcgtgccatttgtatacagtggtattgattggtggtaagaagatggccaaggcagcacgtctgttggttctttcagggcttgccagactatatcagacccatagagtgcaatacatttggactagacggatatggtgaaaacgggacgcttctgcggcgacggattagaactacataccctgctggggttagtttctacaaggtagcctgcaagtctatcgtggattcgaattcggcgaagggcagataaaccgtcatggtgctatagagtgtataccaataggccgtactcactgccaatacactgggaacaccatggagttaattcaaagcgcagtacgaaagctaccataataccaatgataggatgacgatgatcagtacgaacagaccaaggaatggccccaatcctgattgcggatcctgattcttcactctgaataaacaggctacgggagcctggtcttgaatcgcccaccattgccacagtgctaaccccgagtcatcggtaatgggttgttcgcgacagcaaccaccctgaaaccaggcccgattacctactgatggctcgatagcactgtggcgttccatggacaactagattccgtctctggccgctaggtaaactgattgatcttggatttttgaggggatcaagcggcgaataaactcctccaggctaactctcttgctcgaccaaaatcgaatctgaatttgatctataatcctattcggaacttgtgaccgaaaggaattggcgactggacccatccctagatgtccagtttgacgagtcgggtgctatagatctctgctggttaaacgagatacgttaatttgtactttagagaggattccaccggaccgtgatctcaacaatagagacctcatcatcgatttactattggtttcgcggggaaaggcgaacgagggggtccaacggtcgatattacctcatgctagacgtgttcgcgatcggaatgagatagatgaagcgttcttgtcgacctgttctttatggcgtcacggttgtaacatattgtgacgggtcaacacgttcatgaaatccgttggctagatcaatggccgtctggttatatcaatgctttgacctgtcaattccttcagcttgctcagttcgggcgaaagtaactatagagctgctgtgctttgccccgcgctttcatctgaagttctgaacccttctgtccagtgccaagctcaaaatgtttcacctcgacctcaaaaatgatcaggatcatgatcgcggagatggttggcttctgattggaacgtgtgccgtacgcctccgacctgcatatgtaaagatccacctggattattagccgcactgatcgttatgtccctacaaagtcgctaataagacatttggtttttcaccacatgacaccagatagtgtaaagtgctatagcgaacgagtcattgccgacgacgtgtttagccccttgccaacttagttgtttttcttcaggatagcgctattagtatttggacagagtcggataggtcaatgacccccttgattcttgatcagtcaagttgagtccacaaactatgacagctgtggatctgaccgggccgcagaccagcggcaccggcagccatccaagaatactttgcagtatccgcttcggagactgagtcttgaaatgaggtaagacccaaaatcatgaaggctggacaagtcgagtcacccagcggactcggagattccgtccgggtctcttagtcctgtcaatccctgctcgaaggtggtttcacgactgtctcacatggcgaccacgatgcgaactttgtgcttgttgacgactcgacgagtgaacacggtaaaagttggtggcactgacctggacctgtcctgtcaccataactttagcggctgcataactgttcattgttcgcttaggggcgatgtacggcaaggggccagccctcaggggccgccccagccgaagcttcgggtgaggggctagcgtaacggctcaacggcggcccattttgcagttaggcgcagcgaattcagatcttaacggtcacgacaataaaagagatgatattattgacgacaatccggttaagcagatctatttcggaattgatgtttcaaccgccacgttgacatattcgctcgcaccgcagcaatcatttcgagctttgggtatcggggcggctcggtgcagacagcagcaataagccgggatgacgatcag

SEQ ID NO: 4959 - DNA, 5534 bp, Emericella nidulans
gaccgtcaaggtattcaagaagcccgtcgtgggtgttttgagtactggcgacgagctcgtagacacgacgatccccggtctcttcagggagggcagattcgagactcaaatcggccctcgatcctatcttgcctgaaatcatgggggattcccgccgttgatctaggtattgcccgcgatacgcctgcgggcgagctggaacaaagcctacgggatgctcttcgtggagtcggaaagtccaacaccagcgtcgatgtaatcatcactacaggcggtgtttctatgggggagctcgatctgctaaagcccaccattgaacgctctctcggcgggactatccacttcggtcgtgtctccatgaaaccaggaaagccgaccacttttgccaccgttccgttcaagccaacgtcctctgcagcaggccaacaagaacgcagctctcgactgatcttctctctccctggcaacccagcctcagcactggtcactttgaatctctttgtcctcccctcattacacaagctcatcggcctcggccagaagcaggctgcattaggcatcgcgccggcgcttggactaccccttgtagcagtaacattgtcacatgctttcccgcttgaccctaaacgcacggagtaccatcgggctattgttacagcgtctcccaaagatggacggctctatgccacaagtacaggggcagagggcgtaggacagcgtagttcccgggtcggtagtctagccagtgctaattctctcctggtgcttcagcctgggaagggctcgattgcgcaagggagtctggtcgaggcactgatgatggggcctattgtacgtgaaggtgctgcggttgcactatgacaggagcgctcagcgtggcaccaaatagaacactacctgctcgtgagtacgaatccagccttgaggggaatatagactacttgatttgctgcctaaccctccaaagacttattcgcgtactccttgtaaatttttttccagcagttacaagcggtccttctctggccccccaggtgcctggatagtgtttggactcacaacctgcggattgaatgctgacggcatagatatcattgaggagtcgctcttgacttcaaggagaggaaactgagttccggtctactgtttttcattatcagccatggccagttaatgattgagtattgctacggcttcttctttcgaacgcgatcaactcgcatttagtcgccgcgacgtttgctgctaccgaatgactaccttgttcttcctgctactgtgccctttagcagggcgagtagtcatagatactatccagatcctttggaataaccccagcatcaaccgcatctataaaattagccatgcacttccaaagacgaatgaactcacctttatacgaccacctgtagtcccccagctgcgccttccacgaccagaacacccagccctcctgcttttcatacgcaatcgcctgcgccgcaaaccacctcgcgtaaaagtccgtgttggacgatggctcccagtctgcagtgtgctcgacattgtcaggaacgctgagactccactcgcccacgatggtcggccagttgccgccacggtcgtcgacacaggaggcgctgatatagctttccttatccacggcgacgctggagtcccacttcacatagcggtggtcgtcgtacgcggcgaagtaattgtctgtcagggattgggtcggatcgccagagccccatttctcgttcatcatttggatgtgcaggtagttgttgctggtgatgccaagggatgactcagtgttgcggatgcgcttggagacgttagtatactttcgcttgaccggttgggaatgagaagacagatggtcttacagtgaacgcgcttgggtagtagctgttgatcatggaggaggcctggtctgcgttctggacaggctcgttgactatctcaagcatgccgacgttgcggaacttgttattttggtggatgcttgtcgtcatccactcgaggaactccagcgcccggtcgtactggtagtcctggtagaagccagggttaggggcatactgcatgcatatttaataagccactctgcaccaatgtccagtaggagactgccactcacctgtcccgtaaatggctgcttaggctgctgcgctccaggagccccatgcagatctatgatgatatacatgcccgcatcacttgcccacccgcaaacgtcctcaagataccctatccctccttttgggaagtgttccgagtccgcgtagacaagatcctctttgagccagtaccctaccgggatgcggattgtgttgagcccgtactgtaccatctggttgatatcgtcctgcgtgatccaggacccccagtggtccgcaaaggcctggtcggcagtctcctgcccgagagccatcacgcagtcgaactcggaccgttgcccactgcagcccatattgctccatgccatgctggccatccacggctcgatgacaaagtggctgccaaggttgacgccgcggatctttttcgaggccgggagccagcgtttgctggaggcagatgtcacattgaagatgtttgtgcctgcggcggagtaaatgtctttgtcgatgcccgggagccaggcgagggctacagggagagaagtgaagagggggaggatgaacttcatattgcaaacaaaaacactctgatagagagcccggaaacggattacttactcggtctcagagcccgatccgatccttcagtaaggactgtggggtagttacctgaaggccatgattttatacttgtaagccatcgtagaagctgaaacaagggaccaacgcacagccacccctaagccggcactcagtcctgcaatttggggccgatcgacagcccagaacgcgccgacgaaacctcatacggaagcaagcctgaaacaagcaaagaccgtttctccgagcttccgctagcgcaagatattgtgtcgtgattggctgtaatgcatcttcgaacttgatcgagcggagtatgccgctcgaggttgtgccctcagtctggctgagatcgactagggctctggcctcaatcgcataatgtgaggctactttaactagcagatgacccttaaatgaaaaaactgtcttcaagtgaggtattgttgaaagtaaggcatctgtttctctaaaagaggcctacctactaggtacctaacgagcctatctaggcacctaggatcgactagatattgatagctcgtagagttcctacctagaccagataatcaatccctaaaaccttgatatttcggtatctccatatcaagcgtacgggttacagatttcggtggccaacagcaattataaaagattttagtcttgctttattccagtttgttttgcagttaccagctaaaaggtcggactcgctaatacgagctgaaacgcctcacattaaccaagatattgataaaactgccaggccgtggcagtttaataggcctcggcaaaacgagaaagtagcagccggagttttaagaatgacctccatccagaaaggtgagcaaaaatgcccatacggggggagtcttctgtacaggagggaatctctcgacagatataaagttaggatccatacgaaaaaacaaagatcttataaaaggtcgctctctcagagctcctgatatctgggcaagacccagaccgcggtctgtggcagtttcagctctgggagaatgagcctctgctcattagaaaacctagtagtgcattcttgcccctaaccatgtatgacgctgtccagcgaacgtacagtgagtatgcagcaaaagggaacggcagccgcctgttgccaagatagccacaactgtatttcaaaaaaaggaaagctttgacagtgccaaggtgggaagattggtatgaaaacgtcaaggcccgtgataggatatgatggttatctcaccaatgattagcttgttggtctggttcaatcgactgcggcttggtgaagttcaaccctttacatgaggccctccctggatcttgataggtatgagattctcccaacctaatcaaagtggctggttacggccggtcgaggttgtgatatagaagtcgaggtctggtcgaaagttgctgaataacttgtctatatatatggtatggtaaattataaattggtatagaggttgtagatatgggacgatatatggttggtttggctatctagactttcactggaccgattccagtctgatggtccgcaataccagtgcatccgtcaggaataccacaatactgttcaattgttcagtcgaatccaataagaaggtcatgcccgggattccgcaagttagagatccggcgtcgaacgggtatgatcggcaaacatatgcctcggtctcggctacgacccggccagcactttactgttcatactcttgccactttgagtacatgcatccgtggcccggccctatgccgtcctaaggctgatttctttctgccttgatcctgagatcggtatcagtatatctcggtctggtctagtcaactcctgagccgaaagtcaatgacgcggtggccagccctagacgatcatgccattcgtccggcatggtgtccatttactccaactgtcgtcattcatagataggacattatagccggtatctcttcaaccatgattgcacaatcttttgactttcagtctgatgctcttttctattaatcgggaaaaggcggggaagaccttacctggccattccctggaactaccagtcagtctggggatctagggtctatcccactttgcgtgggggtggaggaaacttcgtgggggcacatgctggggaaatagagagacatcgtgggggtgcataggcgaaacttgtaaaaaccctagtttagatattccagcatttatagcaacgacgctcccaccactgcccacctcgcacagaacctggttaagcccttgaaaaacagagaaacaagaacaatcaatggctgctccccaggccaaaccggctactagccatgtcgagggcccagaggccctcgacctggacccaaaggccgtcactacagacctcatccacacggtgcgcgtccctttaacagaggatgacaataaggccatccgccgcaagacggacaagcgcatcctcaccatcctgatctgggtctactttctccagatccttgacaagaccgtgctcggctacggcgccacatttggcctcaagcaagacgcacatttgaccggcaaccagtactccctagtcggctctatcgcccctatcgcccagttggcctggcagcccttctcgtcgttcctgatcgtgaaagtgccccatcgtatcttgatgcctgctctggtctttggttggggcgttgcgcaggcgtgcatggctgcctgccacagcttcggcgggctgatggcgacccggttcctgctcggcctgttcgaggccggatgcctgccgctgttcagtatcatcacgagccgctggtaccgtcgtgctgagcaaccgcttcgag

SEQ ID NO: 4960 - DNA, 5080 bp, Emericella nidulans
tgcttcggaggcgttagccgcggatacataaggagtcagtagccggtcagcaacaggttgtcgggtcttagagaggcttcggttcaggagagaataattgtccctgagaatatgcctaccatgcagcttacttgggcttggggattccgcccaccggcgtaatagtggatcctatacagtggtcaaactttgctcaaactggccgttgtaaaagactactcctgaagctgatcatcacaaccggcgtatactgttgggagcccggagcccgacttcgcccagtcgggaaccctagcgaagccagtctcgggttgaaccacaccgagagatacaggatatcattggcaaggatatcattggcaggagtactttgagaatgcttttcatgacaggcactagcagtcaatagactcgcttagttcgacgccagtgagacccatagaccgccaaccccagagcgcactagccgggcataagggaatcggcaaactgcttctggcccagtcgctcggactcagacacattcaattccctagttcaaggttacgcgtctgtatgtccgagttggaggagctagctctcctcctgcggcagggtttggacaggagcggactcaaactccatctctagccagtggataccaggacccatgctggatgcttagaatgggtctcccccacacggagaccccgactcttccccagatttgtcgttgttgtcgtaatagttaggtcagggtgcagaactgaattaatctggggctacggaagaccaccaatctgggagtgcgcgtgcagatcaaggattgctagtttgtttggcgagttccgctaggatttagggcgttcgtttaatatctttagtctcgggtacgagtaccattgccgtgtaaaactgaggaatctgacttgttaagatgaacagatccctccgtatcccgtataaaagcctgatgtgcccgggggtatatcatcatgcgtaccccgcctctagccaggccacaaagactaagagtttgacgcctaatcagttgacatattttatttactcaccatgcaagctttgcagagcgccggttgcgaactagaatgcatggataaatcgttagatagggttcggagagcctgtgatcgatgcaatacttcccggacgcgttgcagcggcgacctgccctggtaagccacttttccaatcagctgaacccgaggatgagaatggtctgacgatggttgttccgtgggaagtcggcgctgcgatagtatgtacaccatttcggctggatctcttcgcttctgacagagacagaactcaactacgcctgccagtatgagcgtgccgtcaagaaacgcggtccaaaacccaggtcccagtcgagcacccaccaagccaggcgcacggccaacgctggtatacgagtaaggacctacccttcgccggtatcgacagcttctggtaaaagtctgcctggtagtgatagaggatcaccatgcgcgaagtcagaacgggttgaaaatgggagctgtccgaatacgccagtgagggctgacgggctctacttcagcgctaacgtccaggatgatcacttgtacctggacaaggcgacgaccgagggttcagtaacgagtatccctaaccgcactcactttcctctgaatttatcgtctgttgcgatgtcgagtcacaagatctacagtactcccagttgccgctatccatgtctaaacccggtgcttccgctcctgcagggaacaatgacagcagaagatgcatgcaaactccttgacatatactttgcggatccagagacgggaggttcaatttctggctgtccgtacgtgctttcaccaatcattcgagtgcagtcgctcctgcgggagacaaacccgcgcccggtttcacctgctctcctgatgataatcctttggtgcgcctctcatacggcccatctgggcatcttttcagattcgagtacacgtctacgggtcacgcaacgtttgtattttctctcgatgaagcttctgcgggccagagactgcgagacctggcatcaagcagctggtaagtctccagcttgccgtataacttcctcctctcagaaacagccccaagatggatatggctgaccgttcctccggtaggcgagtgcgtaccactgtctgatatgcccttatatggcacgagcgtcgacactggtccctctgctgtttgtgacgggaaggtcgagcaaggtgtggatgacgtgctgagctacgtcctgttaacatgcgtagtctcagtcaccgagttcaaagacgaggctctaacatggtggaacaaagctgtgcgcctggtgaagaggctggggttccattccgaagcacgaatagcggagaatacaccttcctggcagcagatgtccttgactgcgcgcgaggaacaggaagaacgaaggagggctttttggctggtttattctctcgatcgacacctagccctgtcctataacgaaccactgcacatacttgatcgggagtgtcaggtgctatgtccattgcctgaacgagtctggcaaaatcttgacaagataccgttggaggatatcccaccacgcgtctttgggcctccgacttgtataacaggcaccactttcttcgaatacttctccgacaagctcagtcgcagaaaacaataccgaatggtggcttggaagcgtggctgagtgtcgttggggttttctgtgttttcgttaattcctggtaggtatgtcacgacgtctagcaatcgtgcacgcaatctaacagcggctcaggggcttgatcagtacatatggcgccttccaagagttctaccaaacggtacttctccccgatcaatccccctcctccatttcctgggtaggaagcctccaagccacgctcgtggtcatggttggagttgtatctggaccattggtcgatcttgggtaccttcgccctctcattatctcggggagcttccttgttgtatttggcatgatgatgactagtctggctacccaatactatcaagtgatccttgcccagggattttgtgtcggcattggtggcggcattgcatacattccagcactggtcgtgatttcgatgtatttcactacgaagcgtccgattgccattggctgtgcatcaatcggatccagcgtaggcagtgtggttttcccaatcatgtttcgccagctccagccgaagatcggcttcccgtggacggttcgctgcatcgctttcatcaatatgttcctcgctgtcattacctgcacgatgctatgccgccgcccgggcgaaaaggtcggagcccgcagcctgatcgactggaaagctctcaaagatatcccgtttatgttgctatcggtatcgatgttgctcgtcatgctcggctattggatcccgctattctacgtcccgtcttacgcccgaactgtgctgaatacaacaaccagcctttctttctacgtggtatccattattaacggcgcgtcggcgttcggacgaaccgttccatatttattgggatcgcgagtgaaacccattggcattctcattagctgcgtggcgggttcggcaattgccatgttcacatggattgcggcgaccaatatccctggcttcatcgtttggtcttgctactggggtttcttgacgggggtgctagtgactgcgccaacatcgattgtttcgcatccttccctttgcccggatttgaagatgctcgggactcggatggggatgatgtgggggatcagctcgctcgggtcgttggctgggacacccattgccggagccttagtagatctcactgaagcccaatttctgcgcgctcaggtattcgcaggctgcatgatggtgggcgctgttgttctacaattatggccaacatttgtggtcgttcggcacgatggcaagccggggggtactcagtaatgttctgcaatatgccaggcccctaaaatgtatatttaatcttggcttacatcacagacactaccactacacacccacttccgcctgccttaaccgctcctcctccttgatcttcatctcatgaaacctcttcaggcgcgccggtacaatcctctccctctccgtcgtaatcttccaccccttcaatcggtccttacctagagccaaaagcgtctttttctcgaccaggctatacttgctcggatcgtctcggtcaaaattgaagggctccttcagagcaaccggtgggtttgtgatgatgcgcggagtccggaggatgttccgcgacgcagagtgtaacatcagtgggtgcattaggactacatcgcctgtttttcccgtcatctcgcggaagtccgtgcatttctggaccaagtttgtgtaaaaggataggccaggttcagcatctgggttttgggattggacttcgcctcgaggaaccatgtacggtgatacgccttcggggtgctcgtactgtttgaatataatagttagacagcagataatgggcagaaaaggacagacaagactacgcaaggccccgtcatgtgtgccctggccgtgcatatgttcaggaggggttgggcacccaccagataccgcgccatcagtggtatagcctcgggacaaatcatagtcgcccctcccattggcgctatatccgaaaacaacggaataacgagcagcgcctgctctggagagtcgaggaaatgccaaaagaaatctccatcaacatgccagttatccagctccttcggatcgggattcttcatcccttcatattccggcaaccccagattcacaatcaaactgtcacgccagctaccaaactcctcagagattcggtcttcccccccacagagctcgcagatcgcggcccacgccttgggcgcaaacgtacgaactgcttcctcccgatggtgtggcatgttaatacgctctgatgtccaggtggatttgtcccgcggcgagtacccaagaccgggaccagacatcttttgggcatgagagggccttttcgcgcgaaagcagttgggatcaccacgtaaccgtgctgaaggaagtggctttctggactctggaaaacctttgggaccccgttccgc

SEQ ID NO: 4961 - DNA, 11234 bp, Emericella nidulans
aaagtgaaatacgcgatacttaggtctgatggtgtctaccaaactaccttatattagccagtgactaaagaggactatgattgatggactatgatcgtgagatgatccagctgtcacaccagagtacaataatgcagggtctctggatctctatgccaatttacccagccccatcggaaaatttccccttccgttgatcgaaggtcagcacattacaggactctcaagaaatatggagtcttcatttgaaagaaaagaattagctagttagcgctctgctgacttttatcaattgtctccggatcttccactgcctaatcacctccccaaccgcagcttgggaacccgtcaagcctcctgtttgatatacgggattcccgtcaatttgaacgtcatctcgttcaaaataggttcctgaactggtctctctcggctcttgggacaaggcttcccattgcgcatagcgacattcgttccaacgtgcactgcattcggccagtgcgtagttcccaaacgagctacatcggttagctgctacttaggcaaacgagcattctataaccatggaaacaaaagttgtaggtgtgtacataccctcaaacgcctttttcttcctcaccagatcctcctggctggcatcggcgactggcatatagcacgtgtataccgcgagcctgtcattcttcccggaaggcggaagattgtagtgcggcacgcggctatcccaaactatcagatcaccaggttctgcgcagaccttgacccattttaggccatggtcggctagccactttatcccattgtccgtgaagccgaaccactctggtgtccacgcggggatacgtggctcattagccatttcactgtgaaactgttcggagattttgtgcccccccgggcagacgatcaggccgccatcgtcggggccgcaggggttgaggttgacaaggccttgaagacctgaatcaataacaactgttagcagcgtctaggtaggcgagggtgccaaggggccgtacagcggaagcccggtttagctgggtcttggtcttgatggggccatggcttgctatgtcgggttagcaaatcgttcttgctgttgtgcatagttatcagcaaggtagcgggcatacttttcaggcatctcctttcggctataacgaagacatgtcagttcatgcgttaatcggtgtgggacagagtgacttcatactttgaaaactggacattaaccacgtcaaacgaaacgatcagatcgtcatcaccatagaccttggcaaaggtatctacgacacttggctcaccgcggatatcccacacccacttctcgtgggtgacgccatatgccaaaatcatgcccttttcattgatgacgggcagggttgacggtttcaccgtcgatgggtcgtcgcggcgatagccgagaccactattgcacactcagtgtccgacgccgagcaaggcagccagaatataggagacgtacaaaccctccaagtagttatagaactcatccgcgtacttggttgcgcggtccaggggaatcgcgctcttgataacggcgtatccgtctcggttcaaggcatcgcggaagtcgccgtagtttgttggcgatccatcgagcgccatacgagcctttggccgagttccagtgacggtcacaacaggactgccttcggctgtggtagtggacatattgacactgtttgttcgctccactgaacgtgggaaggtggacgtaaatgaagctgataaaatgaatgaaccagtttgtacggtattttatctgcccccaagttgctaaactcctctccctgaaatggactgcagtgtcggggctcggttgctcggtagggtagagccaggaaggcttcggctgcccccgaagccgccgaggctaagtagtgaggcccgacgataagcctctcatattcggctccacctgtgatcgcattgatctagatgattgactctgtgacatatccgcatgtacacacaatctgaacactcgggaaatggtcttcaaggtcatcgttgttggcggtggaatagccggcctcgcagcggtagcaaccccttccaagtttgcaagaacaggctaacacagacagtgacaggcaatcgccctccggcagcatgacagggaggtaaccgtactcgagcaatctcccatcagcgaagagattggtgctacgatatctctccagccaaacgcatcaaaaattgttgaaggacaatggggcctggcggcgaagcttaaggagcgcggctccatggttgacgaggctttcaaagtttataatctagatggagaactgcagctgcatatacctctccagacaaaaggaaagtacggcgcggagagggtgatgtatcatcgtgcagatctgcatgaggctttgagagagcgggcaacatcgcatgcattccctggcaaagcggccacagtccgtacttcaagcaaggttgtcaactgtaattgtgaagaaggaactgtagcgctagccagcggagaggtcatctctgcggatctgatcgttggcgcagatggcatcaaaagcgttgttcgcgaatctgtccttggaaagaaagtcattgcgcggcctaccggactctctgcgtacagaatgatgatctcagcagaatccctgcaacgggaggccgactttgctaaagtcattgatccacggaggggatgcacaacaatggtgatcggccgggacaggcgcttgatcatgggtcctgcaaggtgcggcacgatctatggcattgttgctcttgtgccagatgagaatatgaatgaagatccaacaagcacgagctggacaacaaagggagatcacgataagatgatgcagtccttcgcagattttccagactgggcacaaaagcctctcctccttgcaaaatcatccagcctagggctctggcagctccgagacctggatcctttgcatacgtggtatcgtggcagagcgatcttgatcggcgacgcagcccatgcgatgttacctactcaaggccaaggagccagtcaagcgattgaggatgctgaagcgcttggagcgttctttgaggagtttgagaaatcagcctcagccaacgctatggatgctatagccagggtgaacgaagctatattcagatgcaggtatgatcggacgacgacaattcagttgtatagccgccacgctgctaagccagcctcggaacctggaagtcgccgggtgcatatgaaccctgcagagtttatggattataattgtgcttataacggtgcgctggactggcaaagacggcaaggggtcgtattgcattagcctagccagtttatttctcttcaggtcaaaattccatagccatctctccggtcgataccgttgcactccattccccattcatcgcaaaggtcccggatacggtagtcggtgaaaagcccaaaatcgtctcccatgtttcgtagcatctgaagtatgtcacttcgttcttgaggatctgttaagtggcgaccggcgacataaagcggttgtagcatgtacttttgaactctttcgctcggcattgcttgcactatggccatgatctctagtgcatgctttcttagctcctgttgaagcgcattacatgtcgctattaatccattctcgataccatgtggccgaacggctatactgtttgggcggttggcaagaagaatgatccgcgacatatgatagaaagccacagtcatagcacaaatgtcattcgcgaaccatgtctccctcgatatattccccctcgagcaagggtctatactatctccagggttaggcccattaggagtccaggtaataggaatgtagaacgatgacggcacagcaccctgccaacgatcatattcctcactgatcaaagtccactttgtggcattgccaaaatctaaattgaccaggcggcacattaaccttatcagagccttgaaaagaatggtttcaaatagaccgtcatgtcgagtttcgggcagaaggttgccgtatgcatcaaccggaaggcccattttgcaccaaaggacaatgtcgtcgggatctactcgagtcttacgttgcgtaacgactaggtcaactgtcagcgatattgtttccgcatacactaataacatacaggcattcagcatatcatttacgacgaagaaccaaaaggtcgcgtcaagtgccctcgctggctgtgggattgtggcgcagaggtggaaaaatggaggttctggaaagtgaggtttgaacagccgaaagactccgtcgatgtgccctgaccaggctctgattgtagcatttacgtcctcgtattgacataaaatgcaggctgctataatctggaaagacagactctcttcatcgtttccgcatgcgggctggccgttggttgtccccacgccgtatacatgacctggcaatctcgagtacgtccccctgtccctgctagaaagctgttgtgccagtagctggattgccttctcataatatttggccccgtaccaggtaaatccaagtttcgagtcaatcagcgctttcatcatcgacctttggacattggtctgtcggatgtgtgattccgggtgcctagtttgaccaagttgctttgcagccaaggcgcaggccgcgtagcgtactagtgggctcttgtcagatattgcgacgacgttctggctaaagtaagactgatcagtacaaagatccatccattgtccaggaccttcgcaaaagtggcgaagaaagaaagcggtttcgcagcggtcgtggtaagtctctccagcctgggttgtcgcatcctcaggacgcttgctcatgctcgctagtgacactctctccgtctggacacgcttaggtagaggcgggatggtcatcgtttctgcagttagggcacggtcatcctgatatagtggatgtgtgcgcgcctcactcggtttgctgtccacggccttcggtgccacagcgtctttctctacatagcacatcagcaattcgtaagcatacattttatattaatttggtgatcaccattcagcggattagtcttccgggtcaacccttcgtcaacatccttgtcttcagcacgaacagcacgagcatcccgcgatttcggttccggcgacgtctgcgctagaaaggtataggaatgcggtttgaacaagctatcaacaatccgacagacgcgaccagttttaaggcactgcccacattgcggcgtctgttcatcgcacttgatcttccgacttcgacactcgggactgaatatgacgtatcagtcgttagcaacaatatcccgccagatgggggctgagtgccgaccatcctttccgagaccgtgccccccctttggtgcgcgatctgattccagactgatgacaggtcatctaactgcagtttcgtacgattgtaattgcggaaggcgagagggaggagacggtggccgtctaccgttctgcggggaacccgtcggctattatgccgcatcgggcatcgcctgtcttgtctaggagcaatttccccgtaaacatggcgtccttttgctttctcggaagaagcatttcttcagtgtagtcaaatcatttcaggtataatcgtcagccatcactcttcttactctctgggtctctcagctctagagcgacattagctcccttggttttgtagtggcagtttcgccggcaaaatatatatccctaggcattttttagccgggcgacacataatacataatcccacgccgagatgctcaatgaaggtgatagattgctttctgttgcaattacagttgagtttacttccttgagatcatgacagacccgtgacaagtctatgatcagaactcgaacccacgagctgggtcgtgggtcagaacctgtacccaaaacccgcggtgagccgcaagacccatattacatagaatctccacattaggctacatttcctgcatagaaatcgatgatttctgcatggtagatttatacggcatgtttgtactatttgccaacccgcaagtttagacactgtaaccaagcccgacccgtcgtaggtaaaccaacaatatccaaggtctacttgcaaatgtctcttacaaaggtcggcatgataaacttcagcacacaaaaagaactcgatttgaagtagcgctcgcagtacagttaccatgaaacttcaaggagcgactgaagctacgaactgattctgaacactggggccaactctggctctctctacggaggccgtcggatagggcttgattatgcaagtccagatttgcagctgcagactcggaagatgatggtgcaagattatgtcactgcgagagctaatggccttacctggaattgaagtaagcaccatgtgccagaccctgtctaacccaataaaagaagcccctccctggaatcgaacacaattcgcgttacccgttgctcttgaggtagcttggaaggatatgctactaggcatctgtcaagtggcttagggagggagagcgtggttctccttgatggttatattttcatacatccttgacagcctttccccagaaattacatgttcgacagtcattccctctaaattacagtattattgtctattgatacggaaatgtcatgtggccttcatcgcgtacacctggagtatacgctgaggcctggcttacgccacgtgatataagcggcctaatatctgacctctctatgtattgtaccgagagagattgaagaggatatttatcgtcattaagaaagagagaatcaatcgtcatatggcgcccgatccttagtaggctacgttcgtgtagttgatacagcttccttctgccctttcccattgagcgttcacaacatctatgttaattatgcatacaaagaatataagtcttgacggagaggcgagctctaacatgacatgttcggccagggaatgggaggcacgttatgaccgcatcagataagtggactttagggtttgccgacttggcctgacccaaaggcaattttgaatccaaaaggttagtgactcaggtaagctatacaaatccagggtggtaatctcgcagtaatctgatggtacaagtaacttggcctatttattctctgagaactgattggttactaaccacaaaccaatcagagaagctatatactcacagccccattctgacagtgcttacccctcgatgatttctgacatagatggcaacgacatcaacttcctaggcctatatttttttcatccgcgaaacagccgccctatcgtactgttgaattgctcattccttaaagtcttcagatggatcctctgtcatgcgcggccagcgtgactgcagtcattcaactggctggcgctcttgcagacgtctgtggagaatatattaaaaaagtcacgaatgcccaaaaagaaatcaactacctaaatgaagagatcaccagacttatgagaatactagagtcgcttaatggcatgcttcagggacccgacagggaaaaacttgccgcccttcacaagatatctgatgacgttggaacttgcaaggtggttcttgagaatttgggaaagaaggtcaatccagaaaatacgcaaaactccttcagatggcagggatttcaagactggaaatggcccttgcagagccaggaaatagatgatgctattggccagttaaagaggtatacatcactctttgtggcagcattgcagattgatcatgtgtgggttgcagattacatatgctgtttcttttacggaatacttacttctaccttaggggatttactgacccagttgaacaaaattttgacctgcatgacctgaaaatcgtggaagaggccatacatgattcctttgagaacaaaaatgaagagtgtttccctgaaaccagaaccgagttacttcgtcaagttggaaactgggcggaatcatctcacggaaaatgcatatactggctaacaggtgaagctggtactggaaaatcaacaatttctcggacagtagcaaggcaactcaaagaaagaaagttattcgctgccagcttttatttcagacggaatgaagagggcagaaataacatgaaatcgctttttctagcttttgcacagcagctggcgaatgctgtacctgacctgggactagagatcgagagaactgtgaaagatgatccttatatatcaggaaaggcacctgcggaacaattcagaaaactcatacttcaacccctcatgactatggatctagagcccgttatcactttggtggctgtaattgacgcattggatgagtgccgatcagatgctgaaaatgatgatcatgacattagggttcttctgcgccttatacctcaagtccaagaatcagagtctgtacgcctacgattcttcatgaccagccgacctgagctgccagtccgccttggctttaaagctgttgaaaacagccttcagaacatggatcttcacagcatcccttcatcagaaacaactcgtgatgtttccatttttctggagcattccctcacccaaattcgagggactcatggtcttcctgcagattggcctggtgaagaggctataaatgaccttcttgcaaggacgctgccactttttatctctgctgctactatgtgtcgcttcattagcagcacctatgacccccaggaccgcctccagaaagttctgaatgacaaaaccagctatgtgtcagaaatggctcgaacatacttaccagtgcttaatcaagttctagctggtcaaaatgagtgggaggctgcgcgattaaatcagagtttcaaggacatagtaggcccgttgatcgcccttgctactccactcccagtcaacgcgctctcgcagcttcttgccttgaaatcaagcatcacatccaaccatgtcaaaagtttgttgaactgccttcattctgtattaattatacccgataacccagaattgcctgtgcgaccccgacatctatcgtttcgggattttcttttcgacagcacaaccaaggataacaagcagagcgagaagttctggatagatgaaaaggcgatccaccagaagcttagtgatcagtgcctcagggttatggagagcaagttgaaaaagaatatttgcatgttatccgatgatacactgcagcgaagtgagatcgattctaactcggttaatgagcatctgccagtagagttacaatatgcgtgccggtactggactcagcacatgatgcaaagctggaacccagctggggctgttgaaaaagcgtgttcattcctaaagaaatactttcttcattggatggaagtgatgagtatcctgggcgttatgcccgaggttattagagcgatatgtagattacaatccggcattcaagtaagtaattcgcaggtaattacagccctcactaataagaagatcaggacgataaagactccgaactgtcaaaattcctctatgatgctaggcggtttgtcctcaacaatcgacatttagcagagactgcaccccttcaactttactcatcaggcctgatgttttctcctgaaggctcaatcactaggagaatattcaactataatctatcaggctggtcccagttacctaaggtcgaacagacctggagtgcagagcagcagactcttgaaaaccatttgggaccggttgagtcggtggtattctcaccggatggcaagcaactagtgtccggctcttatgatgacaccgtcaagatctgggaccctgccacgggcgagctgctgcagaacaaggatggccattctggaacagtcgagtcattggccttctcaccagatggcaagctactagcatccggctcctatgacaacaccatcgatctctgggactctcccacaggcgagctactgcagacttttgaaggccatcctcattcaatttggtcagtggccttcgcaccagacggcaaggaactagcatccgcctccgatgacagcaccatcaagatctgggaccttgctacgggcgagctgcaacagacccttgacagccattctcaatcagttcggtcagtggcattctcgccagatggcaagctattggcatccagctcccttgacagcaccatcaaagtctggaaccccgcaacgggcgagctgcagcagagccttgaaggccgatccggttgggttaaatcggtggccttttcaccagatggcaagaaattagcatctggctctgagaaaaacaccgtcaaactctggaaccctgccacgggcgagctgctgcagactcttgaaggtcattctcagtcagtgcggtcagtggccttctcaccagatggcaagcaactagcatccagctctagtgacaccaccatcaagctctggaactccaccacgggcgagctgcagcagacctttaaaggccatgatctttggattcgggcagtagcattctcaccagatggcaagcatctagtatccggctctgacgataacaccataaagctctgggaccttgctacgagcgagctgcagcaaagccttgaggaccattctcgcagtgttcatgcagtagccttctcaccagatgacaagcaactggcatccagctcacttgacagcaccatcaagctgtgggactccgccacgggcgagctgcagcggactcttgaaggccattcccaaggagttcggtcagtgaccttctcaccggatggcaagttactagcatccaactcttatgacggcaccatcaaactctggaaccccttaacgggcgagctgcagcagactcttacgggccgatctgattgggttgactcggtggcatttccccagatggaaagcaactagcatctggctattatgacagcaccatcaagctctgggattccgccacaggcgagctgttgcagacccttgaaggccattctgaccgtattcaatcggtggtattctcaccagatggcaagctactagcctccggctcctacgaacaaaccggccaggttttgggatcccgccacgggcgagctgctgcagatcttcgaaggccattctaaatgggttgagtcggtggccttctcaccagatggcaagctactagcatccagctcttatggcgaaactataaagctttgggaccctgtcacaggtgagctgctgcagacccttaatgaccctgatgaatcagctgggtcagttgccttctcgccggacggaaatcgactagcatccgtcgatattttcgacaccaa

SEQ ID NO: 4962 - DNA, 4994 bp, Emericella nidulans
gactaacgactgacgttgcaaatgtgaccaccagctagagccagccgatgattttttcgtaaacccattttttccatgggggaaggttctgcggattgagcgggtcgtcggggccgctgaacacgaccaggtttgggtctggcgcctctttttctatagtggtggctatattgttggtggtgctgccactgctattgctgcctctggtaccgatatcgccgctgctgctcttagacgtctcggtcgtgggggtggttggcgtcacaagctccattgtgctgttgctatgcagcgcccgtcggtggtaggcactttctgcctcaggcatggcagaagggagatcgggctcagacatgctggttacaggccggcctacaatatacagcatgcagactgctataagccgggttgcgtaccgaaagcgaatgactggcagctgaggggcagatacgacttgattatgggcgggtgtttatttcgaaagagtagagaaaagcgttgctgggagtgagtgcatccaggtatgggacggcggcggagataaccgtcggcctaaagagggatgaaaaatgaggatcaggacgaggaccgagaaccagggactagaaacggacctcgatacgctagtgtcgatcttatgcagagcctcgattgacatcgcccgtaagctgacgcgtttttataggttgctctttggcccggctagagcgtaatccggtcggagtccggcttaaagtccggttagggctatatcaggcgtagcagtctcccagtgtctctcccaacgcagataaacgcagggtaaacttccacctcacctcgacttgctaatctccctctacagctagttatattttttttttttttttcgaaatgtcgctcgccggaaaagtcgctctcatcactggtgcctcgaaaggcatcggcagagcgacagcgcagcgcctggctagcgaaggcgccagcctggttatcaactacaacaccgacgccgcctctgcccaggcgctcgtggacgaaatcggccaggaccgcgctctcgcggtgcaggcagatgcctcgaaactggcagacattgatcgcctggtggacgcggccgtggccaagttcggcaagatcgacatcctcatccccaatgccggtatcctgcctatgcgcgatctggagcacaccaccgaggaggactttgactttacctataatctgatggtcaagggaccatactttctcgcccaggtgggttcatgatttgcttattcttgttcattccaatcttgttctattttatgctgcttttgttctatttttactcctttcattgtggtccacgagttggttgtattctttatgttatttggatatcctggctcgtgtctaacaggcacagaaagcagcaaaacacatccccgctggtggacgcatcatcctcgtctcgaccggtgtgaccgtgctctccaacattgccccagcatatctcctctacgcctccgccaaagcagccgtcgagcagatggcccgcgtgatggccaaggacctcgcacgcaatgggatcctcgtcaattgcgtcgcaccaggccctacgactacagggctcttcctgaacggcaagtcagaccagatgctcaagatggtcgcgggattcagcccgttcaaccgcatcggtgagccggaagagattgcaaatgcggtatacttcctctgtagtaaagacagcagctgggtttcgggacagaccctcagggtcaacgggggaatggcatagaggacgctggtcttttggcccgcttatgattagcaagaatttcatttccaaaatttcctcccaagtttccttccaattgaaagcctcgattgaaaacctcctactaaaaactccaattaaaatcctcacagctgaagatatacaaatattccggctgttcatcttcgtactctgacccctaggattcaccgtacgacgcatgggtactctgtactcgatgggtcgtatccgggtccgctcgaccattggctaagtccagggacccctttggtagcgcaagagcatccacataataaatggtccaaggccaggaccggtgtgttgcattggtaccgagtcagcttcctgttttctaaaagagaatattatcatggcaatccttgtacgcctcttcttcgccctctttgtcgtctccgtctacttcttccgcgtacgcctgcgcctgagccacatccctggcccgttcctcgcttctctgacaaacattaaccgtcgacaatgggtgacgactggtagagcccacacgattcacaccgagttgcatcgccagtatggcaaggtcgtgcgcgctggcccaaataccgtctttgtatccgacccggctgctataccagccatctatcggttcaacgagccataccagaaggttttcttccttacacatattacctttcgacgcaaatcaaacaggaggctggtgctaatattcatttatcattgttctcgatgcagtccgagttctacgacgctctgatgccctatgttcgcggcaagagcatccccgacgtcttcgccaccagagacgagcatatccatcggacaatgaagcaacccattgcagccatctactccatgtcaaacctcgtctcgtttgagccgtatgtcaaatcaacgatcgagtatttcttctcgcggcttgacagtcttttcgtcgagactggcaaggtctgtaatttcggcctctggctgcatcttttcgcgtcggatgtgatgggcgagatcacattctccagacgactcggtttcctggagaccgggggcgatatggagaacgtcatggcgaacaactggaaattcttcgttcaggccgctccggtacgcccgataagtctcttgatcattttgtatcggagggaacgctgactgaaggctgtggtgtcctaggcgacgcagatgccctggctcgactacttctggaaacggaaccccctgcttccaggcagtgtcaaaccgaacaaggtcattgagtttggcgtcgcacggattcaagaacgacttcacttgtcggaaaagcatccagatcatgtgaacagcagggattttctctcgcggttcattgcagccaaggagaagaacagccagatcgggccggagtaagttctaacttcttccctactgaccactgaagtataataaaagcaaaaatgcaagattatattgaaacgtctggcagtgctatcatgacctgggccaactccaacatccaagccgggagcgacacaaccgccattctcctcagcgcactcttttatcacctcctcaagaacccaacgagtctggcggcactgtgcactgagatcgacgccgccgccaagaggggctgtttatcctccattctgacgtggaaagaaacgcgcgatctgccgtacctcgatgcctgcgtgaaagaagcggccagactacacccacccatcagtctccccctcgagcgagttatcccggaatccgggactgtaatcggcggattcaagatccctggtgggacgagggtcgcgatgaatccgtgggctgtgcatcgtgaccgtgacgtattcggtgcagacgcagatacctggagaccagaacgatggctagagggggaggagaaggccaagacgctgtacaactcgttgctgacggttagtctttcaactcggtcgaggaatagtcactaagaggtctttgctatagttcggcggaggccaccgctcctgcctagggaagaacatctcctaccttgaaatttacaagctggtgccgtcgatattgctgcgctatgaggtaagaattcctagccattatctataaagatctagtagtgacggctgcagattggactggctgagccggagaaggagtggcacttggagaaccggtggtttgtgatgccttcaaggttctacgttaggctgaaggcaagaaacggggtgactaaactatgagaaagggagggctgatctgtaggtcgggggtggggtgaaatagaatagatcagagggtgtctgctatatttcagtgggtgtatatggctattcaatcgatttcggcgctcgtcattatagaaatgtctcaacaatattggtttgacattatgaataggttgatgaagtagtctgagaagccttttgggctcgctgaacttcagaggtagttgcactaatgcaccatctggttctactatagggtttgattttgtctcggcctcgaccatgagcataggagggttcaccttttcaggccctagaacgctatactcgttgtactttgttggccgctctgttgttctttaacatgatgagttttggagctgctggacgaagctgggtacgattcggctggtgagccggttcttgggagtacatgttcctccccaagatcttacctttacccggccatacgacggcaagaaaggtatccatgtgatccatccattatctttaccgagagactccatggaaaataccacattgcggcactgtgtggttattttcactgtatggatgattggcctacgttagggctagcataagtaaagctaaaaaccaacaatcttccaccggttgcgaacacatagcattccacgtggcacgcatgtcttgatctctgaatttaacaggggcaatcctgataatcaaacaagcgccccagacacacactgtcgtcagcagtcaaatccaagaacatccgaatatgctcaaaattcagcgcacatttctcttcctgagccaggagatgcgcagtgcggacgacattcttagtctgcctgtagttcagcttcaactttgccagctggtcgagctcttcgtcggagaatcgtgcggtgttgggcctgctgaggacttggctccagatctggcggcgggagacttcattgagctcgggtattggatatgtgaatacgcgattcaaacgctgggttcatctgctcggctcgattcgtggttaggaataagatcactggtaaagttagtgc

SEQ ID NO: 4963 - DNA, 6958 bp, Emericella nidulans
ccggggcttgtctcgaatcggcccgggggagggcgttgcaagaagcctctgcttgaacagtgcaccaaaggttaatagaacagcgtcggagtgtgcggaactgatccaagaatccgatcaaacttggactatctcctggctgacgcgatttcagtgcctagatgaaatggtctaggcgtgggattctggcgttcggtctgggacggacatcagaaaaaaaaacaataaaaacacagcaaaagaaagcaagttgaatatggatatagcgggataaatgagaagcaaagaaagaaaaaggaagatcgccacagcctggctgggatgaccggggcgatggagatgaggtgggaaaaagaaggagagagagagagagagtttaaggttgagggcgaggggaggaattccaatcgtgagagttacctgctgtcacccagattctcagtcacggacggaacgcttggtcgagtccactgtcccgcaaccgcacccgagttattataaggattaaaatattattagtatccttatggataggtcgtttgaggcgaaacaaggacgcccaggaacggatagtgatttcagcctgcagccagcgaagatccaagcaagcgaagtaggcgaataaaaggggtcgaacgaggttatccagtgagtcgtgacccgtcactagtcgcgttttctgtttggtttgtgggttcaagcttgggttgtgtggatcgatttctgtctgcgctgctgtcttccactcgggaggcgtatacggaggcagtgacttgaggtctgctcgccgtcgaggtccaggtcaaggtcggtccaggtcgcggattgagagtgcgtgcggtagtgcggtatgtagtattgtgaagaaacaaggggcttgtgagcgagcaagaatgtgattatccagggataatgatgatatctttgaagactcgggagtttcacaacattcaacatgaacggccgcgagcgccgcaggtggtctatatactgcctggacagaggtacttctggcacgagcgtgcctgtaaatcattctattttctgcctagaacaaaacccccctattcttcctaggttttgggtctcctgggacggaaatgacctcgacttgacggcatccactcgctgattgctgggtgtcatgttaatgacttttccggcggttgtcttgcaggtctcttgggtagtagtaatctaattgtacactgtacgtggtaccgtgacttgtgcgagttggaactcttgcgtcctcacggtacatgcccgacccaacctcaaacctcagcctactcagatgagatccgatgccatcttccccaacccgcgccatggcctcgatcttagcctctgttggtcctcgatgactcgttagcacctctcgttctcattttccggtgctattttagcaacctccttttgcgagtgcgtgatggggcggtgctagttccttcctcagggggggggctctatctttgccactccttgactgctctggagcctttcatttctccgtaggcactcaactcattatctactttggctgagactccgaccagcgccgcctcctgattcaggttcttgttcaaggcgcccctgcaaacgcctgcttgccggaccggccctcgcgggaggttccatctatcaattcccaagtttcaactttccagcagagtgagcgcttcgaggaattcccagagactgtcggggatccgcaggtgggggtatgatgttccagattgacttcttcttctccctgaaaaggagctcatacccacccgagctccatgctcttctcttcgaaccccgttttcccgaatagcttatttgcattaccgctagcagcctacggagcccgtcggcgacctctgccagtcataataatattatttacggagtttcggagcataccaatcaagagtcgagtcggatgccttgttttggctccgtcaggtctcttcctacggaaatgagatctgccccttgggacaaaccaaggccctccttacttccgtagccgcagtcatcaagatggaggcgctcgttgctgcagcacgccaaactggagaattgccgtctctccttctgttctattcgagacaggcccaaatcttgtctgctgacctcgggcccgagaatgcaagtcgtctccaaatgttgcacatcaacttcatcagtacagctgtatggctctgacaaccccttttcaaactacagaggatttcccaccttgatggccactcttccaaccaatagactctccgtcaccatcaaaggccctcagattcagtgcttcgaaaatgagctcatcactttatcagattcgctaccgcatgcgctctttcctagtctggtaatagcctctacggaatccagtgacagtcatgcagatgttcaatatgctggcactgcccgccgagacccacgccgttcaagcctaacgctcaagctagaacccgctagattgtcaccagaatccgctgatggagtcgtccgcgttccgactatttgtcgctggcgggtcagtcgagggctcgaggcgaatgaaggtctcaatatggagcagtgcatattgtgcaattacatggaatggagagcttctgttttccaaaccgggcagagacgtctgtcatctgcagggctgcacagcgcagtgcgagttctgaaaagatggtagactaggagacaacgaactgccaacctcgggttccaggcttcgagtccaagttagcccctgtgcgtcgactagatcgcccaattctcccgaatagaggactggcagctgagggtccattggttacccatcaatcaaattagaatatcggaatcccgggccatcccatccgcatggttcctggatttcggaacatgggtagtctgaagatccccagccttgacggcacactgccacaatgataactaatgacctagtctactcctgtcttgatgtagtccactcttactcatactccacgagaaaggggtagtggaacgtctaacggcattaccaaggataattttcggagtcatttctcttagtccgattttcgcagagctggtgacctatactccgtactttctttccgcaagacttcaacgcggcatctatatgacgaatctaagacggattctgtacctgtttttagaccgtgtccggtggacttggatatttttggagatgtagaaaccccatacacataatactactttggaaacacacgctccaacccattaccggaattatccaccaccgatttcttgagaactattagtactcagaaattaacagatacgcaagcgctggtatatttctctatggcgctggggagtgttgactggttctatgggcgaatatgagaactgacctatccgtcaccaagcccaccgtccctcctcgcttgcatttagatctgcacctaatgcaatgcaatctgcacccacgccacgccgtcgtacccgatctaaagcctaagttcgctagcgacttaggtcgagccgagaaaattctcttcgatgtccttggaaacttaccaggtgagggaatggcatttatatatattttaggttgctatccccagtggtggtaggataatgcgtagtaatatacgcatatttgttgctgtcggctactgcaatttgggctagcgtgattgttagcgtagtttctcgaagatgaatacctttctcagtaatcatctggcatgaaacttaaatagtctatgcatttatttggagatatgtaaatgcagatggcatgtccaattgcagtgtgagataactgtcaggtactgctaaagagttaagtcaaataagcactgacttgactgtctataagtgacatggaagggaggacgaggaatcaatttttaagaaaacaatataaattattaagtgtacagaaatgaagttgcaatgccaaagacaacatagcacggttcctgattgtactcaaatttgggcagaaaactacaaaattacctaccaagccacgcatcatgacgtccgccgggccattctttagccagcggaagcagctttcgtaccaggctctggaataacagttttcaaacagacttcctcaccccttgtatatcggttgtgtctgggatatcaatactgttgtcattgttggtaccgaggtgcatgggtaggggaatgcgttggggtagacgagcgatgactggacgaagaatggtgcacactcgatgaactgccttgtcttccaaaccaatggccagtagatgaaggtgagtggcgagaggacgaggaatggtgcacactcgacgtgctgtgctgtcttccagtatggctactagaggaaggcgagtgacgggtggacgaagattgatgcgcgctcgatgaactgccttgtcttccaaaccaatggccagtagatgaaggtgagtggcgagaggacgaggaatggtgcacactcgacgtgctgtgctgtcttccagtatggctactagaggaaggcgagtgacgggtggacgaagattgatgcgcgctcgatgaactgccttgtcttccaaaccaatggccagtagatgaaggtgagtggcgagaggacgaggaatggtgcacactcgacgtgctgtgctgtcttccagtatggctactagaggaaggcgagtgatgggcggacgaagattgatgcgcgctcgatgtgctgtgttgtctcctgatcctgacgcgacggccagtagaggaaggggtataagacgtggtggaaaggttgcaggcagtgagtatatcatatgcgtctgctcagatatgatagtcaagcactggactactatgagaacatcatccacttaccattgtcatgaggaccaccgtcatcggtattgtcgtcaccgttgtcattatcgggtggattgtctgatctgtactgtgcaatacatgcttcacaccgagtaattatgctactcgcattgttcgctctgcaaatacacctagcttcggccgcgtcgttgtccgtctgcctgtcgcaccgttgggaaatgcttacgagggggtcgcaggccgagtgacaaccactggggacgtcatcttggtccaggtctgccccaaaggcgatattacccgcgaggataaggctggagataatgagaagttgccgaacatgcatgatggtggtaagaactcattgaccttggctgatggaattgagtgacattaacggcctcaactccatttatatttgtcttcagcactctattgcgcgttcattgcgttttattgatcgcgttccatctaacacctaagctataagcttcaaaaatgacgatgtctaggtcatgagtctccgtagagacggtggttaagcttcacattaagcctcctgaactctgcagagtttactgctttcaggcgtatctgttgatcaggagtgatccaaaggagcgtatgccaccaacgattcgagatcgaaagtctcggagacctagcatccgaaaccgtacatggaacaggtgcactgccgacccagggacaaggcagtggctgttcttgtgtcgatgtcatccatgcgtatgggctttgataagacgatcctcggtagcttctttctctcgcactctttactccaatgaagtcgcctgtacccaggcaggcagcttccatccacgaaatggattcagtatggtatttgaatagtcaaaattcaaagacgtttgagcagaccaagagtttcatacggagagttcaagataatctagaacatcctcgtctatcgtaagatggctgagcgtggtggaccgctaccacattgaaaagcggtctgttatcgtacttctccattgcagcaatgtcttcctgtttgacccatgaatagctgcctatcatggtccccagtgcgattgctgaatgggcaataaagacaagggaatggagctgattgggccggagcttcccgtggctgatttgataatgatgaccccgcagagctacaactgtcagaccagatgccggtatctttgcgctacctcctccctcacattgtttctgtttcaacacgacaagcgaggaatgatggttcgcagtgcactggccaagatgtcgtgggaaggctataccttgcggtcgctccagcacgcgaatcctgccttcgtcccgacctttctctatggcacagcgtggaaaaaggaccgaacaggggacttagtgcatcaggcaatcagtaccggcttccgcgccgtggatacagcagctcagccaaaacattatcgagaagacttggtgggtgaaggcatacgtaaggttctcagtgatggaattgttcgtcgcgaagacttatacgtatgtgacgctgaagacctctcgaattgaggaactaaacaggccattagattcaaacaaaatttacctctgttaatggacagaatccagatgatatgccatataatcccaataacagcctaactgatcaggtgcactcttcggtgaggtcgtccttctacaaccttcgcccgtccgctgagcctgaaagtgccgaagagacgtatatcgacactcttgtacttcactctcctctgccaacgatggctcagacaattgaggcgtggtcagctctggagacatatgttcctcatcgcatacgccacctaggcatctcgaataccacgctctcagtattgagagagcttgtctctttggccaaggtaaagcccgcggtagtgcagaaccggttctacgctgggacccagttcgacgttccactccgtgcgtactgtcgcgagcacgagatcttgtatcagagtttctggacgttgacggcgaacccggagctggttcgttccaggccggtcatcgccctcgccagagatgcaggaatctcttcagttgcagcattgtacggccttgtcctgggccttgggcagaccacaatcctaaacgggaccccccaaaaggaacacaaggaggccgattccctaagtgagtcgtattatcgccggat

SEQ ID NO: 4964 - DNA, 10925 bp, Emericella nidulans
acaacgacggattatctattaagcgggtgaacatgcggtgcagatatcgagtttcatcatcaagcccacgaggggtactaggactgtcggcgtgattgcacaatctcccttctcattcctaagggcacgaatagacgcgcccaaaagctgatcccagacttggaaactgtctgagtattttaatcctgaagacaggatcttgattacgttgtcataatcacgggcaatagacccgtcccgtccgcgagctgattccatagtagaggagcataaacaatctgcagacatttgagcagtcgttgtccacacaacctgcgcaaagttatcaacgccatggaatccacttccgtcagggtacaaatcggcacattgtctcaagatgtcgagtcgggagccccttgaaactttcccatggcaggctgcttcaacgatatctccgataaggcgtgagtaagcagccgttggccctgagatccctgagacatcaatgaggagccgtagcaagtgcaatatagggctgtcgggattattatttgctttcggatgacggtgtgtaggggttgcggcttggtatgaatccgccgtcttcaggagtagtttctccgtaaatggaatactgcctagggcgctaaccatggtcgttgacagaaatctaaagcgttcaaagaaagtatccattgaatcgccatcgacagcattgagagacgagggtcctccattccatagccgctggagaagccccaaaacatgggccactgtctgcatagactcaggagagggtgtaatctctttactggctgcaaacgccagggcatgggatagactaacccacgctgcagcaatattggacttctccatctccgggccccaaattgacgacttcaagatagcctcgaacaccctcaacacatccggaatccttgacctaacccatttgcaatccaagggtggcagttcttctggcacaatcctttttggttcattgacgcgattatccgacaagccctgagagggtgtgaactccatagcatgctggacagcacgtgcgcaagcctgtcgctaaggctggggacaaaggaaaaaatatttgaagatggggagaggatgtactcttcccaaactttatcgagttgttggtgagatgcatcaggtcgaaaggcataatatagcagattgtagtaactggcaatcacgagttggctgggctgggagcctgtcttgtcgtgcttctttctttcaaactgagagagtatcggcttgctaagcatacgcagcagggaccgactagttgtgtcactgatattggccactaatacaaaccggttccagttaccaatggcttttgacttgatttcaggatcattgcaattgaagcatttctgaagaacgagaacccattctttgaagtgctgccactggtctatgttgaaccgcttgcttctaagaagtagtgtgatgacaccccagatttgaggaacgtgttcgccggtttctggattcgacatcatccttgacatacgctcgctgacctcggagaccagcttccggttgtttgcgagtggtcggtcgaagatatcacggagtgtcttggacaaagtggagttcgaaccagacgccatatacacgttgaaaccgagctcaagcgcgtttaatcggacatttttgatttgatggagcaaaccagatatgagatgatccatccacaaagtcgatagggcaaggaatgtcggctttgccacgtcaaatagtcgctcgtaaatcattaaacgctgagagattacggagtttcctttgactctgtccgttatactatgcagcattcccagtatgcgcgtcgtccttgccgctgtgattatccgtgctgggaacttctgcgttgacaggacggtgagataatgggtcacaacggacttgggaagattttcactctcgagacagacgaccgagtgctcaatgaggaaaagcttgaactcatccggcaattgaggagagatctgaggatgccaaacaagcaccacagaaagttttagtgcttggatgacaaggtttgtatccagtggaccgccctttgtgagatcgcggctaatatcccgttggatgaactctgcaatcaggctcatcttgtgcagaatttcttcttctgtgggcaacttttcgtatgcccttaatgcaccaaagaactgcatatacgcatctatccttgagctggtcgactctccagccaattgctgggtgagggactctaagagcattgcgaaagactctggggtatacgtgatagcagcagccgaatgaacagggccgggcgagttcgtcgttttgagtattgatctaaccggcttgagatcgttcgaaggaaggagagctttcgacttcgggttcgtgaaggaaggaggttttatgaattttggccatggcgaaaagttcacgcgcttcgactggcggctggaaggtgctccagttgaggtcgagtcgttctgcaggacaggagattcattaggcgtttgtacgggcactggcgagtcctccgtccgatctttctcagacagcatacgagacgcagtccttggtggagtcggcggacgagctgacaaaggacccagaacgtcaaccatagttcaagacaagaagcagtggtagaaggaggagagaaaacggaacattgcgagacggccaagctccaggagcgaactcaggcctgttcctaaccacgccgtagcactgaagatggcagattgaagattgacggagaccatgaagaattgagaccagaacgccggagacgccaagccacgcctgaacgcggttgcagacgcgttaagtggcagcgcgtttgaagccttgtaagtaaggcctcaaggcatcagcagcggcatgcagccttattatttaggcaagctgcggagaagctgactacaagtggggtctaggtgtttctatggcgctcgtaggatcaactgaacaatgaactgaagggcacagctcatcatctatttctttattcgcataattctttcatttgtaagactcgagtttgattcctcgttgattgtctcgggggagctctcctgcatctacctaacccctgtctctccgcattagactcctcccgtgcgatcgacaactgacaattcttgaacttttgaacaactcaaccaaaggaactcttatcgcgcaagtgtacacaggcgccgagtgaatatggatttgcgtattctgcagggctctggtatagtgcagtacctgaatcattcttttcctcagcgctgacacatgctcaacagagaaattgcagcaggtcacaaagcttctgaactctcttgaaaaagacctgaaagataactcgttgaactctgcacgtaagcaacctaaaagccgcatactagatagctctgacttgttctagaaagaactcagatcctcttacagctgaggcaatatggcacgagtcccgacaatgcaggaccgatttactcaaaaaaggtggatcataccacgtgccgcctctgaccgtctctaacatttgcatagggcattgagatactatccaagtatggcattgacggtgagacaacagacgtccgccatgcagccctgcggtgcgttgcaaacgctctcttgttagactccaacatgcgccagttgttcgtagacactggtaagggcgggagactagccgaaatgctcaaggtatgctcaattccatcattgtaatctacgttaacacgtctagtgtgattcttccgagcatgaaatggtcatcagccgaatccttttcctctcgacatacgacaccaacctgaatttcgacgacctcattaacaaccactctctaggagataatatcaactacgtgagctgagcgttcccttgaaagagttaacatgctaataacgacagcaaatcctccgacattccaaacaattcccgaagtccggcagaaagcctctatcacaagtcgacgagctggcttttacagatacgttgaaattggtattcaacatagcgaagctttttcaagacctggcgccgacattttcaccgtcaatcccatacatattcaagatcatcagccgaatcgatatccccttgaagcctctggatggtcttctcggcacactattgaactgcttgtcgacattggatctcgaaaacaagaacaaaaagccttacgacggcaacccaattttccctacctttaaccagaactgcaacgtagacaagttgatcaatatcctagatcaagcagtgtcagcttacgagccctcggagcttgaaaccaaggccatccctctcttccataccctcgtaaccatccacgaggtggcacctgatggtccccgcaaatacatgcagtggcttcttctacctgacgacaacgatcgggaccggccaatcgggcagtctgacacgttatcgtcgaagctgctcaagctttcaaccatgcactatgcgaaccttaaggtcgctatctccgaactcatgtttgtcctttcaggaaagaatgccgaaagcttgacgaagaacattggttatggtttcgctgcggggcttctagcatcccgcggcatggatatccccaagtctgcgggtgaagcattcgcaaccaactctcaagatcttaatccagagatcaatccgatcacaggccagagatgggctgcggaaaaggaagataccggcccgcccatgacgaaagaggagaaggagagagaggccgaaaggctgtttgtgcttttcgaaaggcaagtacaacggtatgtattccatgtagtcatgctaattctattatagggccaaagcaaacggcatcctcggggtcgagaacccagtcacccaggctttgcgggaaggaagattggaggagttgcctgactctgatagtgaataaatatatagcagattgtagccgtataaattaaagttccagaaaaactcgctccacaaggccttccctagagcatctatggcagaacatgagatcagctagcacattcatggtctactgtaccctggtccggatgtcggagcctggtagcaatttgagcccaggttatagtcttaacccaccaagatgtggtgtagtaccatgctagacaccttcatccagctgtccgccgacgccttaatacagtcatcttctcaaaggtttatttctccctatgctgagatatggtaatcgaaattgctgcattatcttataccctgaagaaaaaaaaaagcccatgtttgcctctgcgtcttcagcggcacccacatacactactaagtcgacaaccaccttaacatcaattccttcggcaccctacttcttttccaggcgtcagcatcattgaaagtgtcatcatcaatataaaagcatacacttctttttttaccaggccgcgaaggacgtttgcagcattagcgttgtcctgtaatcctgcagccaggagaaatcgaccaaacggagttcatcgtctactccagcgttcgcatccaaggcataagggaaatgtcaaatttgctccgaaagagtaagggcaaacggcttccatatggctttgggcttgctctcgttgcgttcatcttcctcgataagaggcactgggtttgtgaagcccgcggctgcttcatatcaaccacaaattctggcgactaaccgactttttgcaagcaagaccagctcccagataaaatgtcacagtgttatgtccatgccataatagttaatgggtctgaacctttccactgccaggcgatcaattgaagacactgcaatggtccagcgtcaagattattttgacggataatcatttcgttccttgctgggtggaaaatcttatgcatgtccagctggggggcaaattgctcggttttttgatagcgtaaagcattaagaaacaagcctcggcaataacgatggcggagggtcgaggggacgactccaatggcagttccaacagaactagcaagcatataagtaggtaggagaacgtcaagagaaagtcgctcttgcactatgccaaattgagttaaatgtttgacttgcttggtttacgcaagcattgtcccagcagacatacgcagtatgtaggtaaccttcctcctgccctggggagactatataacgccaagacaagacggctccaatgacgtctgtggggttgacggagcacagattcttggcgaaaaaattgaccaccgcggggctatccaagtgtttcatactacctgtacaatcactggagttgagtccgtggccctttctcacttctatatttttcaatacgtatagttgctcgatatccaagccgccaaaatgtcgaagccgtttgaccccgagcaggcgcagaacctggaagatgtaagtccttatcgcgccacccctccatactgaccaagctaacaatcacccagatggagaagcagttcgccgtcaagggttcgtgacgttcccttcactttcgcttacattcgacaatccatcactcaccatctcgcagccgtggagcacctgatgacatactggtccatccttgaaaaagtccccggatcccagctgcgcctgacgaaaatcgacgacgagatttacgagcacttcaaggcggaattccccgatttcgacccggccgagacgattgatgaggacaagatgaagagcaaggagggcaaggagaagtggcgtaactggatcaaccagtacgagaagaagattcacgacttcaacttcggcacaatgctgcgggcgaacccaaagaccgaatacgaaagggacaatacgatttttggtgagtcttccgaggctctggagttactgaatatggattgggatgtttggctgactgggtttttgcttctagcgatgaggatgcagttctatgctattgagattgcgaggtaaggcgtctcgctatgcattaagtcggctgcttgctaatctcgtttgcctcatagaaatcgcgctggtctcaacgattgggtttacgagcaggcacaggcacgggcgaagaattccagttcataatcacgtttacttacacgtcgatccccggcagttagaaattagaacccattccacatcagcacgtttactgcgaaccataactaaatcttcttctatcataaacagagggcgagtccggctgccttctagattttttggagtcataggctaggggtatactagtagcgcttctaaggtgacattctagactatccagccatttgtttcccaaaatagatttgggtccagagatgcaagtatatttgctgaggtctggatggtagtataaagaggtgtgggtggtcatccagccagcctggccgagaagagcaatgccaacgcctattgacctattgcacaaaacaccctcaatgtgcctgatctagattgtcgaggctgggacatggatggaagcaatcatgcacgtatgcttctcttactctccaatgaaagaagagccctgaacttgtgtgcatgactatactgcgtgccgtttctgttccgtctttctcatgcgtattcgggccgtccacagctctactagtgaagccgactaagagacatctacacttgctagacataatggctacaactttgaagagttacttgcaagcctgttcagtacaccatgacccaaattcacgaccagggagcaggtcctgacctgcatcttatatatatttcacgatcccaagatatagagccggtaggtgataaggcacaaattctctatgacactgcagaataatcagtagattgaagatctggatgttaccttactaccagtgatcagtagcacttcagatgagaatgagcaattattagcttctaacctgtttctgttcttggagtacattggtgtctttagagtagcggcttagggcaaatctgctgagattccaagtcattccaattgattgcgcgtagtctacaaatccagtttcgggctgattgcgagttccatttctgcgtaatccagatctcgaataaccacaacgtccgatatcgccgtccccagcaggcatcttcaacctcgaccccaggctgtcagtcactgagctgcgtgggcttctctaactttcatatcccacaatatcaactgtatatcagcataatctcgagacccttttttttcttaatatctcttaacctatctttttccccctcattgagttgctgccgcagaggatgtcataatcgcactcatcaatatatacgtaagctactcgtgatggttatcaataacataatcccggggacctcagtctcatcactcgcacactcatacctcacgcactcttttgtgataatgctcttgagctgcatctcgtggccgtttgttagaccctggccgtctgtgcatctgttgctgtcggagtgtgcatcgatggaagtcaataatcaaggcacggttcaactcagcattccatagtatattctctggtcggagatcctggtggatgatacctaaagaacgtatctttctcagggaccgtgaaattgcatgatcgagactgttcccggatctcagatggcttaaatcctcaccgccccagcccataaggagtatgtggcgtatttctcctgcgccatgcaggaagtagactctgtccaagtcaatcgctccaaggaaaactggaaccgccgagccttgtacaggccgaaggatacggtaaacgtccgcttcactcgataccactttccagcgccgagaggtggtggctttgccgacaatagtataaccgtacgcggcacaagtgactttaaacggcgcacgataagacccacgatctcccatcggtgtaaaattatgatccagatcttcatcaagctgctctttgaccatctgcaccaacgtcttcacgtcgatgtgtcggtcgtcctgtctgccagagatgtggagttcagcattaggacagcaagggtccattacaccgccttgttgcaggcccagaagatacttttgcgtgcagaattgagctacatgctgataaaattgcttcccttggcaccctccaatatctgttcgccgtgcagagcgacgagtcgggggtgacggttcgaccttgctgaaacccctcttccgtccggtagatgtgttaggatctgcatcagagtctgaagaatcctctcggtgtggctgatcggatgaaggcgcacatccaagaccatatcgcgtggccatccgatgacctccggggacgggcaatccagccgagaaagatgatggcaggtactcagacgtagcctgctccgaattagagtgtccagaactagtactttctgtattctgagcgctctgatgtgactgttatgggaatctgcaagcgcatactgtcaaaactggaacaccaggtttgtagcttgccgcgcgtattctcccgccaggcatgattacgacaagaggaacgaaaactcatcaagcagagacatagggccctctcaactcgagtcctaggtatcccaggtcttccagcactcgccattctgattatactaaaatcacctaggttgtagtagagcgtatctgggtcatcaaagggaacccagagctgcacgtccatgagtccgttcgttaaatatgaatattcgagaccctcttgaatcatcacatgaaaatcttggacgattgctgctcctacaagccgtgccatgttgtactttgacttctccggttcttccgtaggaatcgtattgagtttgacattctcttgccagaaattcatcggtcgaagacctcacgaaggctctgcacggagagcttatggggtgctttgtattcgacggtggtgagcaagttcctcgtgtcactgtcaactcgatgaatgcagaattggtcaggcttggcgggtttttcgcttgaagatctgctaccacctggctcaccatctttctccggagcgttggagtgattatcaaaccacactccgtcgcctaactgaaactctttacggcatcgggtatcttgcataactcggcaataatatcatgcacatgatcttccacggctagtcgttcacaagttgcaagatcctgttcgctgctaatcgctcggtcagcgatatcggcggccaatttcttccaacccagcacgcgatgcgaataattgccgtgaatctgcttccgtgggctgtaggtggcggcagaccgattcatagatttcaagctgtctagctgcacaagccgtccacggaagcagtcttttagggcagtatttgtcggtcggagggtcaatcttccctgtcgtggagcgagaagggacttcggcttttagcggtcgccataggagatcatgggaatatcggatgaactctccaaaggtgcttggtcgattacgctctttttcttggttcctttcctcctctgcctgttttcttatctccctttcctgctttcgttcctcttctgcctcgagaaaaaacgtcttgtaatcaggggagctgcttcggctcattgtgctcgtaaggcaggatgagaagactctcatggcaatgaagattcacagcagtgttgtcggatatgttgtcgcatgtcagcgatcacatacccatttgccacgcgaatcaaaaaatccggcgcaccagagccaggaaaccgcgacacacaccacagcccttgaccgctgcgattctcactgcccgaacagttcatgtactttcttagaccagcagcggatgcagggttcacctgtcttttgaagaagagatagatcaacccttcaagagggcatgcacgctagcagttattttgtcaagattagaaaatatcatttatcattcttagtgcgggctccagagctaaaaaatgtgagggatacggatcaatgctggtaatccgtccaccaagttgatttcaaatttgtgccggctttattttccccaaaattagttttgatcttggaatcatcaatcatagagcctagtattcgacaccatagaag

SEQ ID NO: 4965 - DNA, 8438 bp, Emericella nidulans
tgcaatatttcatgtgctagatcatgcccacatcagggacgagatgactggttgtgggtagatgatgttggcgcgacaacaacctataccaatgcacgaagctgccaaacagttgaagaaggcgacggtctgaacattgtgtggaggccgggctaccacaaggggtacagctccggaccgacacactttgggatgagcgactttggcaactctgggctccgacgtcgcgttcacttcgcacgaatatatggagtgccgcaggactttggtcttctcggcagccaggactacgtcttcgttgacagggacgacaacccagtgaacggtggaggtgacggtgacaaagtgggcgggtacacatacagaatccgtgtatggaagaataaaggaagcggaggaacaaaaatcaaaggtcagttacttgtattgaaggcatttcttcttactaaaggcgatttctttggtagccgatgggaatcggtactgcaacatgttgggccacgacgacggtcgtatggactatgtttggatcctctcgaagggcgacatgcgaatataccctaacaaggggctttccttcgtttccaatgatggggagagctactggggtccaaactatgttatcttcgaccctgcaagtatgtcaatcaaccgagacctcgatcgtcgggacttgcatctcgtcgactgggatggggatggtgcatgcgacataatctggacagacccaaataatctgaaccggcctcgactgttccgtaatcggattaaagagaccggcgatttcaattgggagaactctgccaatcctgcgcccaccgtgtcctgcccgatacaaagaggactagggttctttgaccgaccagtccagctcgctgatattacaggaaatggcaaagctgactatctctgcatcgagaaagacggacggacctggggctgggttcataatgacaatggctgggagttgattgatcaggtcaaattttccgaggccaaagaccgggcgaatctacactgggctgatgtcaatggtgatggccgagccgacctaattcataccaacaagttcaacggcgatgggactgtgtggtacaatcgtggccgccgtgagatcggcggctcacggttctggtgggaaccagcaggcctgacatacgaaggtgcagttgcaggatcctgcacctactttgctgatcttgatggagacgggcgcgcggatatgcatgcaatcactcattccatgctaaataccgcagagacttggtataacaaatgtgaacttactgactctaccggggatgatggccccattactgacccgggcttaccaagcatacctgaatgaacctacctcgggtcgtcggaaaagtgtaaggcgaggattccttcgcagagaatgggctcccgatacatgagacatgactatatacagaatgtggtcatatgatccgaacgggtggtaggagaatattgaagagaaatcatgttccgtagattggtggcagctgcttgaatgcgctcttttcctgttttgatccttagctgctgtcaagctaactgttgggactggtacaggatacaagtaaactgtggtaaatagaaaatagaaacacaactgtcaaaaggacctttaattctgcagactttggctcgtttttgtatggagtttcggcgtctcccaccgacccccagcaactacttttaactgccctgtctttattatttctgtccattcctgcgcatgagttagattgatcctgtatctgttactaagtactagacatggaatttgtgaagtccaataaaccagcacatcaagccgaatccaggtccatgccccaggctaggcttagggagtattgaactgagcgaaactcgttccgattgcggtgactctctatgcaatagcgcacagatactagatagaatattcctggcagatagtccgaagcagtccgtcacgttatatttgggcccctgccctgcttacctgaccgtgcagtcggcaaattctgtccatgtagttatagtatagatattattgctcttactcaacacgccctatatgctgaacaaacttagcaaaggaccagatatgggccgtctcacctcacagccagatttggatttgccagtctggtggtcataggcagaagaaaaacacttatacccgaggtcttcccaactcttaggtctttttcttcacctgcacatgtatccctcgcagctgctttccaaaggcactcggacataaccttccgtcgtgtcttaatatgtccaacgaaacgtgaccattgtcctgctcgccagctgcgaactgcgcccgcccgtatacacaacccgaacaggttcatccgaacaccatgtattctggtcaacaagcggcccgtactcgcaccatacgcgaacacaaacaagctgtcaaaatgaagccccatacaccccttgtaaaacgggcctgcatcatagtcttccgctgtggagttatgacttgcgacgtcgaggaggttgatgtagccgagcggcccgcacggtaatcaccactatcgccatctccacgacatggctccgcttctggcgagctagactagactgtagtagctgctagtcaatcatcaggccgtatacgaaccggaggctagcgttagtactcggaccgtgttatctaacctattctctatgaagcgtatcatagtacctgtaagcatagtatgcgcactcccaccatatatggatctttatcctgaatgataacattgtggtagtcctcatgagttatttttgcttcctcagatgcaattctatatcaaagtactaggcgttgaattagcggtcagaggagtaagtagtacggttggtgaagtacctccagggccacgcacggccccgaaatgcagatcaatataggaagtgctgtgtgtaggatgattatatggcgctggggtattatcatggtttctgtccatgcgtgcttgtcgtttatgcagtgattcgtctgggactaattcaaggggggaacagggcgcgaaccagtacttttggtgagatgaagattcacttctgtctggggtgataggcgctccaaagagatggctgggggctggttgtcggaggtggaagaaattggacccctaagaagggaagtttatatagccgctaggaacgtcatacacacaaactatcggcacttaatcgataagtgacaggtctaatagtcttaggcacttacttactttttgagataatgtcggggtatgcgcagtctttcatgtcatcatcagacacctaagcgttcaaaccaatcaaaaaaagagtagaccgtcattcttacaaaatcctgcgacattatagagtatataacgagtgcttatgatgaatattaggggaaaagaatggagtaaaaacattaaaccagcgcgctattaagcatctgtatctatcccgccagggtgcctgagccgttccgcggataacgactcctactatgcaacctgcagctcgtgggtcggagttttgacttactgacctctgattctgtcgcggcgctggagtaactccgacgacttccgcctgaccagagtctgttaagcgaggagccaaagttcttctctctgtatctatcaagcaaggcaggtaaaacgggcagacaagcgcagataactctgtgtaggcttagacagtactgctcaagacacatgtttagcacgagccttcctggtagataaggttagtgactggtgcaagattgtgaaacgtacgcccatttagaaattgaggatatgttccaggttgcgcctgggctgcttgtgaggacgtgcgtcatgccgagacggactatgcttgcggcgaaggcactagtaggagagatcagctactctataaccggtccagaaaaggctggataaaacgtacagtattcccagaccgaagacagctgcaagccgaatccttttccacgccgttatatttagggcccagagagtgcggacacggagcagaaggacgtagagacctgtggctgaactgaagggcgccagaggtatagggcaagattccaggcatccagcagcggctaggtgaggcggaatcccaggcatggcttaccggtaggcaggagaagatggttagaaagaggagagtgaggttggagactgcaacgaaagcgacgccaaaggtaatgagatacctaatgctgagatggcgtggaaagatgcggtagtagaagaagacgaaagcgagtttaatggaagccgtcagaaaagtgtagatgtattgtcaatattgaatatctagacagtgactttgtatcccatctttgtttcattgtaggagaggggtccttaccttaagagtccttgtgagccagatcatgggtacaccctacatatggcggccaattccccgcgaaaaaaaacctgggctagcacttagaatttagtattatatgacttgggtagaatcacgcatataataagacatgagccccgtgaacgtgatggtcaggcgaagaatcgcgtcttcactaggcaggtcgacaagctacatgtgccagcaaaaaaagactatatcaatcagcgaggttgtaacaacccggcttgacaattaggctcacagccgtctatccccagcttcatacaaaggacccgcatacgtgtgaacagcctcatggccactgcgattgtggtcacagaaagaaagctcgcatggagggcaatattgccatgcagctgactgagcggatctcaaaattgggttcaactccagcaggaggaagggcgccaccggtaaaccactgagatgccatggcatgtttatctaataagaagagaaggaggaatgggaaaagggggatcgaaacacaaagagaagcagcagcatgtgaagacggagaaggattataaaatctcacgcgctccccttgacctttggccacaattttcgaggtgccaccacattcgacagcggctgccttgcatgttcctttcccgcattctgtttcttattgtcttgttgcttttcgcttcttgctgcctcagactcaaagctgtagaataaaactgcccccgtacattggaaagtctatcacgtaaccgttagcctcactatgggtgtctacctattctcctctagcctgtgggcaacactcctgctcgccattttgattgtatgattcctgcctcggtctacctttccgccgatctgacacatcttgtagtatcgccttgttcggattacctacaatctttatttccatccgttatctggcattcccgggcccagcgcgtgggctgcatctcgtcttccgttcgtttacgcgctgatcaggggtaccatcatccaggacttccaaaagcttcacgagcagtacggtcccattatcagaattgctccaaatgaagtgacatttgcccacccggaagcctacaccgatatctttcagcctcgccccgaaaagagtcagggccaattcctcaaagatccgctgtggtgggcgcgtcaacctgggcatccggattcgttactcagcgttattaacccagaaagacatgcgcagatgcggcgcgtcctaagtccagggttcacagcccgcgctctccgcaaacaagaaccgtttgttcagaaatatgtcaatctgcttgtagcgcagctgcaggaccttgtcagcaaaagtccaagcgcccacatcaacatgacaccgtggttcaactacactactttcgacatctttggggatctcggttttggcgagtcctttgactgtcttcagcactcaagataccatccatggattgccttactattcgacagtgtcaaggccgccggcttcgttattgccacgcggtattatccgctgattgaagccgttctactcaagtgtgttccaccttcaatgcgaaaaatccaacgagatcactatcagcagatcgtcgacaaagtccagcgccgactgggctgggaactgcagcgccccgatttcatgtcttacgttattgacgagaggggtggtcttcgacttgatgcaggtgagctttacgctacctttatgattttgaccacagcaggcagtgagacaacagcaacagcattaactgggaccctaaactacttggtaaatcatagccccgaaagtcttcaacgactcgagaatgagattagaggtgctttttccggcctggacgcgatcacgcttgatgcagtgcgcaatttgcccttcctcaatgcagtcatacaggagggactccgactatgtccaccaattccatgggtattgccccgcctcgtccctcaaggaggcagtatgatatgcggtacatggctgccaggtggggtaagcgaatgatcctcggcgccaagcagtgatgctatttagcaagcacctgggtaaaccacctgctaaccggagagtccacccagaccccagtgtcaatccaagcatacaccctcaatcgtgacccaaccctctttaaccgagccacctcatttcttccagagcgatggctggcgtcttccacgtccgactccagttcttgctttttcaatgatcagcgccaggtcgtccagcctttcagcaccgggccccgtgcatgtctcggccagcacctggcgtgggccgaaatgcggctgatacttgccaaattggtctgggtgtttgactttggggcgattgatggccagggtgtcaattgggaggacctgcggacgtatctgcttgttgagaggaagccaatcaacgtgcgtatcagctctcgcacggtctgatggctaccggctcaagtaagcgctagctgtggtcaccgcgcaggaatgcagccgtgcgccggatgtttgccatttgtgatcgcgctggaatgtatgattgcgctgtaatcattatctcatgcttgccggctgcttatgagttgatcagtaggacttggagttcgaagcggcgcgatttgagttctttttagccaatttgatgtctatcacttatcttctggccagaaagggagcatgccaagtactggtcagagaaagtcaacgaaattgccattcgttctgcattgcctgtacttctaagtagatcgaatatgaagacgtctgctgctttctaagagctagctttggtggcagatcagcccgggtgctgagacctgtagtcaacctagccctgccagaagctaaacctgtagtagcagtaatagtctgaatgggtattacccaggcagtggcagatgtagcacatctatggccgggcgctctagagggtgttcaagcatgcaccgtgtattggtatccatcctcaattactgaatcacatccgcagaaagttcatagagagtgtattgattacctcccagccctagtcttgaagccgtgtgtcagtttttgtctaccttatccgattatctgctcgacatcgttcacattcacccctagccgcaaaggagaacagaggagagggtctcatacctctcttggcactcgtggcactcttagtcaccatctacaatatcagtatcattaccgtctttacttcccgcctctggccaagtttcccggatcaaggattgctgccgccacaggctggtatgaattttattttgacaactggaagaatgggaaatatatttttgagattgaacgaatgcatagagtctatggtatagcatctacagcttcttttatcgcctctctacctacgtacctacttatttcctggaggattaacacgacctgagagcgctaggtctaattatccatgtcaacccagacaaactctccagtcacgacccagacttctataatgaactctatgtgaccgagagcaagcggcgaacgaaccattacgatgtgttctgcaagggaatagaattcgaattcgacggtacccgtttctccctatcttaacccgcttgtagctttcaaaatatttatgaatgctgaaaacagaaccacaattcaggctcccatttactgacagtagaccacacactgcaccttaagcgacgcaaaccgctcgagcctttcttctcacgcaagagcatccagaaaccccagccaacgctcgcggaggtgacgctcaaatttgaacagccactgcgcgcctcgtcagggacaggtatggttgtgcagctggaccatgcctgtgccgcgttctcaggcgatatcatcgcgaagatctgcctggatgatgtagcggaaggagatagattcctcgatcatcctgaatttgcaccatattggtacgtgggctttgcatgaccagtctttacgtatcagggaaatgaagactcgtttggccaggtataacttatccatatgcatgtgagatggatttcgctatttacggggtttccgagtctagttcggtatgtataccttttgttcagtctgtaaatacagctttcttggacttggaccagtggaacaatgctcgctgaccacggttagaa

SEQ ID NO: 4966 - DNA, 8997 bp, Emericella nidulans
tatcaaataatatggaatataaatatgaaatatcacatggatagtacgacaacttgatcagtccttagccctgcgccagaattgatctcgcagccaatcaccattagcagcacttcccgtgaagatacccggccctccaagctcagtatataaccgcttcctgctctcgaagtccgatgatagaccaaggaacttagccgtgtccacggacgagtttatgtcgaaaccctgtgctgccatcgccccaggcccgccgttcctccgcaacacgagaccaccaccaccaccaccaccaagctgacctgcgatcatgttctgagcaatgacgggaacataactcatgagtgcgtctcctacgcctcgcccaagttcgcggactatattctgcacaagggaaaacccctctgcaggctgcgatgtactagaggcctcagtcttattgcccgttccccgcctcctgctgttcgcaggttttgcattgtcgggagtcagaggcttttgagatgtgccagtattagaagtagaggactctgggcggaagatcttcgccgcggacgtagcgtcaagacttacacccgaactgagctcccgcaaaaacaaaggctcgacagaagacgagtcgttgcgacagtgccggacgaccatcttcctagcatgattactcagctcgtccgcgtcgacatcccagctcagcacctcctccatctcaaacccatcaacgtgtctcttcccaaactggtatgtgcgcgccccttgaagcagaaagctcgcccactcagcccgctttcgcgcctcgaggcgctcgttgtatgcctttgtctggccttcccagaaggtcgtgacgaaggttaggtaggggaagaaggtctcgccgcagagctcggtaagccaggcgtagagccgctgttcaagctcgtcgaggcggcgcgtgaaagtattgattggtgtgacgaagaaaattgcggcgatgactgcatgcccgcggatctggttgaatgtgtcggcgatgtcgtggaatatgtgccactggctggcttcgtcgtagaagccgggggtatcgacgatgaagtatgtggtgccgttgatttccgtgtcgattatctggcatttttccgtgcctgggccggacggcgggacgtcagctagacatcaaaaggtgaaaggtcgtatcttcactggaagggtttgtcatacctgctccgttaccagcaaggcctgtcacttgggtgattttctctgctagtgatgacttcccgacgccttccttgccgaagataaagataactttggccgatgatttatcgtggctcttgatcctctcgaggcacctcttcgtccttgcagtggcttcagattcgtccagcgccatcatgctctactttatgttggaagacaagggaactaaaaggaaagtggttgtatgttggcctaattgcgatggcgaaggcagttacagtacccaagcgtggggaaccgggctttatttatgaaaagcctaagcgcccagtgatccactagaatggtcatttgaccgtgtaggtctgagagagtttctttttttgttgtggcactgaaaacgaatggtgtttattgaatactaggtcttggttgatgttgcagatacagcggtaagcgcaaggctgataccaaatgcacaacataacagagaagtgtcagccaacgattcttgtgaatcattagtttgtaggtaaggtctcagccttctggtctaagtagcaaccgccgtggcataagttgccgcctacctagacagaatataagtctggtttcggcccttcacatgttgcatttcttgcatagaattctagaaaccctttgtatgattttatatctgggggcaagcaagcggccggatgtaactcaagaaatctgtaacggtaagtgatgtgcttctatacaactacgagggagctacctgtcaaagctctttagagcccggtcatactttcgagaagtacgtggaaggatcgctcgtttgatatccttatcataatgctcgtcgagtcggcggggtcaatcacacgcataaatcttgctaccggttgttgtgccatgctgtctgatcagctttaggcatgaaaaggggatggggtgaggtgagactgatcttgaattatttatcaccgtatgatgggcgtcactttgccactttgcccatatgtcaaaatgtaactcttggctagctcgggtgcaagatattcaggcccctgcatcttcacctgaagcgccggaacgtgggcggcaaagcggccaaggaacagacgctgggacgggtgagctccgacattacatcctgttgtatgtttctatatttctttttttttttttgcattgaactgtgacctttgtcgatatcgataaagcgcaacaattcctgaccgctgcttcaagggtaaaaaatactaaacctagggtgagtacagggtgcagcaaaggagatcatcatgggtgcgtagtgaatattacatgagcaggactaagtagatggctgcctgtagactagtggtaaaaagacatacaatccaacgccgtagcatcaacaagtggcctcttctcccgtctccggacacggaaatcattcttcaagtggtgaaagttcaagtactcccccaaccactgccgaatagacaacagcgcacgaggcctcggctggtgcgcacaacatccggctcctctcaggcggcggatcctcaacaggatcgcagtcataggcatgatactccgcgtcgtccatatagctaatcagaaacgctgcgatgccgtacttgacaccatcaacgttcgacatgtcaagcacaataagcccatactcggcacagtcgccttacagtggccagcgattgcagctggacatcgcccggacgcgtgcggtggttgttgcgcttgagtttaggtctcacggaagcaccatagtcttcgccgtcgctgtagtcgcacagtaattccagtatcaggcacgttgctgtaaaggggaactcggcacaggcgcgccacggcagcacaagctgcggctctgtctgcttgccccaggagtagccctctggtacaagaaaccgcggctgtggcgtgtctgggacgctggggcgctgattcacatggggctcgccggcgccctggaactgagactgggtctgcgactgactgggaccgccaataccagtccccagcgagaaccttttctgcctctagcggcgcggttcacggggtccgaaatgtttcaatcagcgcgagggtatctgaaacaaagtagtcgtcgcgcgacacgaaggtctgctcgcctgagatgtcatcgttgccctggtggtaggcgatgactagggtgcgggtggtgccaccggggccgacgttggcgacgatggcgaagaggaatgagcgggggcagagattgcataggttggtgtattcgcgtggcaattttcgttgatggaagttgataagagatgtagagttgatttggagcagcggttctgtattccatataaaatggcgcctttcaaggtaagctttggatgatcttctagttacttggctgacttacgcaacattaattgttgtttttttcactcagagggtgtcaatgctctccttaccatgagcctcagtgtctgcatcttggacgcttgtggcctcatcaaatatcaaattgtttgccctttgcataagcacgcgtgccagcgcaaaccgctgtgcctctcgccagagaagaagctgtcagcgttagtaacaataaagctgacgagaactccctggcctatgaaaaggagtactcagaacagttggatttgctcaggcttcaaagggactaagctggggggccaagttggctcactggggttggtcgccccgcactgagtcgtgagcgttgtatccgtctcaactcagactgcttgagacagatatagggattgagcagagaaacagaatttgggactgggtagccattcggcccctctatgccggcgctctgccgcttttcgaagccttcgttgttcttcaaagcagacatcgtaattcggtgattgttaccccgtctctagttcttctgccactccatcccacctagcttcaattcccaaacagtcgagtcacgtcaaaattctgtgattaggtttccaatcctagcgttgacttgtgatggttgagccacaagcatcctgcttgggattcttgatcttcgattatctgggtgctgggagaaagaagctaagaataattctcttttccgcttggaatctactgtacagtaacaaattacgggaaagaaagccttcgtacgcgagataaatgagtttgatctattctcgacgactgacacgacggagctaagattgggcaagcaacctgaatgaagatttagccaatcatctttgtcacccatgtttcagacgaattgttctgcgaaaccgctgcagaggtgaagggtacgattcaactaaattcttctgttcggactcggtggaccacaacaccgaaccgggtttttactagcttggtatcatttcccagttcctccagcgatacttacagcgccttctacctatcagaaacccattcagatataacccatacaagcacgaactggtctatggtgggcactgcgataagtactcgtggggatttaaggtcatccttatgggcgtggtacaacaggggcggttcgacccttcttggaaactctttacaacacgcggcctggaccggatcagtattttgtgctgcaggttggttttgccatctaagaacaaagtcttgttgaatcattgttgtggatatcttcttgaatcaacctgggctggattattcggcaggggaagggagtatcattactacaatctggctacaattacttgttaatgccgagggtttgaaagagtgtggatagttcaacgccgcgttggagaggcgaagatggaggacaattgggaataggatggagaggacggtattcggatgagacagtggtcgatctgtctagttatgtcgcgagctctatacgcagaaaacttgggctgattgataaacatacacaacgccacagccgcataaacaagatacagtttcgcgctaatctgaaagtggttggacatgaaatggcctgttatataaatggttcacttagcatcgtgcgatctattatgtatatgttgttagacctgcaatttttctaggctctgtctcgccaggataaaataagatcagcagccttgctcaagttgctaaaacaaccaaatcagatcactcatatttttatctttgtgtatatgtgggcgaggtgagcatggtcagaaaactggtaagctgccaatcagggcgtggctcagaaattgatagattttgattttacgccgagggtttctccgttccgcattctgagccacgatggcagaatcctgacccacgccgacctgtgaacccacccacgggttaaccgtcaagaacccatatgacttgaaaattgctgagttataaacctagtaaattatcacagcatgtttgcattgccaacgcgcgggttacctaaaacatgtacgtgatacgaatatatcatgttgagcctcatgtcacgtgccacgtgatctgtatggcatgatctctggcccctggcctgatccctcgaggaattgtacattgaagaagtgagaactatcgtcatcaagatagagaatcaatcgtcatatgacatcctatccttagtaggctacgttcgtgtagttgatgcagcttccttctgccctttcccctttgagcattcataacactatcaaataatctactcaaaacagaaggcgtatgccaaagtgcctaaagtcagcttgtctagattattcctttcctcaggagccccccatttctgccctattttcaaagcacttagctggtgtactcgtcgcgcacaacagtaatggcatccccatccgacgttagcactgtagccctaaaaccttgctctgatgttgcttgaattgctctgttctttggtctagaatggcttcccatcaactaggtcgcatcgatcacatgtctgccatacattttctgaagctcgaaaatcaatggatgcttgaggatcagcattccactatatccttactcccttggtccggtactgtacctggaagacaaatggcccggtaaatcgtgcgcgtcgagggagcacttgggaacgaatactgtagggcggtgtgacattccagcaagttttcagcaaaccggttcggaacaaggataacccgtgtccgcccccctcgatttcccgatctttaaggtgaaccacctcccttaggttggaattcggcgactatatttgcgtacggccacagacaaaccccctatcgtgaaaactgaccgcagaacgtaaacgatcaaagctcgagatttgtaaccgctgaaaagaaaccgccgtacgtgcgcctgaacgccaacaacaccgcgcttttaagaagggttaccttcgactttgatatgggtgaagtaggaaggcaaggcgattccaagagtctagattgcagccaacattacaagccagcttcgggaactgttgtctaggtaatctccccatcagagcgtagtatgttttcattacgcctaccaaataaaggcacagtatagcggtaacaccggtctccaagaatatttcatgtcaacttggaataggacagtctaagagtaatctagaagttatgacacctttttggcttagcggtatattttcctcggtattttattagagagaaaagagaaaattgccgaatactcaagacctgggtggggaagaatacaggattcaaactatcaaaggatccaccagacattgcttgacaattaacgtaaatcccgggcggttggtgcgtcccgggcggaaggtagttttctcgtccaccccaacgcgtttatcaacctcaactttcaacaaccatcatgccaccaaaagcacataaaacaaagcaagatttaattgagtaagagggcaggatataatgcgcgattcaagacattaaaaatagaaaatttcaaaaaattgcgcccgcagcgcgtgcatacaaaattcatcccaatacacttcaagggagacttcatggccgccaatctcaagcagaactctgcaaccaccagcataggctatccctatattaagaagaggtcttgataggataaatagtattacttgacattcatggagcagctcccaggccctcgcgcgtacgtgagatggcacaacttatcctggatgaatcctcaaccctatcttgactgattagaaagaactgggtaacagagtttacaaaaaggcgccctgaaatcaaaaccaggtttgcttggaagattaatcatcagagagcactttgtgaagatcccaagataattcacccatttttcaatgagatacagaggattaaagttgagtataggatattagatgatgatatctacaactttgatgaaactggctttgctatgggcctaattgcaacaataaaagtagtatcttgagcagaaatgccaggcaaaccatggcttatacagccgggggatcacaagtgggttaccactattaaatgtattaattcaactggatggtcagttctattaactattatctttaagggaaagcactatagagagggatggtttgaggaactctctattctacatgcctggaggattaaggttagtaataatagatagactatagatataattgggctttgctggcttcaaaaatgctttattccagctatacagaggtggcaaaggggggagtatatactccttattctagacagccatggaagccacttgaccccggcctttgacactatatataaggataataatattatccctgtctgcatgcctccttattcatcttacttcctgcaacccctggatgtgggctgttttagccccttgaagagggtgtacggatccctgattaagcagaaggcacgcctaggatacaaccatgttgacaagcttaatttcttaaaggcttattcagaagcctataagaaagtctttataatagagaacattcaaagcagattcagggcaactaggttatatcctttcttacctgctgcagtactggataagctgtagttaagactattaactcctacacccccccccaagcagaggtactgctttaatcccctcctctcaactctgtatgccttatacagtctgtcaggtatattaaaaagctttatcagtcaaaaagcttctaaaagagggctctaggagtccttcaagcccctcaaaataggcgctggatgaatttgtaaagggctgtgaggtggctatttacaatgctaggttgctggcacaggaaaacaaggatctctgcttatttgtagcagataacaggcaaaaaagagttgttctaggtgtctaataactcctacagatggactcttatttaaagaagccagggaccttatttcatcgaggaataataaattacaagctggtggggggggttcaagctccagtacccttccaacttcggagagacttaggcgcgcccccccaaggtgtacaaattgcggagtacaaggccataaaagaacaagctgtcaggttcccaatcatccttagtttatttagtttggataagaattgatcgagttattgaaatcgaaagtttgtatagcagtggggtggatgagaaaactaccttccgcccgggacgcacctaccgcccgggatttacgttaccgctcaagaattacctaagcttgcttatataactataaaatataactaagaagtttctatcagcccgaactcaaatgttccatgataaaaactagatctcgcaactacttcgcaaaatggggaagtttctgcaagtgctaatgtgtaagtatctcatctgaggattgcacgctgataatgctaataagaagcagcatggagaaaaggtgccaaaaggagaactccgcgaccagaaaagaagaaatcagatttcagtga

SEQ ID NO: 4967 - DNA, 4915 bp, Emericella nidulans
tgattgccgaatgcattgctgcatggttcggggcccagggcactgcgggataccgaggtccaatcgacaatggccgcctaaaataaaggccattctggtttcaggcagaggtcacccggttggagccaggaacatatgcaaagatgcctcgtcaaccccagagaataatatataccgcaagtttgtgctttaagatcgattcgtggctgccatacctaagcgcttagacaagcggggctgaccagcctgggccatcttcagctttagcttcaccttcagccgccttcgtcctgttcccttcatcttcttcctcgccaatcaattattgcatcgtcccctcgtcatcttatcattttcgtcgctttcttcgctgagaccctgttttcttgtattcgtatcaatcatatttttattcattttctagccgcattcttccattcaattctacagccagaatgacccgaacccaccccagctcctttcagcagctggaaaaggtaagcaagaattcatatccaaacagctcaagcagaagactattcagaagcatgcgactaatttctcagcgatagctcggtgaaggaacttatgccacggtacttagctgtcccgccccgccgccccctacccgtcccccgcgatgatgaacacctagcttacctgcggcaggtctacaagggccggaattgccaaacaggggagatggtggcgctgaaggagattcacctcgactcggaagaagggacgccatctacggcgattcgcgagatttctctaatgaaggaactgcaccacgataacatcctttcgctatacgacgtcgtgcacaccgagaataagctcatgctagtattcgagtacatggaccaggacctgaattattatatggacacaccacgcaaatcatggtcaacttgagcccgcgatagtcaagtcattcgcttttcagcttctgcggggtatcgcgttttgccacgataatcggatactccaccgcgatctcaaaccccagaatctgcttatcaactccaagggccaactcaaactcgccgatttcggccttgcgcgcgcgttcggaattccagtcaacacattctctaatgaggtagttacgctctggtaccgcgcaccagacgtgctcctcggcagccgcacctataatacgacaatcgatatctggtcgatcggttgcatcattgcggagatgttcactgggcgcgcgttgttttctaggcacgacgaatgaggaccagcttcagaagattttccgcgtcatgggcacgccttctgagcgtacttggcctggagtttctcagtttccggaatacaaaagtgattttcccgtttaccctcctcaggacctgcgacaagtcgtccctaggattgatccatacggtctcgacctactccggtgtatgttgcgccttcaaccggatttacgaatcagtgccgtcgatgcgctgcgacatccttggtttaatgatgttcctggggctcagccagtccctgtgtgattcgtagccaggtgagaacaaagaagggctcttcggctatcgctagcgatattcctgtacagcaccacattaatgcctcagtagcttggtctcccatgtgagccagccatggatacggagcttagtttctgatctacctattgatcatggtatggaggctctcacttgacgcgaatgggaagatcaaatggcatactatagagtccttctctgggccaactttgcaatgggacaagcgggagattcatcaggcggagttcaccgcagagtgactcttaccgtccaccatcttacaagtacactgggacatcgagtactcttgccctagtgaaaagtcagcctgccgtgcaagttgacgacctctttctagtgccgggccaacgtgtgagcttggcttttcgtttagacatcatgccatcaagagcgttaccataaagtgggaatctgggtattactgaaagtgtggcattccaaagcagcataaggcgcatcagactgcgtgaactctgcatctaaagaagcatttatattttgcacccttgcatctaatcctactgtatatactcccaaggatggaggcttcgttttacggtatatgaagtgtcgtagctagtgttctccgaagtccgctcctcatacgtgtattcgtgctatattatcccttgtatacacacgcggaaagctgtcagaggtcccctttccgaagtcacttccctgctgcgcaccattagacatcatctcgatatcataatcttcgtcacccacagcccttccagaataacccagacgacgatgcccatcgcctccatggagaatgatatcgccacccctcacctgcttttgaaaccaataatcccgcatccgatcaagcgcggtcttaaagtcatcgaggatcaccgtatcgcaaagacacttgaatataaacgacaactagatatccatatcagcactcgtcccataggctgtctgaaacgcgggtcgagggtttagcagagtggctaagtgcataccttccagaacggctggacccctgaaggaagcgatgcactgttaaagacaccgaggacactacattcatcgacgacaacaaatgcaagcgagaggcacattgaggcgagcataattccgaaccgcggactaattgttaccagctccctgatgccaaagttgtattcgcgttttatggtatagaagagcgagatcgttgttatgacccaccatggatctctatcgatcatgcccatgtcagctttagagtcgagtaaccagaaccgcgaaaaagagagagtggatagaatggacatgccacgcaccgaaatagcggctccaaaggcctggtcgtcaaaaatatcttgttgacattattgaaatacgtaaaattcgcatagatctctaggacccagtacggctgcaccagcaggacagtgatgatgtagatgttcgagactcgctttgagaagaagggcctgttcttcatccaggcaatgacgttgtgtagagaccatgatacattaagcccgattgcgctggcagacaggtgccacccatagatgggttccttggagaaaatccaggtgccgtgggggatagcgaggatgagctattatcggattgatctcacgttagttctggttgaaataggacaggaattgggtgctaaggatggctgtgcacctctgcaaagatcagcttgtgtagcagaatgtgcttcctcatattgctgatagtgactgcggccatcacgaccagcgacccgaccatgagaccctggccccaggcttcgaggaccaggccgtccgggtcggtgggacgggtgatacggtcagactctgcgggagagttcattggggcagcaaccacgtggaattatggtgcgaccattgtgtgatgggttttacgaaggagaggtggcaggggtggacggggtggacggggtggaccctttataggatatatataacatagcgtaggggacttgagagggagcttgggtaagcagggatcgtttgagggagcgtgtgctggttaaatacgagttacgttggtgggctgatattcaaagatgcatacactagctagactagcattgacggcatttgactggcatctaacattgctttgactctgctcttcaacgcgtcagcccatgccactttctggcagggtatatagtggtgtccctgtttcaaggcactgttcgcatccaaaccatgccatttagggaatctggggtgttgtggggtaaagaatggggtgatggtctataggccagtgcgtgccctcgcagtgtgactcgcagtgtgacatagggctggaaatcgaggaaatctccagaaactggggaacgaataataacgcgaaatgtactctgagaagctgggatcggtcaaacagccgatccaagggggaggaaatctccggttgagaaatctaggccctcttgtttgactctgattcgcttttctttcgagctagcgtcgcaggattctaattccccgtccattgccgacgctattttgtgaggctttcatgtgcttccactgtaggttttccatctggctcagtgcctgctccgatcatactttgcatcccctcttgagagactttcctccttcttccagtactgttataaaaatcttctttgttcttgtttcacactgtttatcctctctctcatattgcttgtctacactcattctcctcttactgtcgattctgatcgtcaatcacctcggagttagaatcattcctcctttccttctctagttctaagctcgtccttgttacttatccgtactatttgaccgcttccttctttctataaataaacttttctctcttctttaattcactgttcccatcactactctatgatctctcctattcctgtatgacttgaaaggagataaactgtttcattcctcgttctccctcttatgatcatctttaactaaatctcacattctcccttgtcttcctctatgataaattatacttctattcctcgctctcatctttcctcacctgtcttcactctcttcaattcctgtccctatttatcttctttccttcctactataggtattacctttctcttgtttctcttctggcacagggctcctcttatcgctttccgctaattacaactatcgatgataggctgtttaccccctcgaggtttccccatacttttcgctgtgcttgcaccacacacctttctaccgttctaaggtcctctatgtcttctcattactcacagtgcaattactgtgtttccctacttccctccttcctacatccatatcacctattctctaattctatccttgtctctctctgtgatgctctatttccccaacctttctcgttccttattacgtatatctattctcaattcttgt

SEQ ID NO: 4968 - DNA, 2561 bp, Emericella nidulans
ctgaaggggaggaatccccaacctcgacggacggcaccctgccgctgccctctgcaggctgcaaccaccgctctggacgaaactgctcggcgtcgtccccgtagatttccgtaaacctttgcatcgtccggtagaataatgcacgatcgccttcttggccacgaatataggctggcatccgtcgacgcctccgccgcgcgggaggaatgtgtgttgtgttgcgcaccggatgttcgtagggactggagggaggaggcggagggctgaaggttgggcgtgtgcatccttgtgttagccagccgcccaggcaccaaatacaagtcacgggataaggcgtggtgggttctgcataccttcattcaacactgcccgcacatacttcatctcgcggagctgggtatatgtcggtaatgggcatttcccatctccctgggttgcaaggccaaactctacaagcacctccctctccagtttccgccagacgctcggatgccgtgcaagcatatagaagacactgctcaacagtcttgctgtggtatccctcgcggccaaaagcacgtgcagcagctggctgcgaatctgcacgccgtcgctgactgtgtcggctagctgggagagaaggtcataccagccctcgctctcgctctcattcccacaccctctccccagcttgcctctattctcatgagccggactcctacgttgctccagagcctcatagacgaactcgtcaacagccgcatgcacaattacatcgtcaacaaacttggtattcttcacgagtccccgaaacggacctagattcgcccggacctggagataagaccgggcctcgtcgaatgcgtgactgaacggttcagcgtcgaagtctcctcgcgggcttcttgcgatcttggccggccgcccaagaagtgaatgaatgcgctgtcgagagtcaagtcgcgaacgagctgctggaggttgactatgtcatatcctctgggaatccgatagagtcgactttgaacgtgctcttcgatcagcaggaggtcaggtaatgcttgcgctctgttgaagataggtctgaggagcgccctgctcctttcccattcccttccgtcctgagtgaaaactcccgtctccaatagcggcctgaacgccgcgttcctctcgcccaggtcgaagtcaacgaactttgttgctagtaccgccttgatattctccgggtcaggagtggatacatagcgtttacctaagaggaccgcagacatggttgggccgttggccctgtgatttcatggtggctatggagagtgatcccgttgcgagcattctgctgcatgcgcttgaagagggcgaggccgaggactctctcgctttgccggagaggccgcgcaaggaagaggctgtgggctttgcggtaccgatgggctgagatggctgctgcgagatttgtggattgtgatggtgatcgccacgggggcggaaaaggcgcagaggtataggatcccgtggcacatagtgactgactctcctcgttctcccttctcttctctccttcttctttctccctctctatcaacctgattctaggagtgcctatcttatgtcaaaactatccttcgcgttgaaattcgcggagtgtaaccaggtaggaggcgtcctgttgaagttaaccagtaaagtcagcttacgctccggtgggagttaagacagcttgcctgcagcctaaagtagtggcatagtcgatacgatgggctacgagttgtgcagtcttctgcagtctgcagctaaactgattggcctaatatcttgatatcctgttggcgttgcttgcattatagggtgtgcttgtgtgtttctcttcacggctgaacagtgaatccctgcaccctcaagcgtcgttgcttcggacagcagcggcagcagttgctccaattccaacctcagtggtcataatactctcttcccgaacgttataatcgtcccacggtacattgacataatcatgtacagaacagccctacacccagcaagaccgactccgcgtcacagcatacactctcttcgccggattctaacactcgcactctcgcacgtctctcatcttctctctccctggggcccaccacccccgtcagctggtgctgtacggcaccgcccccatggcgagcgagattggggactgtgtgtgtgtcctcgctgcggtctgcaaacctgggtgtgaatgcccgcgttggggggtagatatcctctagtcaactactcgaggacattcaccctgattcaactattggctaggcttgaatgagacaccttgtgcgggctggaatgcgcaggggatatttcagttggtgacggctagtttgccgtctgagagtaacagcgcatacagcaggcgtatgctctctctacttcatcggcaattgcgttcgttttctgttcttgtcaaggcttgctcggatcgcgccatcgagggcttgagggtgctgaacagagtgttagcaatatgctccagctggaaaatagaggagaattttgaacagcctaaagccctaactaccttcagaaatcagaacctc

SEQ ID NO: 4969 - DNA, 4761 bp, Emericella nidulans
caatggtcgtatgatggacagcgccattctcatggactcgggttgcctgaggcgtcaagaggccacgggatcatggggtgcggttttaccaacccatttgctaggacaaaagatgctgtcagagaagatgagacacatgcaacatctacatcattaagcgcgcgaccggtgccagaagcaagaacaatagaagctctgtatttcacatcatagtatccactagctcaattccaaaattgcgatggatgtttaagagtctcgacgcgtttgttggaaaatcgcttgtcgcgccttggtctgcgacacgaccgaggcgaagcactcccgaaacagatcaacgcaacgcggagacggcaagggaaaacaaaagagcgctcgtcaagtgtatgacaaatttgtttcatgcagtcacatactagaattatcaggataagaaaagatgtacataccgacaaggctggactattaaaatgccgactcgcgagcgaaggatggatggccagtcccgaaatagcagctgttggcaggttgtgaaagactgcgagggatggaaggtcacgggacccgcagaaggaaacaagaggcccgtctgatggagaccaaggaagtcagcaaataatggctaccagctccaacaacaacatgaatcgaacgggagacagcagcagaacaatataaaagagttaattgatcatcataagcaagaagcataacgatggtatacaaatgaccagaatacgtccgaagcaatgccataaagcgcggtggttccgtcgaatagtcggccagtgaagtgcgtggccacaagagagcgcggcgtgtcacaggcccaatgacgggaagataggcagcgggcaggatggtatggaaacaaaggacgtaccttgcaatagtacaccatacactgtcgtacggtatgaccttggccaaaattgtgtattttatgaaagactaatgataaagacggaattttcgatcgcttgaaaagccgatgagtggaggcacaaggagatgggggatgccgggaatggggacaggcgtggaggaaggcgaccccagatacgatcaagggtggctgggagatatcaaaagtcagacagagcctgacgtataagtttccagtaagttattttaccagatctgagcagtaataatcttagcagcagagacacaggagaagcaagtcagtcggtccgttagttagcaggaaaggggtttccaactttccagtggcccggccgggatattgcgttcttccgctccggatggatcccgtggaatgccacagttctgcgcttggccattcatcgttcaagcatggaatgccgtgcttagcggggagatgatcatatctcttggattctgcgagtagcggctggaagatcattgagattgctctttgcccgttcaaggggcctcagaatagctgttgggattttgttagcatctgcttcgaattagctcagtttgttttggcccaacagagcctcccaatgctcgtcgcaggtggtcccagctcgatcagcgccaatgcagtgttatccacgatcatgatgtaacatggcttgcacggccggtttgtgaagaactggacatcctttgggttaagctggcaggatttgacagcttgccgctatatggaggatcagaagccataccttacggcaggcgtttaggttagtaggtagaaagatgcagtcacaccaagaaggccagtgtagcgactcaatcagaaaggaaatcgccaacagaagcagattcagagaggcaatcagcacgagggaaaagagaggaagggagggattggagagcagcttggtcacggagaagagggttatttataagcgctcacgctgcccacctgatggaaatgatccgcccaatcttcagcgcgttaaaaggtatggatgagcagtgacggagctggaactgtttgacaacccctcgctgtatcccgaattaatccttgggcgcatccaactctagattccttaatcacgggattgcgagagaccaccgtgccttgtccatggatttgctgtctcacctgccacgtccatataactgctccactacgatgggagattgagctagattgaaaaacatggggttgctactagacgaggtggatgcagaggtgcatagaatgtttggccagccgcgaagagcattgctcctaagtctgaaactaaataaaacagatactccagccgcagtacagccgcagttgaccgtgttggctgctgcgtcatattggtagtctggcaattttaaagtcggtgatctctgccgaactggcgatcaacagtggtagagttgagggtaaattctcaaatcccgagtatattattatggttacacgccatactcaggaagaaagaacacctctcgccttgaatcagatatttcatagtatgtgctccggccgagcagcattaatcgaggtaatcgtagcgaataggcctgctactatcctggatacggcaagcccatacatacatgcatcattcaacgctcctagtttagccagagagcttttctatctactcaaggtagctcaaaccaagatgagttttggtctgcttctgacggattctttgccacacaaagacgccaagattttggtcacgtgaccaagctacgtgagcaacggctatcgctgttgctgcgtagctccagacactgctcagacaaggctcttaaacacttttgactacaaccatcttccaatcattcctgatctttctcagacgcccgcagatctttgacctttctaatttcttagctagaaacattcgcaatgggagatatcgccgtggaaaacccggcgagcgtcctctcgtcttacacgaaggcagctcctttggatactatcccgaacatcgattcactcgaaggaacaggggccgatgatggcgatgaatacgctactttgaagaaactgcagaggcacctggagtatgttttgcctacacatcgaagcccgcttcgtgagctgatcaaaggattacaggtacatcaagctccaagaagaatacatcaaagatgagcaaaggtttgcctgccgccgcgggttcgcaaagccgcttactgatttgattaaataggagcttgaagagggagctagttcgtgcacaggaggaaatcaagcggatacagagcgtacccttggtgataggccagttcatggaagcgatcgaccagaagtacgacagtcatactcgttgttaaggctcaggctaatgttggtcccagcaccggcattgtacagtcgtcgaccggctcgaactacgttgtccgcattctttccacccttgatcgcgaaaagctgaagccatcatcctccgttgccctgcatcgccattccaatgcccttgtggatattctacccccggaggcggactcttcaatcgccatgctaggcgaaaacgagaaaccggatgttacatatgcggacgttggtggtcttgatatgcagaaacaggaaatcagagaagccgttgaacttcctttgacgcactttgacctctacaaacaaattggtatgttttcctctgtgtactacaacgccagtttccagttctgattgtctttctccgtttaggtattgaccctccccgtggtgttctcttatacggccctccgggtaccggaaaaactatgctggtcaaggctgttgcaaacagcaccactgctagcttcattcgggtgaacggctcggaattcgtgcagaagtatctcggagagggacctcgcatggttcgcgatgtcttcagaatggcgcgggagaactcaccggcaattatattcatcgatgaaatcgatgccattgctacaaaacgtttcgatgcacaaactggtgctgatcgcgaggttcagcgtattctcctggaacttctgaaccagatggacggtttcgagcagactagcaatgtgaaggtcatcatggccactaaccgagcagataccctggatccagccttgcttcgacccgggcgtctggatcgaaagattgagttcccctctctccgggataggagggaacgccgactgattttctccacgattgcctctaaaatgtccttatctcctgaggtagatctcgactcgcttattgtgcgaaacgagcctttgtctggtgctgtcattgcagcaattatgcaagaagccggtcttcgcgcagttcgcaagaaccgatacaatatcatccagtcagaccttgaagacgcttactcagcccaggttaagaccggacaggaggccgacaggtatgtttttctcacatcagcttcgatatctatgcaatagcgctaattttcattttgcaggcttgaattttaccggtaagggggagcgtctttactatcgggggtagtgtttcggctgtgcatagcaagaaggtagaaataaactgtatcaccaaaatctttgggtagcagatgtggtaatgggctttctctcgctactgggcagctagtatgctcttgtgagaaaactgataagttaagcaaacaagaagccttgggtgaactaaattcgccattacatccgattccaggctgcagtaatatatatcgctccggcacggatagatataaatcacggagtccagtagctgctcattgcttctaatttatgtttttcttagggttattcgaacagctcagtcaattaaagtgaaaatgggttcgattctgcaggcatgagaagagtccattcagccacctacctcggctgacttcaaggttcccaacaaggtta

SEQ ID NO: 4970 - DNA, 9627 bp, Emericella nidulans
caccaatgaattgcttcactggcgctgtcgaacaacaggtcatcagaaatcggtcatgctggtgttcttcagttcatttggctcttggcggctgggcatctggcttcaattctggctacaattctggctcaatccaggcttcaacccaggcttcaattgtcaggtagttcttacctttacgtactcctcgagtatgtggaccgtcccgcacacgagtcccaagatccaggcgcttggatcgtcgcaaaacaagaatccacttccataagagcttgagatccgtcttctactcagagtagactctacgtaggaagaaagaaagaaagaaagaaagaaagaaaattgggccgtcttgccaactgattgccaactgatcttggatcgcgcgatatctgagtcaggcccttgacttaagcccgccacgctgtcactgttatcggttcatcagcgtctaagccagacaaattttttaataaaaaaatttttaattcagctactgtttactagcatacggagtgcaatctagggttgtagaaatggcttgtcaagtcgccaggaaataataccgagtattaaaccgtgagattggtgatatgcagtgatatgctaattctaacagtgaccggaggtttccatctctttttcggacttttgtccagttactccgccatgagacactgtcgttaaatctaccgtctgggcataccacggccacggcctccacccagagcccgctgtgcagcacctgggggcaggccgcgcgaaggtgcctgaggcgcagcaaattcttggttctctgtggtagatgtcagcgatttgtttctcagaagagttagtacatgctaggaggactcactgatagtctcgtcaacgctcagaatcagacaagcggcctcgacggccgcttggatggcgttgaccttgaccaggctaggttcccagacaaaagcggccatgttgtcccggacgccttcgtggtcaaagtccacaccagcccacgtgttgcccttgtgatgttccacccggagacggttcaggatgtccgtagcgtcaaagcctgcattgtcgcacagctgtcggggaataacctccagagccttggcaaacgccttcacaacggcctgctgcttgtagggcaccgttttggtcggcataccgatggaggtagccagacagctccagttctgtggcaccaccacccgcaacgatggttgtgttgcgcagtgcacgcttaacaatcatgatggcgtcgagcagacttcgttcaacttcagcaatgaactgctctgcttcaccgcgcagcacaagggtgcaccgttttcgccttggggcactcggaaaacaggttgtaccgctccccaccaatctggcgctcctcaaacgagccgcaggtacccaggtggcggtcctggatatcgctgcatgtggactgaacggcagcaccagtcgcctggcacacacggtccatatcatctgacgcaacacgaccagcacagaagacgtcgcggtccgcaaagtatctaggatgaacgttagaattaagcacccagggaggcgtcagcgtagacgtactgtgtagccaagtcaccaataggcagtttgctgagaacgaccttggcccctgatttgtagatagcctcgagcttgttgtagatgatctgccactccgcatcgacgatggcctggtactcggacacttgctctactcgaacctcggcgttgtccttttcactcttcagttccaactccacattcaaacacacgatcttcgggttcttaaaggacttgggctgttgttcgaaaccggcgtaggagaatgtctttttgaatgccactccattgacgaagagagagtcctgcagaccaccgccagtgacctttttaaccccaatcaacttctcattcagatcgtcttggtcgagcgagagaaccgcatccacaaccactagtagaggttagttattaccgtgcccaacgcattcaggtcgacagccagattactcacttttcgtgaaaaagtccgagttccgcttgatcagtttgctgttcatggcggttgcagccagccgccgcagagtctcaatcttcttctcctcgcttccagcagcgtcaatcatgtccacggcaatttcctttactttattgacggccatcgcactcgaggttcgtagacccttgacaatagtttgcgcgctcacaccctgttcaaccaactcccgaacctccttaagaatctcacccgcgaggaccacgactgatgttgttccatctccaacttcggcatcttgagagcgagcaatatcggtaagaattctggcggccgggtgcacgatatctagcagctatacagcagaaagcccgtcagcaaacttttccttgtgtcttacaccaaccaatagcaagcgaaccttcatgactgtagcgccatcgtttgtgattgtctgcttgccgttgctatcaacaagtaacaagtcacctccatatggtccgagagtgctcttcactgtggactgaacggccacgcaggcattgatattagagaggatctggccctttccttgcgaagcatcggtgcctatttaatagtgaaaaaataacatgggttagcagaagtcaacaacctcaacacacattggcgaagaggggttcgaaatgcgggcggaacccaccctctctgaggacaacgatggtgggagtttggccagcgaaggccataatggtatatttgctgcggagaagaacagataataagaaagaaacagttgtgcaagaccagaataataggggccagcaggagacgggtgatagagcggtccgtccgaatgctctcgaccaaaatttccccgagcttctcatttcatcgcacctctagcactgaggcggtgaccaatcacgccgcgccccgcaaccctactctgagctgtaaaagttgtagtctaggacagttacctctgacttacaacatactcgctaggataattaaagagctaccttcattctcaaagtctaaagagtcaggttctgagattggatgacaaagtgggtgattgcgtcttgccgttgtgtaatgctgcttctgtatcgttttcaggatatatattcatgttctgaggatcaaacggagacatcttagaactatgttacatataataatctattgatggcctcgggactataacaagacaggatatatttatcgaaaagcacccacgtgcttagcgaacaaaagttcgaacgccgtttcccaaacacctcgctcgctatgtcatcgcatgcaaatatgaaaacaagaaaagcaatcccgtatatatacaagtattcgttcgactagtatgaaaggtagattcgtggctgagcaaaaagtccgtttcgagattcgattaactttggcggagggtggccctgaagtgcttcagcagttactcgccatcggcgccagcaattagtcgactgatgataagtatctccgcaaaaactgcagcgcgtagtcatcggcttcgcttgaggatggcttgggctatgcttgggaggctggctgtagctgtggcgtgctctcgctgtttgctcctggtctcgacgcatctgttggatgacatattcattgatctcctcctgactgggccgcttagaatgaccacgccgtaatgcccgttgattctgcatttcctgaacgacaaaggaattgatatcctcctgcgtgagggaccgaggcgtctgtggtacctctgactgggcgaaagagaccttgcgtgcagagccgctctctcgcttatcccggcgttgctgtagaagcagctgctcttgcttgagtgctaggtctacaagttctcgaaatgacatgcaaccggtcaggttggaagcattgattcgactgtcccgcagcatagccaatgcccattctctccattcaggacgtgatttcaacttggtcagaaaatgcaggttgatttgtgagtctggaattttgatgtcctcatcgatcacgtacagcccctcgcggacagcatctatgagagcaacaaagtcggaaacgaaatgcggttgcgttgagtctatatcaaggaactcgtcgatttggtgtagtaaacggacattccggtgccaggaatccatgttgctgcgttgagtaaaggaaggccgtaaaaaacataagacgtaagatctttgtcaggcgtttattatgtgttttctctgcatcagaggcacaggctccttcgatggtttggcgggcgcttccaaatcatgtgtctagcatgacgtcagttagccttgtattgtcgtaaatacctgtatcttcccgcctcgctgagcttttcagcgcgtattgcgttaccaccaaagcatcagcagagcccttcaatttccatttcttcaggactttctcaggggatctggatcatctgaccgggttcccgtcatggggcctgtgatctcctgagatatctgggagaccatactcaaacattgatcgatgttgctactcgcaatctacgaagtagacactaagttcgctacgcggcgctaactagatggcagtgcatttccccaaaacatcctgatttccactcattataggtcaagtcagacgcccatgactcgctcaggagtggcagggcccatcgatgtttgcccgaccctgttgcagtgccatcatcgcgctcatctatcacttattattattttcgcttgacgagcctaccactgtcttcggacagataccataaagctatgttcgcacagtcctagacctccagacaggtacgtatcgaagcggataatggagactgtgccgccgtcctatgaaactgcaacgaccagggacgcttggaccataatcgcccaatacataccatcgagcgacctctgcgctgctactctagtctgacgaagatggcatgcagtgttcatgccgtttctctggggaaacccagcatctcactttggaacggaaaatgatgaagtctacggtaactgctacccaaccgctctataatatactaacattctgatctctacgacagtcgctttgacgagattcagaaggaccctcaggtatgcccgtcctgaagtacggaggctaacgcacaccctccatatgcctccagcgctttcggagatttatggcggcccacgtcctgaatggctgcgagagatcttcgagtacctgccatgtctgcagtctctgatagtgtctgaattgccgttcttcgaccacagtgccatgatggctttgcggggtgctgtgtcggggggagtatcatcgcgaacatacaatacacgcctgctcatagcggagcgcgaaccgaacacgacgtctttgggcatagcggagacattgttacgctttccggagctgatatatctcgatttatcgtaaacgacatctgcgaaagacctgtccagtcctattgtcgttatcccgactagtgcggctgcatgtgctcaagctgcgaggtatcgtattgatgcatattgatgcagcgtttttggcaaatgctatcggccatagggttcggttccttgacctgcgggagaataagcttaccgacacggctcttcagccgctacttcatgcttgttttgggccgccaaaccatgatcatctgcgtcctcaatcaacctttctccgatcgcccgggttggacgagaaattccgaaaggcgttgacaagtcctttgacaggtcgctcttgggttgaagatctaccaaatgtgggaatcacacatctttatctcgcggacaaccagtttagtgtcaacgggatagcgagcatcttagcgacatcccaactacatgttttagatgtaggaactcttgatatggcgaagcgcagcatcaaagttcagtccaatggaagacgcgaagcatacgcgggttctgagaagctgatacccattctgggcacggctgcaaaggagaatttaacttacctgagggcgcatcatactatttgcacctctaccgctctgcaggaaaggtcgatgtcaggggttgatttccttccagagctttcgggcaagcatgcgatggcgcgtgcaagtgagctggatactctcgccacccagatacatgagctccccgcagacaacactccagtgtttgaagttgcaggaagtaccccaagaccccagtcatctgacagtgtgtgcagtaataaagacggccaaagtggcatcggatatgaacatgaacgtccaatggccccaaggcgaggctctgctttcgcgccagaggtgttgcctagccctaacgaagccattaggaccactttggccggcttttcggacacacacgctacaatatcaagtgcacccattccattgtgtagttctcctagtctcatggaaggtccgcgtgcacgaaaaatccaagaactgcttgcaaagcgacctaactatcagcctcgccgacaaggaatcggaagctactttgattttctccacccttcccatattcctcaccttgaggttttggtgctcacagatgttccgtcccacgtttctgccacctcaccaatcctggagtcgttgattcgctttgtgactgcttgctccaacgaagcgctactcgcaaccctacaagcaggatcagattactccctaccaccgggccaagaccgggcgagggctgagcaggaacgagcaaagtccctgctttggcttgcgccagctagtcctggaaataacaccagtaacccactccctccaacctattaaatcgaccgcttggaaatccgtcagcgcccagattggacaccaaaggtcagtgacgggtgactgggatctcgaacgcctttggtccgcagcatcggatgactttagttttttcaacgaaaccgaatgtgggattccagctgatggtacaacatgcacagcggaaactcataatgcttcgtctgcatctgtaccgtcagtaccaatcgtggatctcgtatctgaactggccgctttccggcggagaaagaaactggaatatgagcaggttgtacggtccacttttcagagaagaagcatggatgacaccctattgcctcagtctcagtctcagtacacaatgggctcggctgctggggcgtccccgtcttcaagcgtccgagcgttgagtcccgtccctggaccttattcgttcatcgcccaccatgttgaagggcactggaaaggggaagtcaagattgtccgaaatgcgacccctaaggggcgaagcgggtgggtggacctgtatgggaactattttgagacagggtacttgtatccctgagagatatcgacatcaagtgcgataacggcatgatgctggggcatgaatgctttatacccgcagatagcatattatttgtactcttcttcgaacacgttccggtactagatttctctcttttgagtcgtaattctcccgtactttatcctactccgtcccgctataatgggaaaagatgtgggtcataatcttatatttatttttggtatcgtcttatgaagtctggtgcttcaagaccggtaatgtcttttttcaaccccgaggtgaaacccgttcattccattggcaccgtgtaagaagagtctgttcacaaaaaaaagggaaaagtaacattcatgccgttttaactaattccattttcccgtgacacccttacatagccttggcggcctggggagggttcagcttcttgccgtccttgttgtacctaatgcgagggggaggggcacggttgcgacgaccttcccgggagcggacactattaaaaatcgttagaaccagagttatgccggagtcgatttcaaagcatcagggtagaaggcgtaccgaacgatcttgccgtggatagcgcaggagacgcagtactgcagcttgaggtacatcttggggacggcgtagtcggcgaagacggaggcgtcggagatatcacctagaaagcggaaagttcaggttagtgtctgttgcgctctgaatatccagttttccgacccgtgcgtgcgatgttttcgatattccgtgccattctcgaggtttccaatcacgtagtccagctctttcggtacaacagcgcacaacggatcgaaggttcattcggaggcggggtcaacgtacggatggcagcagactcgaccatgttgcggatggtgaatctcttgatggccttgtccttgggaacgcagcgagcgcagttggagcagcgcacgggcttaacgtggccgcggccgttcttgttgcggccgctataaaactgttagtttctgacattgaatccatactatttccgaacgctttcgagcttctattctcttattcccgctcgtcatgagatgatattgagcatctttcaaggtgagagtatagcagtcgtccattggcgccacattcgagagttcgggaagtcgatatagagtccaaaatcgtgctagacagggaagggttgcggtcttacttgttcgccctcttcttgaccattttgacggatttctctggatttcggttagagaatgtaaagtcaaaagttaggggttgaaggaaaggtcgacgcgtacttgggtgtcggggttggttgtcgttagtgctccagtctccggacgctcactctttcgggatggagatatgtcagtgtgtgttgaaagccctatccccttaagcgagttccggtcacgggatttgcagcctgaggcaaataaaagttttttaagcatatgcctcaggaacctaagatccaagcgggcggatgcacgtgccgattggcggctctccaaaatggactagcggccgcccagtgccagcggattgtttcggtcagccaatacggggatttcagtttacttcatgttgggccagagtcaggccacaccgtcaataaacgatttacagtgatagtgtcacctggcttgatccagtctcattaatgaagggattacatatggtgtacatataagtcggggtcgtgtgacagaagctcttcaaggaagagtcctctattgaaaatcgaagctagtttaagcggcgacaacaaatagtcgatctgggctaaagcctccactagaaatccccccctgtcttgcggtctgcccgtatctttctcgttggctcgcatcgtctttcttgtctttcatcccgcctgttttcgtcttttttaaagtttatcgagtcaatcagtcctcgaaaacatttacttcatctctcattcatttttcctgatccctgaattccggtccgccgtttccaggtcctagatatgtcttcaactcccacctttcggggcactactagccacagaaccgtcggacgcggcagattgcctgattttgagggaggcagctcagcttctcacattccacgccctcgacccgagtcttcgtcaacgattacttctcacaaccctcacacgccatcaagtgacatcggcagttccacaatgagtgcggcaagcagtcggcaaaggcagaaccagtcgaagcgcgatgaggtacgagaaattcttccacaagccttatataggcgataatacagttgtgaacatgtggttctgattcattttgtgcattaggctattcgacggaagctggaggcggacctcaacaagaagagaagcaacccagcaagagcgaatcgcactcgcaaagctcccccaggcactgtcct

SEQ ID NO: 4971 - DNA, 3104 bp, Emericella nidulans
  unsure (1)..(3104): unsure at all n locations
ctgcaaaggagggtggggattaaaaaatttccataccgatttgagttattgtttttttctacagactggtattcttggtacagcttaggcagcggtcatagctgcagagatacgttcgggttacccttgcactcatattgaatcattgttttgcattgaaggcggagtgcttcacacgcagtttgtcactcaactcgggagagtggtagtgagcaagccggctaaaaattctggatgggtggtgcagtgtgaatttggcgaaacaattgctcccggtcaacttggacattcatgatcgctaaagcccactcatgctgtcgagcgaaacgccgaattgcacctggccgcaactcaatgatcctactggaacgccatgaagctgccagttgcaaacacttgatctggatattccggtgaccttccgtcttagggcaaacttgagagcgccatgacactaaattgcccgttatttgccacctcaaaacccacacactccacgtacttactatagtttggctgaatcaggaagctaggatatgaatcaaggcgctgtttgcgttatgctggcttgtctatcaaagtggaagccgtgtgctttagccgcttcggagtatgcatactttttacaagaaatgcttagagaaatgggacaaggtaaaaagaacccatttatcattgacctggtgggttcaataagcgtcaggaaagtaatatatatgtttacaactcatatattctttgatatatcctattcacaccggaggcttagctatagtaatactaataaagacgttctgcatacatgcaacaccggtgtaactgtcatgttttaatggtcgacagattttgcacttctgaggggctcctagagcactggcccatatgccggtggcctatggcaagttcagggtccagcgcatgttgccaagtaagccatcgtgttatctccggttgagcagtcatcgcgagcaagagtcacgatcttgccatctttcactggctcgatgatgtttaaaagcccaattttctgggtctccagcctgcggaatcgcttcaagatagagtcgtatgtggacaatttgtttagcacctcagctcacaggtgggctctccacgtgcttcgagttacgcaagtcaaaagccactggtaactcagtccaagctactcatgaagctaaaccgaatgaaagggtatagcatgctcagttaagtgctcggccccttcaatgacattctgtgtataaattacaccttcttagaaaagcttctgctacaaggctgtcaacgaataccagttgatccgtatttgtctagccaacttggacgaatagttcacgagaacagtactcgataaggtattcaaagtgtcagcggcccccgttcccaaaaaggcgctcgggagcacagccatatactgctctcgatcgtctattgattcgtcagcttgtgctaggaatcttatttggtttagggatgtatggagagattggagatcactctggggttgtgatgtcctgccgctctgcatcgccactgtaatacagaacagtcggttattctgctggatttatttgatactaagttacttcgcttctgattagatatgcacaaccttagaaacttttcaggtttttcgattgagtccggaaccatttcctcgattttggcaattctaacatacagtcctagttaacaagcaagtcgctcaggattggctgaaatgagcatgcttagctcggtgcagacctaaaggtattgatgacgagaagtgtgtccatcttctacgtgcggtggtgaaagagaagaatttaaagaatatatttatacaggcacattgtataatggtagctcgctcgtgtctcattcaagaacaaaccataccgaaacgcgactaatcttccaagacaattatgttaaaggacgctaaagatcctataacagtcttgagccttagcaaaacattttttaaacgttcagcaaatcttactgcttcaactttatcctactgataatgagcaattctaacaatggcagactccactcccgtctctgattggagctagagaacgacggagtattcacttacctaaacaggctagctctcgcttctacccgcggctaacactaataaaggctagttgtatacctagtttctgcgcacgcaatcataaacaacttccacgattataatccttcccagcttgagcaaaacgaagataattgtatagatcgctgagtcatacatcacgcgcccttatagctcagtcgtagagcgctccactcgtaactaatgaattggagaggtccgcagttcaatcttgcgtgngggcatagcaatcccttgcttttttgttgtttttgcttcttaggacagctcgaataccattggaagctaagattctggtttttgctggtatcactctcgattaagggtcgcttttttcgacggcagctctaccatggccggcactttctattgtagtctttagctataatggttaatatttcctgcaccatttcctacttcaggacagtaaaggagatcatgagttagggtgcttttggtgggggagttcgatgggatccagctgccgcgaagtcctgcatatgcgttcgtataattcataattccaccatggtcccaatctgttgtggaggagttgattgattctacagcgcaggctccttcacactctgaaatacggcattgtagtgcatgtgtggtatgcatgagtgcgtgtccctcaatgagctttcgatctttatatacatggccaggtttagatcagtactccgattcaaacagaattacattccatctttgaagatactaaagcctaggtatatatccctgtcgaacttacatgagtaattaagcctcaaacgagcttacccagtttgataacagaggcgaaggggcattaccacgtatagaggaagaaagtggatatgctacgcgctcccgcagtcttctccaattccatcgcgtcccgtcgtgtcaatgaaatcaccgcctgctttctttctctccaatgacaactacgcacgatttttgagctcattgccaaagaaatctaatttgacaagactgaagcttcaacact

SEQ ID NO: 4972 - DNA, 646 bp, Emericella nidulans
aagaaaagaaggggccggacccacccccaggccaagaagaacggaacgacacgaacaccgcagaggaaaaaggcaaaagcggccgcagggacaagcgacggaatagacagcgacgggggacccgggccaaacccgcaggcacacgccccaagagaccccgagagcaaacaaacacacagcgaacgcaaggccacggaacgccacagacccacccaacgaaacacgagagcccagctcgcagaccgaaaaacgaaaggggcaagcgccgaggggcagaccgacacaacgccaagaacaaaaacgccaatacgcgcaaccaacgcgcaagccccagcgccaccgacgagaaaagcagcaccccagagcccacaaacaaaaggggaataagggcccgcagacagaacaaagacgacaggcgcgaggaccacacgcagcccaagcaaacgcagggcccggaaaacagcaacctgagcacagacccaaaaagacgcgagccccagccgaacaagcaagccgaaactaacaaccagaaaaccaggcagccaaaaaggaaagcgacaaacggcggacaaacaaagacaacagcgaagacgcaacgagccccaaaaaggaagaaaaaaaaccaaaaacgaccccacgcaaggac

SEQ ID NO: 4973 - DNA, 7322 bp, Emericella nidulans
tcgctggtaacatgctagtaacgccagttacgctccatcaaacggcttatgatgcgactttttgttcattggctgagatgataagtagcgggtctggttcagggcgcccaacgccttccatggattcgtttgcgcttcaggttatttgttggtaaaccaacccactgcgatactccgtatatcctgttgtagcggcttgaaaagccgacgcagatattcttagaggactcaagacgcctccacgggtatcacatttcggcgcggcagcggatctattgctcctatattgcggtaggaggagataacgtccctaaaacctcatgaacgaggacaccaagctgcagccaccaacgaagcttaagttttgagcacctacctcaatcttaattgaccgtggcccatgttgacctgataacgggcgtaaaacaagtagaatactgctttaaatactaccagtcgcgttcagcataaaattacgcggaatctgcaatcttgtattggcagtacgccaagatacagttcaagacacataagccacagaaagcagctggtgtcgcgtaccatgacggtaaattcgcagattcagcgcccaaaatagtgacagaccccctccccggcaggccagccagtctgattttcctgttggacaatcagttccctttccactctcgctgaccgtccaactaacttgtctgctccctcccttcgtccttctcttagtttcctttctttcttttcgaggcttcactttttcttcagttgcttttgagtcccagtccgctctttttcatcgtttgtactcggaagcttatcgaccacggaccgtactccccttccttccttgtgcctgttgttcggggaaagaagaggaggcgaggctgcggtgccccttcctgttgggtcaaaagagtttcctctcgttatcttccatcatcattcgtttgacaatttttcagaatcgatcgagaacctcttcgagtagaagaggacaaaagaatccttcacgaatcgtcgcttttcgattgggcttgataatactacaaggttgacggacaggtccggtgccttcgagcgatcgccaactccgactgttttcacgaagcgcctagtgcatgatctttagattcgctcgtctataaccgctgatttgttctgtcgatgctataattactgaagcttgatcggactaatatttaatgggcctttgtttctgtgagtttggttgtcttgttacttgcattttttgggttcagaactaacagcaacaagagaacctcggtgattgtcgcttgtcataatgtcgggctacccacaaggttcgggctatcagcacggcaactacgatgatggctatgaccatcagggtcatggcgatgcttactatcaagatgaccaccatgctcaagctggttattatgataaccaagactatggggatggctactacgatagagggtaacttccctttattctaaagacatgcctcgcatttgtgctgattttttttttagtggctacggggatcatggctaccagcatgatggctactacgatgcgggccaccacgatgactactacggcgatcagtattacgcccagggaggtcaaggcagaggacgacatggtcgtgactccgaggaagagtcggagacctttagtgatttcactatgaggtctgaaacagcccgtgctgccgacatggactactatgggcgcggggacgaacggtacaacagttacactgatagccagtacggacacggaggctacggttaccgccccccttcttcgcaggtgtcgtacggtggtaaccggtcttctggagcgtcgacaccagtgtatggaatggattacggcaatggcttgcctgcaggccagcgatcccgagagccataccctgcctgggcttccgatggccaagttccggtttcaaaggaggagatcgaagacattttcattgaccttgtcaacaaattcggttttcagcgggacagcatgcgcaacatgtacgaccatctaatgacccagttggactcccgtgcctcccgcatgactcctaaccaggcgctcctctcccttcatgcggactacattggtggtgacaatgccaactaccgccgttggtacttcgccgcccatttagatctcgacgatgcggttggttttgccaacatgaaactgggtaaagcagaccgcaaaacaagaaaagctcgtaaggctgcgaagaagaaggcacaagaaaatccagaggacgtcgaaggaacgctcgaggcgctggaaggcgacaatagcctagaggccgctgaatacaggtggaagacacggatgaaccgtatgtctcagcatgaaagggtgcgccaattggcactgtacctactctgttggggcgaggccaaccaagtccggtttttgcccgaggctctttgctttatcttcaaatgtgccgacgacttttacaactcgcccgagtgccagaaccgagtggaacctgttgaagagttcacatatctcaatgagatcatcactcctctgtatcagtattgccgtgaccagggttatgagattttggatggcaagtatgttcgccgtgagcgtgatcataaccagatcattggatatgatgacatgaatcagctcttctggtacccagagggaattgagcgtatcgtgctggaggacaagacccgcctcgttgacattcccactgcagaaaggtggaccaagctcaaggaggtgaactggaagaaggtcttcttcaagacttacaaggagacacgttcctggttccatctggttacaaacttcaaccgtatctgggtcatccatctgggtgctttctggtttttcaccgcgtataacgcccctaccatttacactaagaactacagacagcagctcaacaacaaaccaccaggagcttactactggtctgctgttggttttggtggagctttggtctcattcatccagatcatggcgactatctttgaatggatgtatgttcctcgacgttgggcgggtgctcagcatcttaccaaacgcctgctcttcttgctcttggttttcgtcatcaacctggcccctggtgttgttgtcttcggattttcatcggtgcttcctggcaaggttccgcttgtcgttggtatcgtccatttcttcatcgccctcgccacatttttcttcttctccatcatgccacttggtggcttatttggcagttacctgaagaaacacggccgccagtacgttgccagtcagacgttcactgccagttttccgaggctgaaaggaaatgatatgtggatgtcatatggactttgggtctgtgtttttggtgcgaaattggccgagtcatacttcttcttgaccttgtccatcaaagatcccattcggtacttatcgccataccacgttcaccaatgcgcgggtgtcaagtacattggagacaagatctgctactaccagccccagattcttcttggactaatgttctttatggatctgacgctcttcttcctcgacagttatctctggtacattatttgcaacaccattttctcagtcgctagatcgttctaccttggtgtctctatttggtctccctggcgaaacatcttttcgcgtctcccgaaacgtatctactcaaaagtccttgcgaccacggatatggagatcaagtacaagccaaaggttttgatctcacaagtttggaacgcaataattatctccatgtacagggagcaccttctcgccatcgaccacgtccagaagctactctatcatcaagtgccgtccgagcaagaaggcaagcgaacccttcgagcacccaccttcttcgtttcccaggaagaccagtcattcaagactgaatttttcccacgtggtagcgaagcagagcgccgtatttcgttctttgcccagtcgctgtccaccccgatgcctgagccgctgcctgttgacaacatgcctaccttcaccgttttgattcctcattacagcgaaaagatccttctctctttgcgtgagatcattcgcgaggatgagccttactcccgtgtgactctcctggagtacttgaagcagcttcatccccatgagtgggactgtttcgttaaggacactaagattctggcggacgagacctctcagttcaatggagactacgaaaagaacgagaaggacgcggccaagagcaagattgatgacttgccattctactgtatcggtttcaagtctgctgctcccgagtacacgcttcgcacccgtatttggtcctcgctgcgttcgcaaactctttacagaactgtatccgggatgatgaactatagcagagctatcaagctcctctaccgtgtggagaacccggaagtcgtccagatgttcggtggtaattctgagaagctggaacatgagctcgagaggatggcccgtcgcaagttcaagatctgtgtttcaatgcagcggtatgccaaattcacaaaagaagaacgtgagaacacagagttcctcctccgagcctaccccgacctgcagattgcctatctcgatgaggaacctccagccaacgagggtgaagagccgcgtctctactctgctttgattgatggacactgtgagctgctcgagaatggcatgcggaagcccaagttcaggatccagctctccggaaacccgatccttggtgacggcaagtctgacaaccaaaaccactcgatcattttctaccgcggtgaatacattcaggtcattgatgccaaccaagacaactatctcgaagagtgcttgaaaatccgaagcgttcttgctgagtttgaggaattgaccaccgacaatgtctcgccttacactcctggcgttgcctcttcctctgaagctcctgttgctatccttggtgcccgtgaatacattttctcagagaacattggtgtacttggtgacgttgccgccggtaaagaacagacatttggtaccctgtttgctcgtactcttgctcagattggcggaaagctccattatggtcaccctgatttcctgaatggtatcttcatgactaccagaggtggtatctccaaggctcaaaaaggtctacaccttaacgaggatatctacgctggtatgaacgccatggttcgtggtggccgcatcaagcactgcgagtacttccagtgtggtaagggtcgtgatcttggtttcggttccattcttaatttcaccactaagattggcactggtatgggtgagcaaatgctatcaagagagtactactacttgggtactcaactgccactcgaccgattcctgtccttttactatgctcaccctggattccacatcaacaacatgtttattatgttgtctgtgcaaatgttcatgattgttctgatcaacctgggggccctgaagcacgaaaccatcaactgcaactacaactccgacctgcccattaccgatccacttatgccaacgttctgcgcgcctctcactcctatcatcaactgggtcaaccgctgtgttatttcgattttcatcgttttcttcatttcgtttgttcctttggctgttcaagaattgactgaaagaggactctggcgtatggcaacgcgtctggccaaacatttcggatctttctccttcatgttcgaggtgtttgtttgtcaaatctattccaacgctgtgcaccaaaacttgtctttcggtggagcgcgctacatcgctaccggtcgtggtttcgcaactgctcgtatcccattcggcgttctgtactctcggtttgcgggaccttcaatttacaccggtttccgtctgctgatcatgctgctcttctcaacctcaactacctggactgcctctctcatttggttctgggtctctcttctcgccctttgcatctccccattccttttcaaccctcaccagtttgcctggaacgacttcttcatcgattaccgtgactacatccgatggctttcgcgcggtaactctcgctcacacgcatcctcatggattggcttctgccgtttgtcgcgtactcggatcactggttacaagcgcaagcttctcggtgtgccgtcggagaaaggatcaggtgacgttcccagagctcgtattaccaacattttcttcagcgaaattgtcgctcctctaggccttcgtgctggtaccctcgttcccttcccttacatcaattttggactggtgtgagcgctgatgtggacgggggcaatgacccctcacgatgccattttgcgtattgccattgtagcatttggacctattggtatcaatgccggtgttgctgctgttttctttggtatggcatgctgcatgggtcccatcctgagcatgtgctgcaagaagttcggtgctgtgttggcggctattgcccacgcgattgctgtgatcatcttgcttgtcatctttgaagtcatgttcttcctcgaacactggtcttggccccggtgcgtcatgggcatgatcgccatggctgccattcaacgtttcgtctacaaacttattatcgcgctcgctcttacccgagagttcaagcatgaccagtcgaacatcgcatggtggactggaaaatggtacaacatgggttggcactctctctctcaaccgggccgagagttcctctgcaagatcacggagttgggctatttctcagcagacttcgtcattggtcatctcctattgttcattatgctgcccgctctttgtgttccttacattgacaagtttcactcagtcattctcttttggctccgcccaaggtaagacccctcatttactcggttgtggattcctaatctctaacactcaaatctagtcggcaaattcgccctccaatctactcgcttaagcagtccaagcttcgtaagcgacgtgtggtccgtttcgctattctgtatttcgccatgcttatcctgttcctcgttctccttattgcacccctcattgccagaaatcaggatctgaacctgaaaatgagtggcatccttcttgagctcatgcagcctctcgacagcaacaacaacgacactatgaccagctataccggctcgggtgtccccaagggcatggagcctattgcgtgcccgtcatcgtaccttacgaacttaaacaactaaaggctgtcttgtttcgtcaaactacattctgctacaatattctgatatggaacatgggaacaagatgtataaagtatccggcgcgttgatgttgctgttgagcccgtcaattatgtgtcttatgtgcatattattctcctcacggaatctctactagtacggttcctgtgagattcaatggatgcaatatctatc

SEQ ID NO: 4974 - DNA, 4102 bp, Emericella nidulans
cttgttgacaatgcagtggtaatttgacaactatggttctgtcgtaacggagaatgggataatgtatcagaacagcttagaaggtggcgctgatataattcgaagttgagtgtgctatgtgtagtggctggctgagaccagtatcagggcgagttctagaaggaggaaggttgggtttctgaacgccttcttcacatatgaagttgaattgtatcgccacgattgccaactgctccatctctggcatgtcctctgtcattccaggtatctacagcggcgagtatggcagcatcttagatatgggctcaccttcctggtgttccgtaggacgaatcaagtctattggtttctggtgagcagtttgggtcggaagtatactttcctcgaaaccactcgctcctttaaaggaagcaaaggagctcaacggttgccatttagctgttcatctcgctgaagatgttaacaaggaaggcagaagtggcgtcgaatgcccgcaatggagcctttcgagacttggcctctggatcgaggggctctaataggggatgctgtttgcaggttaggaatagtaagaagtcagcattgtctttgcgccactgataggtcgtccagatgacggtaaatatgggataggtaatatacggccagatcatgttcggcgcatggctctacactcgtgactgtttcctgaagaagcttctgggtcggtatgtgatgcctcataagacaatattgacgacactactccgactctggtggctgacggaccgttgtctggtttctcccattgcctccaatgtctggtacggcgtgggaaaggtatggaagttcacctaattgaaagacagccgccagtatgagcgaaggaggctgtttctgggacgcggttctaggcctatctctgctagcatacagctgtctcagccgcttctaggtcaagccatggagtgcagctcttaccactctcggaacactcacgactcatttcaagataagagaaagggtggcagggagaccatatcaacgtcacgggccacggccaaaagtcccggcatcccaatggggaaggcatgcaacgtgacctcgaccccctctcttccatcactttcctcgagcttgattgtttcttccttgctcattccatcaatcgatttatcttccgtcggattattatcgaaatttcgagaaaatctattgatgttgccctgatttagtatccatatgcttccgaaccgcaatggcccgccccaagaaaggccctatcgctcctcgaactgtgtccaacagggtcagtaagcctcgtaaatcaccaaagaacatagctacagccataagtacgtacctcgctcattgcagtcccaccactgacaggtatagaaccctcaagagacgccgtctttgatccatcagatgtcgcgtcggacgccaaggtgaggagtatcgaatccagtcctagcctggcagaggttgatggagtccctcctgcttgggcagatgttcgtgagcctgaggtcagaatgcgtacttcgttaacattgaattccaggaccgcgctgctctcgcaagtgccatcccgtggtttacctgctacgagggcggaatgtaccatagcaagatggtctgctacggctttttgcttgatggtgattctggtaaccgctgtcacatagatgacgaggtggtcatcacgaggatgtgagtgccctgtactacccgaacggctcgacacttatatactcttcagagggggaggctgcagcaaagacagagacggaaatcgtatgctcaaaaaggatatggatgagcaggatgttctgttaagagccagccaaacggtaaagaaaagcaagatccctgtcggaatgattataggcaagtccattgaagcgtccattggctgatcactaacgtatatcagggtccaaaaacacgtcgctgggaagaaagctgccacatcggtataatgtcatggcgtactttcgagttatctgcatatgggccgagaagataaacggcaagacgggctacaaggtgcgctttgagaagctggacctttcagagaagagctggtgggctgagaagggaacagccctgccagaccctgcttcgcggcgtttcacgcaggccgagtctcggcagtgtgctacttgccttacacccagcacacatgtgtacaaagagggatggatgtgtcttaacagaacgtgccaggagttctggatgctcgctggcttggagcctccgagaaacctaacctttgatgacaggtttcttgaagcccgggctcagcctgggccggatatgcagcttcacggtgacttgattccagacttgctctcaacaattgatgagcacgatccgcttggcagctcctcgcctctttcctggaaatccggggtcgtgtgtccgctctgtcaaaagtgtatacctcgccgtttctggaacggttggaaatgctcggacaccctttcagggaaggcacaaggcgaatgcccgtttgaaaaatggctgaaaatccctacggttcccttatcggcagcgattggtggtatcaacctgtgtcgtaacaagcgtaccgtaatcaaaaatcgccagtctagcttcctgccccagattgatgataggtctttcgctccatacaagctcattacatacggtcttggagcttccgggtatatcatgcatttcgtttcaaacgaggttatcaatagccgcccgagaggtccgaatgagctctttgaggagttgcagaaggccaacctgggacttagacgatatcccctagatcaggcccaaggttagtacatttcatgatccctggaaaagctaactaatgagcatagtcgctggtaccctgaccgctcatttcgttaccaactttgtagggttacctgcacggcttgatgtaccagactgatgagtgtagggtgcaccgtacaagtatgtcgtgtctgttgactcgcgaggttttagtgaagcctgcgatccggtacttcgagcgttgggccgtttgacatgggccactaagaacgctgtcaggagccagggtgggaatacctacgatcccaatgagctgctcctgctaggatactttgaggaacagaagattggtgtatgtctgccctgaggagcggaaagtatccaagtaacatcatatagtatcatgacgatggagaatcctcactaggaccgacgattgctaccctttctcttggatcacctgcgaccatggccgtgcgcatgaaatataagtactatcacggctttaccaaagcaggcagggagaaaaacacccttctcacggatgatccgatcttgccggaatgcgagaactatgtcaaccggcagaaactcaaagaacggctactcaacgggtctatcactgacgacgaatacaagaaggcttggtttgactccttcgccgagaacaagagccgaaatctaccaccggacataatcaaaataaagctgaaccatggtgacatggtggtgatgcatggagagggggtcagaagtactacgaagtaggtaccccgttgcggacatcttggcccttacatattaactactgacctggtctagcatggtgtaaaacttgagaagcgcggcaagttgcggttcgccctgacagcgcggcatgtgaagaaagaggagattccagagcaagactggccaaaaggggactttacgttgacagacgatcaaatatatgatgggcagtgagatactggcttaattgtggattatataacttctgatttctcgattgatattccgcaaggcatatttgagcactttcccaccttgctttatttcggttgctagttactttgtgcaatttaaactatccattcactcgttgacggaccaagccaggaacaaagtgtagcatggtaaccataatagagacaaaacgccaaggactagaaatattgagactattcccagagaagcgcagttattgaggatctgggtgaaaccatctataggtcgtagacccttggaaaagcgattagcctcttccatgtccatacagccgccacgtatcagtaaacaataagcatatgagatatctatttgcgttgactatctggcagtctaa

SEQ ID NO: 4975 - DNA, 10921 bp, Emericella nidulans
acgtggcgcctgacgccattctcatgacccaaagcggctttcctttttcatgcttccttgggcagataatgtgaagagccatctacatgcatggtttggcggcaatgagctaggcaatggcattgcggatgtgttgttcggggtcgtcaatcccagtggaaaacttcctctttctttcccgcggcgaatcgaagacaccccgacatatctcaattttggaagcgagagagggcaagtaacatatggcgagggcatttacgttggttaccgatactacgaaaaagtcctccgagatgtgctctatccctttgggtccgtccgctccactattatttctgtcgaaactacagctaactcgcttcgtccctcaggcacggtctgtcgtacacttcctttgcttattccgatttcgctgtcgacaccgcgtccgctacacttaatgttcgtaactcgggagacgtggctggagcagaagtcgtccagctgtatatcgctgccgatgcaacaacgtcgtccatcgcacgtccagtcaaggagctcaaaggatttgcaaaggtgactttgcagccaggtgagacgtgcagtgtgagcataccatttgatcggttcactactgcattttgggatcaggaagcacacgtgtggacgtgcgaaaaagggcagtatagagtcatggttgggtcgagcagccaaaacattctgctggaaggcgtgttggagataaaggagacgacgacctggtcaggcctgtgagctattgtaacgggctgatctcgagattgtcatcgacagcacatgtctaggccaaggccatctaattatttgccatctaggcgaattggaggctcttcgacgaacttgctggagagcaggttatggagaggcataaaaaaccctgggagagttacttcgcgacagtgctttagaattaggagaatcgaaattgatgaggttggctgtcgttacgcagaactctcacaaacaggaatctgcttctgaattaagtcctaaatttagctccagggaacccgcaacagttatttccgtccctgggcaaattggccttcatctccattttcttagggaatagctgctatagtgctgcgccttttgttttctgagcgactagactaagcagaattgatcggaattcagaatcaattctcacttttctctcattttttttttccgttattaatctaagataggggtgcactcggtgcgggttgggtacaacccgcagggttagaaatcaacccgcgcgggttcgcgggttctagataattaacctgcacctagacttgttaaacccaacccacgaaacccgcccaacccgccccgacccgccaagaaatgggttgggttagaccttctaattatccattgggttctggatatttttggctgccccaaagcccggcggagcaacccgctgggttgccaagatatctgaataggtatattactgtatttagattatattttcttacttagatagtttataatacagtatttagatacagtattttattagctatgtaaaccattacttattagagtaataatatgcataactgggttattttggattatttaggttgggttagaattatttgctaaacccatgggcggtttactgttcaggtaacccaccccaaaaaccgcgtgggcggatcagctaggcctgagaacccgccccaacccgtggtttaacaagtctagatagctggtagttccggccatgctttgcccggtagaaaatgaatagttatagtaatgcaagagtaacccttgaattgatacaaatgtaaccccggaaacgagggtcatgacggaatctatctgaaaacggcggctaggtcagacggttcggctattgtagtatcccccggaaaaaggttcctagatctcaaggccccatttggaagctctgtaaatttgctgcctgaggctccgatcattcatgtcaagcggaagaatgaggagtttcctctgatcagaattcagccaatttaggccacgtacgagcgggtattcgcttaccaggatttctatttctacccacacacactggacacacctttcttcttcttttcaacaaacccttgttgtatagagtgcatgcggcaggatatggcttgaaacaatcacatcgctccattacaaaggaaaccatatcaactacattaacgtagcatactaaaggtcaaatgctattcaacaactcagtcttttatcttctgcagccagcggtctcaccccttagaacagcttacaggataaacgtcacacaacctttatgacggcaagccaatcagaacattcaaataactaatttcgcttctaatcggaccctaagcatggacaaaaaaggaccgaagcaaaacctaacccgataaaataggcagtctctgacggcagaagtcgcttcatctcatacacgggtgtgcccaatgaagctggaaagacgctcatttcgaacaccgtgcccaggacaaactctgtagtccatatttggtcatgatcatggctttggccacctgcaactctagggtggctgtagttcaagtcatgcttcatgtgtcaagggaagaagagggattaggatgtctgctagacaaacgtacacacagggatgagaactctgaatagcaggagcgaatgattctcttctgcttgctggcctggtcatgactggcattaaaatccttaaaacatatcttattaatttctgaatttcatttactgtgccgtttacggaactcccagactgacactaccctaagaaggtatagtaagactccacttccgcgtgaactgtcaaggtagtgaacccacaagtagtagttaaggtacatggttcctggagttctcaaagattgcttgcctgaagctactgatttttagtatcgtggtctagtacgcttaaacctgtatccggtgccgcttttggaggcgtgccaataataccctccaaatcccgacaacgcgcaacttagaacgggttacttcagtatgagtggaaatactatgcaaccctttgtcgcaaccctgcatcgagcggacattcagggtaagtgctgatatcatcactggccagtaatgcatgcactagcagcctttctgagcagggtaagttgagtactataaatggagtttctgaatgcaaaagagaagccacccgactatcaaaagtcttgcagcgcttggtaaatctcttcttttcgcactctaaatttgtggattatttgacaccatctccttgtgcaactacagaatgagcatggagaatatttggcgatattctcagccaatagatccggagaccgtccggcagacgccatccttcacaacattgcctgtccgcgtcaatacgcgacaagatgttgcgaacgcggcaaccacccgagctctccgtgagtgggatgcagctcttcaggatggcatggccgccagagcattagtctcctttagcgacctgggaaacctgggcgcttttgcttaccccgaagcggaaccggaaaaattgcatattttgacttacttgactgacatgggaatgcttcatgatggtacgtaaacctcttgcccttgtagccaacgtgtaggttgtgcctgtgaaactgacgattttttcatgtcgcatagatggctatgaagctatggacatggatacagcaaggacggaacatcgtgagctcggacttctattcgatccaaacaagccacatcagccaagctttaacactcgagctccgcgtattaagaagcttgtctcgcaaatcctactagaggccactgctattgaccgtgcgttggcaatgtacatgtttgacatgtataataaagggtggctggctgttgctggagaagccaaggagtggcatttcaattcagtagaagagtatcaagcatacaggagaaacgattttggagctacgtatgtgatttatttgcgatccacaactgacgcgaggttgagagaaagcgagctgacgatgcggttgttctagggctttgtgggcaatgaccgagttcgctgtcggaatacggctgtcagacgccgacaggaaactaatcaaaaccgttatggagcccatagaaaaggccgttatttggactaacgactactggagcttcgaccgagagtattatgaggcttcagtcaatggaagtcggcttgttaatctggtggaggtcattcgtcgttgtgaaaatctgtccattgatgatgcaaaagcacgggctcgtgagttactcatcgacacagagcaaacatacatccgcaacaaggaggagctttatgccaacaacccatcaatgtcccttgagctgaagagatgggtggaagtggtaggcgctattgttggcggtacgcattattgggcaagcagcgccccccggcatcgaacgtgggctcacgaagagagaaatatgaccaagtctgctgatgagcttatgcttgagattccagaagagcatgcttcgagcgaggagtccaccacacctgattgcttcagcgttagtagcagcagctctcaacagacaagggaaaccgatccatcggattacgaaagttcgagcaaccagccactagacgttccgaaagccgacaatggtccagggtcaaagcaatttagtcaaccacagcgcggtggaattgagcagaattgcgaaaaacaaatggaatcaccccaggtgcgccccaccgcgtattttacggtatcatctcctttctaacctgtgtatagacagcggggctcacttggtataaaccattcaatacagctcttcaggggcctattgattacatttgtgggatgccttccaaaggggttcggtcagcactgatagacgccttcaactactggctaaaggtggaggaagcaaagttagaaaacgtgaaagaactcggcggtttttttcacaatgcataattaattctagacgatattgaagattgctcccccaaacgacgaggtcaaccagcaacacatgtcctgttcggccactcgcaagcaatcaatagcgctaactacatgtttattcaagcagtgcgagcgacacgcagctttcacaatccagaagccatggatatactccttgaagagttggaaaatctctatcttggccaaagctgggacctgcagtggaaatataatctcacttgtccatctatcgacgactacacgaatatgatagacaacaaaacgggtggaatgtttagacttttgctaaggctacttcagaatgaagctggccctggaggaggttatggatgcgaccaggcaccgggactctccctcctcttggaccggctaacaacccaattcggccgtttcttccaaatccgcgacgactacatgaatctccgtaacagttcatacgcgcagcaaaaagggtgctgtgaggacctagacgagggaaaattctcttatccaattgtttactgcgcggcgaaatatccggacttcaaggtactcatcagtggtgttttccggcaacggcccgcttcagctacaatgaatgtgcagccgttaccggcagagataaagcaatatgttgttgagtttctaagctgaagagaaactttccagcactgtcgaaatcatctaattcatttagagcgcttgatagtgaagacaattggcgagattgaggatgtgacacaggataccaaccctgtgctaaggctgcttttggaagacttagtgtggaacattgttgaattagggagaaatttgaaaaggcaaaagtgaggatcaaggcagcaatctgtttgcgatatcgccatatctttgtgcgttttgttttatgttcgtagattataatatggcattggccttagttcagtctaatatatggtcgtttattgctgctaactgagaaaacgtatttgagcgaagtcgcccatgactgagaacatcagtatcaagtacggtaagtcctacagtagcgatgcttgggtatctaccttgtgagtattaccttgtcgggctcgtaacacttatttcgtacttgactcaacttcaatcaagtacttatcactgacgcagctcaacctggccttttctcaaccattccggacttctggcaaatgtatggtaaacgcgtatgaagtatgggaatagatgagggctataacctcattatactatggtataaacatagtatctatcagatagtgcagaatctctgaaaactgacattactgaataaaagtgggatggtattgcccacagcaagggtgccctggttaagatgctccagcaaccttaggtagacccctgtcaaaagtactgctgccagcctgccctaggggacttgctagtgccagctttccgttcacaggagctatagctatctacattgcacctatatttacgtgtattctgtagattatttagaacctttgccagaatatccacaaggaccaggagagggccgggggtccgggctggctgttaaagatctacttcgtcagggcagatcagcctgttaacccgaaaatagacttgttaaaccacgggttggggcgggttcttcaggcctagctgatccgcccgcgcgggctttttggtgggttacctgaacagtaaatcgcccatggatctagcaaattatttaaaccaacccaattaacccaaaataatccaaatatgtaaatcactgctttaataagcagtgatctacatacctaagtaatatccagtattataagttatcttagacgtaaatgaaatctagatacagtaatatactcaaatatcttggcaacccagcggtttgctccgccgggctttgggacagccaaaaatatccaaaacccaatggattatcagaagttctaaccccaattctggcgggtcggggcgggttggggggtgggggggtttagcgggttgggtttaacaagtctgcccgaaagggatacaggtgccatgtaaggacaacgatagaggaacggaatgttaaggtaatgttaaggtaatgcaggactaaacactggggatcctccaaatctcccatgatcctaattacatctgcggggatatacgaatgtaacctagcaacaagattacgacggggtatatctggaaacagcggctaaacctaatgttccgctgatgcggtagtttccggaaaagggttcttatattttgatcttgtcgacaactccattaatcgtttgtctaaggatccaaatacaaacaccgggacagtacccaagatccggattacttctacacttcaggatcttgtagaatatctagttagtttatgtaacaaaagacatagcgctatgtacagatattttcaggatatagactatttttaatctaggtgaaacttatatataagccactactacaaaaagctcctagataattaaagtgcaaagccgttgtatattatatagcttcctaggtacttttcagtcacttgcccataatagttatctctagagtcacaacaaatcgtttacatgcaagcccatccagggggtagcttatgttaattctgaccagagtcaattccttcttgacagtgtcagtgccaagcagtttggtcttggccatattactcagattaacagtgccacctccaggctgactactagcaagcaagaaagccttggtagtggacaagccattttgcttagtctgcacggcagccagtgtaatgattaagccgtcactaatggagtagctgctggccagatggaggccgttgacggcattgctgacctggttgaccaccatgtaacctgtgtagtcaaaaatgtgggttgctccgagttttcttaacatagtctaagcttttgtgtaatgctgctgaggcaatctcatagctcccctatagagctctcggaagaacgttatgcagacagatgttggagtgccgggggcagcaactggcgagacacctagtcggctcggtagagcagatattctacaatggagatgcagagagaaaggtaagtcaggacagaacagaacaaatcgcttcgaaagctaagttgctataaatctatatacgcgatacctcgccaccgggctactgcaggttgggcaacggcagggtagttacactcgttaggtcgttgatgccttttgagccagttgcccatatggctcaagagttaatgcctgacaggtcaggttgtcaggcaataaccacccattggatgaacaagactgattcaacccaaataaccaaatatgaatgattttaggcaatactgtatacaattcagcgatacaatatgttcagtgtaggtttgtaatctaaaatgaggttacctgaacactagatctcttggcaaccttgcgagttgtcctgcgggggccgaaaatttccaaagcgtcgactagaaaatatgactgtctaagactaatttggaagtcatgacgcctttttggcttagcggtatattttaccgatacaaagccagtgggtcattcaaagttccaactcaacccaatttttgcggaataggtttagcaaatctatgaatgcgtcatcaaagtgagcacagcctacgagcccgggctggtcatttcaccatacttcgcctagaattccgcttgcatacaggttgcagagcaatgtagtagctgcgaatttaggttcccaacccatcaacagcccaaattggacctcgatcatttgggcattcaggacccaagaacaccagaggcagaatatgctgaaaattagatccggcgatgtttctggaaatgttacatattctctacaatttgatgtaaagttttcagttgccgtgtttatagcaatgttacagccaggttgctgctatcataacgttgtaacaggaatatacttcatcaaacctgatcccattgaatcggctctttttgaagccccgctcatctaccttaacagtgccactctgataggggcctacgacagatactaaagccatcgcagtgccctgtgaaactttatactgaagaaccaggagtatacaatcaaactcgaaagcaacaaggaccagcaacatatgctcatacttttgggtgccaatcatttagatcaattgtctttccaaatatctctcggaccttcttggtagattaagagcgcacaacgtgtcatgactttgattgaaagtagccctgcacaattcacccttgtggcgtgttcactagtatgagccaacccctcatggtctactgttccatattaactgctcaatttcttgtagggcgtggcatttttggtgctaattgtggtctatagctactttttccacccactggctcgagttccaggaccttggactggagcggttttcccggtaaggctaacctagaagttgtttggttctaccagatctgagatttaacttcttatacccatagttctggtcgataagcaccttgtaccgccggagattgaacccagatcttgcagaactacataaaatctacggtcagagccactctcccagctctcaagcttcggcggcccgctgatggtccagaggaatccaggccctgttgtccgagttggccccaaccaactgtcattcgcaactatcgaagctcaaaagatgatctacaatgccaaaccaaccaataatggctccgatgagcattttggacgagacgggaccctacaggatgtgctactctcaatgatactaggagcacctaatataggttctctatcgaaccgagctgagcataagaagatgagaaagcgtttactgcctggatttacatcaaacacgatcttcgaacaggagcccctgctgcgcctgcacgtagaccaactcctgcatagacttgcgcaagatgcaggtttgatcaatttgactagccatttttcgagattcctatgggaccttattggtgacttctcatttggagagcctcttgttccagagaagcacggtgagccctttttgttcattttatgcttgtatttattgaatactctgctaagtagagcttcgcacagacaagttgaagtcaatggttgaaatataccaaggatgctttcccctactcgaagctatcaatcatgtcgttccagaaatcaatgccgtgatcaggctggcttttcggctagtacccccagctactctgcgtgcggtcttgcccactgccacactgagagggtacggtcattctgctgttgaatctgacaacacatcgctccactagtaacataacttcaaaaggccaacatatctggaatatatgaccaattcttgctatataggtgccgctaaccgaggttgtatcttctctagttgcgttgaccgacaggacggccgatcagactttctcacgcatattatgggcgacaaaagccgcgacccgacagaactagagttaagttatgatgaggtgcatagtaacgccaccgttctcatgtgagtcgtgactacctgaggccgccatgataagtggattattgtaactgaattatatgtttaggatcgccggctacaagacgactgagacatccctttcagccctgttctaccgaattttgtcaaccccaggagtactcaagaatcttcagagtgagctttttagcaacttccagagcatcgatggaatcacggggagaaaactgctgtcactgccatatttgaatgggtgtatctacgaatcgctccgtttggcacccccggttgcgggaaagttcgcgtctcgtcgatccccgggggcggtaattcaaggcttctacgtccctcctgggacggaagtatttacagagacgtacaccatgcagcggacgccgctttactggtacgccccggacgagtaccatccggaacgctggcttaaacagagtgagggtagtcctatgctcaagatgtgcacgaggcattcaagccatttagctcaggtccccgagcatgccttggaagagaaatggccct

SEQ ID NO: 4976 - DNA, 6266 bp, Emericella nidulans
gtttatagtcgccaatacgatcgcccaagtgcactgggtgatggcctcccggtaggtactcccacgcggcttcggtatgcctctctagaagcccattgagcgctagtcccaagtgacaggggccaacatgtcggactcctgagggctcggattctccgctgtatgaaccagcctctgcttcctcctggttactgaaagcttctgaaggctctctatgagactgttctaaacgatctctaggtgagtcagcaatggaggagcgctggatggcaggctcaacgcactccagaggtgacatgtctaccaaagctcgggttgtgaagaaggtttgcgggatataaaggatgaacgtgaatgatcgcaaaacaactgggctgaagaagaaaaggaaacgagaaaatcatgagctagttaagtatgagtatgtgtggtgaagtttaccatcaggatgaaagggccgctcccctttgttctcttctgtggaacggaacagggctgactctgcacgccatggtagtagacaggtcttcagcgacgatgagtcaagctttgattggacatttcaatctattccttttagtttcatcaattacctgggtccattcacccattcagatcatgattccaaaaataaccatcccctgtcattgcgttgcgagagccatcaccagatgaggaatctttcaagttgatactttaataatggctggtctatatttaacgttcatgaccatctaaggcatcttagaacggatattcaatccatatcagacgtattttcaagcgcccacttctaggccgctatttctcaggaaattcacagcacagcgtaaagcctggaagagacgaaacacacctgcatatgcacctctaccactcaaaggggcaataatacccccgggtgatgcaaccgagagccacatacatggcatttaatgtgtttcatcttaatagtatccgttgcccacctggagaccgaagccctcaagtcattgtaacttgctttgatgctaaaggtgcttgagctattcctggctcttaatctttccctcactatagaatattgacatgaccgttttcgtccgtttcagttgacacggtctcacccggttgatctcgaaacgctagaagatttcgaaacttgtcgttatcagagttttcaagcctgtctggttctcgatgtcttcgacacgccctttgatccaggcctcttactagcaagcctgcaattggctgcagcgaaggaacggctacgaggcgcatctacacaggatgagtatcgtgaaaaaagcttactcttcaaaccgtcttccaccgaaatgcgtcggttctaatgtacagctctgcataaagacatgcggaatacctttaccaaaggtgagtttaatattatcaaaagcatcagtaacccaaccgttttaggaggagataagagctccctacccaacgctccggttcggttgccactactactatcgtctcttagcctacctaaaaaattcctcctttaatctcatgatgatgccggcattggtaggcattgaagtcccactgtattttgctagtctgctttggtttgttttggcgtactttgtttctgatgttgttgctatctttcacgtcttttgctgtctgttatgctattccaagttcctcttacctgttactttcgatattctatatagcagcgtgttatccctcaactggattgacgtctatatactcttgtaccggatagcgttggaagttataggtttgcaatagttaatgaccggcgatcggatagatgtctcgacgaacagctttttttaaaaaaaaaaaaaaaaaagccggcctaacaccttctgtatatcgataggtttgaccaagtggctatcttgtgctttactccaagaactagcagaccacgacttagatgtttcttcaactttcaccagcacccctagtaatattcattttcagactgcacatccatggtcatcaagacatgttctacatctaatacagaaccagatagatgacgtcacggagaatgcagaggtctatttgcaagtgagtaagcttggttgcccataactcgagcgaccacgcttgatttctgtcccagtctctgtacgatgtcactggagttctggggtgcgtatatatggcagggcttaccatcagactatgtaaggttgcctacatctccacttgttttatggagtagagtattgttcgggtcttccccgaagatctgaacggtaaccatctgcgaacttgcaactttacattcgctaattcgtgactgtggaaaatcatctgttcaatatcaccgcagctcctggtctgcaccgccagcggcgtcgatatctctgctctacccacctttgtaatgccttggcctgttctgtttggctgccaaacccctaccttctaggactgctgcatgaaaatagtgccaacctgtggcttggtaaatacaattaaacttggcctagttggattgcatgtggggattttaatgcaagacatacacagccttgacgatgacactgcgaagattgcgcggagattaggtggccggtcatcaatgttaccttgaagcaatctctcaggaagcctctgaagcagctgcgatttgacgctgatggcgagcgagacaccatcatccggaactagtaagacgatgggaagtataatctcaccactgatgtcctgtacattatcattaagattgtttgagactctcggggcgtagcaaatacagactctaagactgcattattgcttacatacagaaataataaccccagcgttattaaagggtcgacaactcacggagactgctgcatgcccaatatcatgcaactgcggatgtttaggaggtttcagataggtatgtgtactatggattgaagctatcatcttattacgaatgatagggctcatcccggtagccattttcgtgggaatactcactagcacaacgactgcaggacctcctaagctgcacagtgagaggaaagaaacctacagattatattatgctacccaatagtcttttggacttccttctttaaaggttatgactcaattctcatcctggggcgtgttttagggctcagcaagcgcaagtgcaacccttatttcatcaaagtttgatctaccacactattattagactcaatcactgctctcaagtcacataacgctgaaagacttataccgttccaaagctgatagaatagcgatgatgttacgaagtcctcgcccttaagagtccagacaaacccattttctcctcagcccttgccgagttctgcccagtcaaccacaacatcttctacttctcagagatctccactgcaggaatcctccgattggatatacaattatgtcagaagtatcaataactagcaccgataacgcctatcttgcatactcggaacgtcctcagtgcggatcacctctgcacatatggttccatacccgacgcttgatagacgggctcctggactctaaacgggatccggagatttgataacggagctgacggtacggtaggacccagcatacccgcatagcattctgtggccgccgtacataaggacgtgctgttaggggagagcatgttgcacatgtatccacgtactagtaccagctaccctatcgtggatacggtatgggtggcttcattcgcacataaataatgttactctggtagatagctgatggctgatgaacatataaagcatgaggtcgtccttgcagcatacctatgaagagtacgcacaaatattatttttgaactggtaaccctaactccaagggacataaaccaggcgaatgtacatccagtggcccgaagcagatattgtccgtttaaatgatatttagtaccgtcctcgcctgtgaagtgcttgatatcagattactcttcggctggtggattgtctttaactacgaagcaagacatctagatgctttgtactcccaatgcatcgaagcagacctctaccagaaggcaaatgcgcaggtgaaaagccccagagagcaataatatttcttaatttgatttataatataagatcaatgacttgtgtatgatataccatgaccctcagtcattctggctgtcaatattgaagtctcccagactgctggacaatactggctaaccatatttgaagattgacactactatgacaaggtttattgccgggctagctcgaacctggaactgatatcggcaatcaagattcagagaagtgccgctttactggaagctagatggctacactgtatagcgaagcctggcgtacctagtcggaacatcgaagtctctactcgggcaggctcggtgctcacttacctagtcctccaaaattactccgtccaaattattccgtcgctcattctgctattttggctaaatttcggggatttcagcttgtaaggcttcgatgacctttcgtcagttctagcagcacggcacatcccgctccatcccatgatgctatctcgacataacttcatccatttcctccagcttttcctaaacaagcatgcgggctgcttcgattcatggtgagattcactcccgccaaacttatggggcgagatcgacacatcaagaggatcacagtaacacagcggggtatatcctcgataggcagtctcgcaattcccgtaaagggaaaataagcgaccaagatcatatccagaattaaggttcacgtcaccgtgacatcaaacgctagcctggaaactgtgggccccggcacagacccagatctagccggtgtgggacggtccatttttcagcttttgggtcaggacaggcaccattcaggagtagatcaggcccggttatcaggcaaagatcgcacataatgtgtgggcaaggtagcccagagcccgcacgggaaactggatcatctgtgccgggaggctggttaatccacaatagagtccacaatcacaccgtggagcttgaccatatactcagcagtgtggtctcagctctttaaaccggataagtgggtgctacactgggcagcagtcggtctccacgtcggaaacatcccttgcttgcaatctcgactggttcatattgttccagcgcacaggcactagagtccacccttggcatcaggatttatttcacgcgcaaacgaaccggttccaacaattggcgtgcatggttcgtcagagacgcctcacgggaggtcacggctggcggaatccgaagactgcctggcgttctagtcctgctgattccactgctgctgcatgcactatgcaccttcctgctagttgtgatttggcgttgtggcttcagccatcccgctgtaggtacggagtagatgcgcctcgcaagtgtttacaggacaggtaattctgtagagagctgaagtcgatcaggcgagatccgttagcttcggttacgaatcggaactgggcttgctggggtttccgacgcggcgagccgcccgacgatcgattggcgcagcaaagccaatgttcttcaaaccgggacgatggtattgtaatattgtcatattgaaatacggcggtaaagagaaacactttcttatgggatgcttattgccgaaccaagaagtttttggagttctcacggacactattgaccgtcaaatgtcagtctggaaacttaaccatgctgcttcctcacttcattggtctatgtacctgaaaacaactaacctttgtcccctaatgacttggattcggctctaagctagagagcagctcagtatgacacgtagaaaagccgatagggttgaagcgcgcagagtctggaagaccgaacctgtaagatgtggctggtaggcaaggcccacaaagtgttacggataatatctccttgacgtggctgactacaatgaaagcttgttatggccaaagccaaggccttacgggcacgcccctatccgcgctcagtcagcagacggtacgttccccttctacaactcgccttgcagatcacagctccaactcatactctttcaatctagtcagatgtgacgtatcgcggagccagagctagcttcaagctggcttccttcggctatggaaccgttcggcaatcaatgaattctcactgaacgcaccggtcggcgatagtgttgatcatctcagggcggttctcattctagaacaccacggcagccatcgagagagttaacttctacgttctttgtcaaagtcccttgtttacaatctatcattatggtattctcttctccctcctgggtgccacg

SEQ ID NO: 4977 - DNA, 3170 bp, Emericella nidulans
ttctcctccgttgcgatctccggcgtccgaatcatgtgcagcgttgactggacccgccgcaatagattcattctcacggcttcgttcgcggtcggtatggctgccacacttgtaccagattggttctcgtatttttttacgtatagtggtgacaaccatgcgcttgaggggcttttgcaggctgtcgagctggtcatggcaaatgggttcgcggttacagggttcttgggtctcctactgaatttgatcctacccgaggatatggaggaggatgttgtggagtccgaagaggactatgaagccacaactgtggtggggatgcagggcgggagtgagcctggttcctctggtcagaatgtgaaggcctaagaactgcaaatgaacgctttgtttggctcgactctagaattgctttgcatctttttggctttataagttgcatatactataattatatttgtccatatgtactatgtataatctcataccgcgcgacaaatctcgcttgataggggaggacatttctaccccttccaccactttcggcggcactaacattgcgtatagcactgctcgaccctataaaatacagaaattgcatctccaacctgtatctgcgattctgcagcttgtcagtaaatccactaacagcaagaagggaagagaaaagtgtctaggacgcattctgaaccatttatcataagaattaacaacgcaccttcaacggccggcactgcctgcatccccaaacaagcattcgtcaaatcccccttatcaatcctcctatagctcttcagcgtccgatccggctcagaaggatgccgagtccctgtgtccgggtcgacgttgggtagtttgcaccggactgtgcggcaggctgtgtacattattaacgcctgttctgcgctgtctccttcatcatcctctttaggtgctttcttttttgcagtagctggagagatacgaataactttccaatcgtcttcctcaaacgccttcggaccctggacgataatatttgccctgaaacgccgaacgcttagatcaggaatatcttctgcgcaccgtgcattcacatcgcgcacgctagaaagtgaaataatgtggattgggtaggcgtctgcgaagcctgtttggggctggaaccctatttcttgtttccgcggtgcgttacggtagattttgcgcgtgtgggtagggttcactcggaagagagtaatacggcgatgactgctgttggcggtaattctgctggctaggttgaaatttgggaagccttcattgaggaagtcgtggaatgacgatggaatgtattgcccgtagttgtatgctagcgggttgtctttccagatcttgacacgctcgcgggggacaccagagtccagtttcatattttcagaccctgaaggttgacagagagggaccgtgaatgacccctctcgagcgatgagaccgaaatgcaccccatttggaaaacggctgagtgtactgcatgacagcccaggccacaatatggattaggacgggggtaataaaccagcatgactccgcctgatcttacctcttcaaggtcagatctatatccctgcatggtagcatcaggaacccagatctctggacgaacgagagcaagtctgttgaaaccccggttacgaagggttctcgcaatccaattccccttctcatccagctccgcaaagcagaactgtcggtcaaaggcaaatcccgtgggcactattcccgactcgtcaagttcgatgcccttgcagctctttattgggtacgtgaagagcgctttaatgcgccatgctggacagcctcgctcatctgtactagattctgaaaagccactgctgttttttggatcatattcgtcatgaaggttgctttggcctttcggaaggcctatccttcgacaaccgcgtggcgtaatagcagcggtattctcagctgagaacctgatgacagcgtagactgtgaatataaggacgcctgatatggcgaggatggtattgagtaatatgacactttgctggggttccagcattgccggtatccacaattgttgaatgccttgcatcaacacacagatacaagactccgtgaatcctgaaggctaatttctgtatataaaatataaccaatgtgaccgaacgtttaggttgaagagtgatataggagccgatgcagatctgaaaaatcccattggtcgatcctgattgtcagattgggaatagcgcaacaccatcccaaccatatcacgtgcttgtaattggcccagcttccctttctggtaaaaccactcaagcttagcagtcaacattgtgcttcctgcgccagctgaagatattggcacggcggagtatttcgaatgtcaacagtacaatttctaagggttggaatgggacttgttctcagacttaccgtcgattgatgttccaagatggacacacaagagctgctcagcccggcaactcaacgactccgtacgcagtctctcgacgcttgtagtggcttgatctgacatattcaggtcctgtcgtttcttattctgcatcgcaatccttacaggcgtcagcagccctcagtgtcggtgccatcccaactggtatcactcaactagataatgcgatcagtccgctccccgcagaacaagatgatgacgccgactcccgcgggattcctcagggccaagtaacagaagtctttggaccgcctggtgttgggaagacgtctcttgcgtatgtcctccaggagttcccgtatgcaagcctaacttatttgaaggctcaacgtcgcctcgaacgctctccttgctggcggaaaggtggtttggattggtatgctatctggctcttccttaaaacgcagactgatgccattcagatactggctctccactgccccggttacgtcttcgcgatgttctacagaagtccattgaggtttcaaaatcacctcaaacagcggagcaacttgtgcaaaacctgactcatattcgagcccagtctctgcctcacatactcgcactcctactacatcccccgtcaacatttccaccccaggactgcagattactagtcgtcgactctgcctcagggccctatgcgtcatacttcccaaatcccacggaactcaaggcacgccttggcagcaaaaaatatgataag

SEQ ID NO: 4978 - DNA, 4260 bp, Emericella nidulans
gctgcaatacaagcccggagactgcagcgtttctcatctggctcaacgccatctgaatatcttccgagttgtctctggccaggttaaccttgtccaaccaacgctttcaggcagtatgccctgctctactaagcccttccccaggatcagttgcctcagtctagtctcgggtggcaagcctgtcgctgacactacaagttcgggttggatgcagcactccagaccagcagccttgcatgtcatctacgaagtacctgaaacaggataggcgagttctagctgaccgtatcttcagccgtatttatcggtgctgaccatagccagggtgctagggcccaggagagagcggaatccagggccctacgatcggaaaagacgtgttacattgaggcctataccagtcatggcctctggtggagaggcagggttacacatccctcttttcagtgagattaggccatctcctgccctgtgagcagcgtttcacaaatcgcacttcaactagtatatccgcttcagctaatagacaagaaccctaagagtattggacatcccggcatctacttcatccatactcttgcctcgtcaatactcttgccggattattggatcaagtgcacagctgtaacgtagcttgttggctttgctcgctgacgcaccgtaccacctcgctagcctagccctgcagttctacagcctgaaaaccagcaacttcgggatctcggaactgggcgaggttagatcaccggttcactctaactcagctgcctaggtgcagggcagtcctcagaggggctatgtggcgcttctcaaccgggacggccctggggtctgcatgttcgacccacagtgcacaaggtattatttgccaatgaagagagacaagggctgtacatcagtcacgccggtatcaccgatcctaatctaggccgccagcagcgtcatgcaggagttcctacgccaggatctcaaggaagggagtaaaggggtgggtcaatataccggagatcagcatctccggtaagcactattgagtatatgatatgacatagccactaacaaaacaagggagctttgtaccattcaatatttttggccaaaacggttacaagcagaccaagctgcatctctagcgtcaaccggaataaaaacaccgttccccacagtcagcagaaagccggactcgaatacaccggctagccatttgtccgcagcagcccgaaaaatctcgcatattcggctgcaataggggaatgtatcatgcctaatgaaatgataagagaaaagaataaatatgtaataataccccgctcaaacaagcataccatgcctcgggcatcagcccacaactcgcaggatactataaagcaggtatgcccgtcccatgcattgcctgatattccctatatgacaggaagagtcacgtcctttgcttgtgtaatagccattgctggccttacagggcgttttcgcaatgacagtagccgctctatcgcggccgaccttctcccttgtcgaccatgacggacgcactttcacagacacagaccttcatggagcatactcactaatctttttcggcttcacaaactgcgtccgcgtgtgcccccgggctctgggacgactatctggcgtcctggcggacctaaagatggttgctgagccggtcaaggcgtactacgtctctgtcgaccccgatcgtgacacgccagaagtcatgaaaactttccttgaagcgtacccggccttcattggtctaacagggacgcaggcccagatcgatgttgctcgcagggagtttcgtgtctttgctaaagcgaaggaagacgaaactgcgcatggcgggtatgtggtccctcatacggctattacctatctcctcaatagggacggctatatcgtagaccatttcaatgactccgttgacgcggagaccgtcaccgctcgtattttaaagaaagtacatgcatcattgcacgccaacgacactacccaggacactagcaaacccgagagcctcgatatcctaactcgagaccaagtcgcatcaattcgccacattggaaacctcgcgcggcaacttaaaggcgactggacgcacatgatggagaccatgatatcagtttgtcaagctacttagataactcatagacaaccattgtctacctattgctggactatctcttccctgtactctccgcggccgcctggaccccaactccaaccaagttcccatacttgagcgtattcatcgtcgcagcgaactgcgtcgccgcgggggaaacggttagaatcatcgccgtgtacccttcactgttgccattgtttcgactgctgctgccttcgttggtattcgagccggagctcgagctagactcaaagtgtcctctgagaaccattgtcaacggggaagaacggtaggggatgcgcgcctggcccagggccctcgctctgatcacttccttgagcgcgaggaggtctgtgttaatctgtctcccctcgcgctgttcttggggtgtttgtttggcccgcacaacagggctggctggtgtcgacatcgatttatcgtggtagtactccgatccagcaagatcgacgaagaccagcttccccccaagacagtcgtacctacaggatgagaagacagcatcgacgccatcttctgcacgcctcaccgcaatctcaaactcggcctttcttgcttcggccttgtcgatccgttcttggtcaatgctgtattccgggttgggaacgtacttgccatttgcatcctgtatgaatgctttcatattctcctcgaggtagacgtctgtcgccctcttcgccacagggacaagctcgctctgccgttcaatcaccgcttcccgggcgttgagtagagccctggtgattatctccagctccagcaccgcgtgcgttcgcgaactctggtcatgaatcgttgaagtccctgttgtacgcagttctagtccggagagtaccgtcgttcgcagctcgtcgaatgtccagcacgggctctgcgtgatgggacggacacgcacgcgtccgtcggcgaacgtgtctgtttccccgcgaatgtgcgttttcccgtcagcgccttcgcgtatatggcagggcaccttgtcttgtgactggccggtacgattaagaaggtcgaatgctgtgttcccgcgaagctcgtacatgcttattccgacaccgagctggtccccgtctttggacaaagatgacaagtactgaaacacctccctccccgccccaagacatagcccgaactgctcctcgttttgaaagtcatacccgatcatcgtgtgtgactttccgctgcccgagtgtccgtatgcaaggaagttggtcgtttcgccggcccagacgcgcgggaggacgggagccacgacggcatcgaagacggttctgttgctgacagcctctgtggcctcgaagacgtgtctgagtgtggcaccgcttttccaggggcggacggtctttgataggtgttctgggggcgtgagggaaatcgagatgccagtggcatgtgctcttcccctggcaagggggagtgtgtgcgggtaatctctgccttcgctgaacctggaacagggcgccatctaacaaagatatcaaatggcattctggaagttgggaagaagggaaagacagaattcgacactctggggccgaagggtatttgcaggaggactcaagagtacaccgtatttatgactcttcatacagagaatggcctcattggctcggacttctgggggtcgcaatcgccgtgcaagaaagcgctataactggtcgtataccaatgtgggtcagctatgaaatcatgggtctacacacatggtcaggcagtctaggctccaacactacagcttcaactccacccatgatacttctcgcttatcccagcctgaagcatccactcactcaatgaagccccaaagtcctgcatttgggccctttactgaataagcacgatgaacaggatctgtaattgcctcagcctttgttaccgtctaagaggataatattcgccagagttcgccgcagacaagacaatgacatccggtctcggcctttcagaagagatactatcatacttctaaggcactagtccacttgcaatagagtgtaatgagcagctcataaaatttgttatcacgacggcatgatactattgcaagtgcttgttgtgaacgacagcttcttctaacctatttatcctgggattagggtatagcacggtggttacat

SEQ ID NO: 4979 - DNA, 8857 bp, Emericella nidulans
  unsure (1)..(8857): unsure at all n locations
gtagatcaatagggtttctcttatttaggttatgccagccgccttcatcagaaagatggcctgatattctttgactatctaaccctttagggaagaattgccggacctgttaccaagcactaccgtgttgttatcatgcaataaaacagactcctaaagtgatcactcatctacacagtccgcaggaactggctgactgcagatactttgacattccctctttctccgacaagaaatacatataactcggtcttttcaaaaatgccgccgcaattctatggggacagtcaccctatgcgttcctacggggggtcaaagagatccagattcctcattcttcaagggaatgattaaggaaagtcattttcaaaggggctatctggtcccgagggttacccgttacagaatgctgactatcctaagtaaaatttctcataccgggcacatccacaaccccggggggtataagcttcatggaatgctctatgcatgccttatgagcataaacattgaactcataaatcccgacaagtactgggtcacaggggcaagaggtaaagtattgaagaggtcggacgacaagagggggacgaatttttaatcgtatagtcatattagcatcagaacaaaagggggcatgtccaaattgtccgaaatttggacatgctgatcaggaccatgttacaatatttaggtccaggtcctccggtcaaattgctgggacagagcgctgtagccatggcttggaagcgacattgaggctactcaggccgcacatgcacagtggaaaagtaatgctgcacatcaaactgactccaggcgctcctgactgctggctgcccgcagtggtgagtcggcgccctctgagttttaagagatcaaagtacagtggtatataaaagattaaccaccaggtcggatttgagttccttgctgggatgggaactatgaggaattggagaaatggaataaacacgggctgaatacaggcctgatgattgttcttcgttgatcttattgtatttgtctcttcgacaatcaacatgagacggctagtcctgtatagtgagatgggcagggctcgcctccaagagtgacagacaattctcagtagattaatagaatcgagacaggaatcattgccccaaatcaggcccagtgatatatggcacactcctcatcagagagtccaaaaaaggccatatcaaacccctagaactcctagtcagtggcatcagccgctaagggggcaagttcaagtctgcctaaaggtgtctcaacacaaatgtctcgtcatctgtggccacagaggccgggaaatatgctctagctcttagaggctgggcccattgatctgtatctacatcataccccgaatcgttgctccggatatcagtataccactggccttttattgagggagcgaagaattgaggtttcttgattcacccgcactggaactgaccttctcttttattatgccagccttcggggtagaacccgccggcacgcacaaatctccttgctcccgacctagaacctacgtgattctgtactctccatgtttacccacctgcaacgcaagcctgatgcctcagggccatgattccacacatggtttccaatttcacgtctgccttggaacgagagcaggatatgataggagtagaagtagagcagcggcatttagtgcaatctatggtgttctgtaaagcaggaccacgtaatccctcaaacagccatatgcaaatcctgctaggtctggcctggcgcggctccggtgcctgcgatgggtatttcagagccagcgagtcgtcgaggagagacagtatcgtaccccgtgtaaatggccatcgccatcagggttagcccaggatggcacatgggcgtggacattcagctacaacatgagtttgttcgcaactaccataacctgtgctgctgaaatcactccaaaactcacaggcaaaaactcgcaggcagagtaggcgatggcgcttcacccaaccccaagtgctcgagcgcagattgcaagacagggtcaagatccaccaattaggtaacgtgaaaattattcaaagacgccttagacccaaagtcagacacgcttccctggtctaacatgcgcagagctgaccgggcgtctccgtagcctacgcaggcgggggtcccagccctacccacaatgtcccattcattgccgattctagaagttgaatgtcgaactctagtctccactcccagaggatcaaacgcccaggattctgataccaaccttagagcggttggggtgctccacctgtgtaccgtgtagctcgtaggcacggagcccacgacgtagtccttagacgagcccacccacgagcctgaggcgcaagtctcaacagatctaccggaccggggcttgggcttgggcactgttccacccacgatcttcccgctggtgaaaatggcagagcagttattaaatgttaatacggtgcgctgcggcactgaccccccgttatggcggcggactgtgaggagagtaatcggagcagaccaatgcagagtacttcagctagggactaggcactagctggcctggccttggccacccgacgggctctcagtctggggcaaacccaacgctgacaggctccacggcgttgtcagcttagaaggggcaatggtaggtaaatggcagtgcgtgtttcgtttgcgcccgcggcgtagttctgggataaccccagctagtggcccctacagtgaggagctaactaggaattcaggaccagaggatataattgccgctcttccacgcagatctacagcagagtatagccctccggttactgcgggatgggatttgggctgatctcccagtgctctgatccacaatctaatcccggcatccaactcatgccgttgactcatgtcatatggggcgcagaggggaagtatctcagaatctcaaacagccaacgggccgaatgcaaccaaatctcgatgtcaggatcacccggcgctccacgatttggatgtcattcgtctgtgggccgggacggtagtcgcgaattttctggaaggaaagtggcaaagcgaaggatacccacaacagcttggaggcattaagctgttgcaagtgcaggtgtagatgtggtcctgatatatacggtggtcatgcctaaatagccaaggataagagtatggacagacaagtgagagaaatcagttcattctagcagataccacaccaggaggtctgcatggacaatagatagagatgattgacaatcatgtatataatagtacagttggagaagaaatcaataagaaaataaaccaaggatcgacaggacagtatccacccagattcaccaaaattaagcagtatgaaacaaacacaggcgctaagagtacagccacaactccaatgaaaccatagaaaagaacagcggaatatatccaaaatacaaaaaaataaagaaaaaagagccgaccgaagagattagtccagagagtatgcttctgggaaaattaagcattaagatcaattcttaatcgccgacttcctctttccgcgcagcataaaccccacaaagctcttggccgacgatggagtctccgattccttgtccttggactgtttcatgctcttcttgctgctgtgggtcttgctcttgctcttggaggatgtcttctgctcttctggttgcgggttgagctccgctcgcagactgctggacgaatacccacccatcggcatcgtgctggacctggacttgaccatggagattgaaccgcggtagggcagcggcggacgcttcccggtggcctgggaatgcgcagccgacatgctggagacgctgtagagagaccccgaacgggagcggttgtaggcgggcgagccgcaggagtaagggctcggactcgcattgcgagagggtggctggctggaggagaggggcagggagtatgtggagctggcgcacgagtcttcgtgcccgttaccgtgagtcaggattggggtcgatgtccgggactgggactgggctgggaagagagagaaggtcgccgtgctctgggccgagggtggtcggcgcgagggctccttctgtaagcgccgccgcgcgtctgcggcgggggtctgaggccgagagaaagacattgagcgtgcacgaaaggataggggccgtggcgcctcgacggccggcgcgctcatgggctcgttcacggcctgacggggaccgcagttcttcagcgtatccagggcgctgaggctgccgggggtcttggtgtgcaggggccggctggaatacggcgagtggtcccggccgcagtgcggccatggctcacccaggacgggctgcgacctggaggcttcgtcgttggagtagaccgagcctgaactagcagaggacgagggcgacggcaggttgccgtctctgggggggaaagaggaagacgggcaggactcggtgggcgagattaggattagattaggttttgcgtgttcgacgtatgtgacctgttcggccacgaagatatcgctctcgtcgtcggaataaacggaggcggatgaagcagagttgaatgagttgcgtggtgaagtaagtggttcagaggggacgtagactgaagtctgcagtaagataggagattgaagcggggtcgtagagtcaggagaagtcagttcgatgatcatctcgtcgtcgtcgtcgtcattgtcgaagatggtgcaaggctccgtcacaaaagttgcgctgctgctgcgcttgatggtatctatagagccggggcgtgaagtcttacggtctgttgggagcgacagcagacgagagaacgccggtctgccagcccctgactctgggttgtgctggtcttgttcgtcattctgctcctgttcatggcccccgtcgctgacgctcaagatcgagtcgagagtggccgagcgcttgtgggcatcgagcggcgaggcgtggccctctgattcggagatatcctcttcgtcggagtcatagtgtcgtggaagcgttcggttcacgtagctgagatccagcgctacggggtcgtacatgatgttgaagtgacagtcgatgtcgagttgtatacagcagagtaggaatggccggatcactactcggggtcaccaggacagttggcgggggggaagtcgagggagtcgaggaagtcggggatgaggtgaaaaattccagcatcagaccgtcggagggagcaggagttaatgaatgaagggcttttcagagtgaagaatgatcagggataacgatagattaatgtctaatgagtctaacgaggctaaccaagtggaccgcaggaataagaacggctctagtgcagaacgtgcagcgaacatgccaggatagacgacgtaagcagaccaagcagccgaagcagctaagctgggccttgcctgccatgggcaagggcaatggcccatgggccatgggcccatgtagggacctgaaatagagagcccttgcatagctacaggtaccaaagcacggccaatggacagaatctgacagatccaagctgacctgctatccaacgtccacatactcgcactattgaataatatgacagagtcaggtactctaattctagccagtgagcagttccactgcgagagacgccgtcgtcgacggggtctgtgcaagccctaagcctcgccccctgatccgccaaggcccggttccttatctcaaacacgccaacagcagcagattgacagccccagtctagcagaaacatccgctttttgagcaggccaatcggagattttgtggccgatggtccctcgcaggttccttgctttagtcttctgggcctcgcacccacgccgcgatcgcaccggaattgatcgtttcacatagcgagccctctcttagggttaagcacgaagggttcgcagaacgcgcttccttcatacccaccctttatcccagagaggtaggttgagacagtgctcgtatccagtctggagaccatgaccatgcccagctttaagcttcacaacggactctccacatgcaggaacggttgcagtgtgaaacggtcaggtgaactctgcgcgcgagtggctggcagttaatagtaacagtacggagcaaactcaatcgcccctcggctgatgcaggccccgtccagtttatgcaggcaaaccctgctgcaatgtgacctgctgctgccaccacagccggcccagtgcaggccagttgaggagcgcccccgatcctgctcgcgcccttgcgtcgtcgcgtgccggtctattggccacgtctcccagcctccgcgcttctgcgggctggacggccacgctgccgttgagacagtcctgctccgttccagtatactgaagagataccccagaggatatgcagtgcaccatgcatgggccgaacggtgctcactgcttggtttctctgcccagcctcccgctcgggtccgctcgtcaacgtctgcgtgcactcgctgcggtttcagatcccctcaacggggtgaggggcgccggcgccggggtatagggtatatactacgtacaacggaggatactcagagtactacgtgtgggtacgactcgatcacctcgcccacaagagcacaagcgtccatcccttctttgttattcttagcactcgctcaccgcaagaacggggtagatgggatgtcctgaccgatccgaagtctatcaacattaactccaactagccaagcacaactaccgagattgacgaccaagacagactaccaagagggctgcttagacagagacgatcgtttcgctaggtcatccagccgtcaattgagctgtcacggtcgcttcgagcacaaacatgctggcgatctgacgagtcatttcgaccaatgctaccccggcctaagtgccggtcagtgccaaccctgctcgtctgaagatgatcagcgtgagttaaccaatccagatgccaaagagacaaagaaaccaggctgctctatttgcaggaccagtatggccgactggcgctaggccgctggccagcggccagcgactggcggccacttctccaaaacgagccctcactacgccaaccgatatcagccgagccttcactcatctatctcattctcgctcctaccagacgccgttaactgccgctactcatgcagaaatgcacccctctcgttctttcttgttctctgccaacgcccccgttcgtgttcctgttcctgttcctgtcggtggctgtctcgcattgattgcctaatatcaacggccgtgcataaatctgcttacaacgagtgactccgacatgggcatgaaacatgcatcctgacggttcccaacgcgtgacgccctccccttaacctgaaacaggagaagggcttgacctccgagccagccaagccagcccgagtcctatttctcccgggctattattagacggggattctgcacatatggcatattcagagccagggtatattaagtactccgcacccagtctccagcagagaaccgctgcagatgcttgatgacagcacaaaatgggtaccctctcgaccaatcaagctgcggtatgtttgcgtcatcctgaagaatcatagcatgatcacgaccaagtaagtgctatccctgttttcaggcgattcccagtcgacgatcaatggtctgtaattcacaaaatgcaacctgggacggtgcagcgatgatcttccaacgcgnntatgaattgtggctctttagtgtggagaagcgcagaaacgggctgcgggcaatcaatcatcatatgcagagtacccgcttaaggagtattaatatgtatagatgagttgtccctgaaaagggtgcaggtcgtgtcatacaaatatcatatgggatcatatcatatcagactggcccatccaatatcatagaatggatcgctcggcgaagtatcctacctaggtacggagacgaaacacggagtggatgtttacggtgtacgtacctacagcataatctaagttacgttataccatggcatggcgtggcatggcgtgtcagttcaagtcatatcgcttcttcacccctaggtggatcgggtcgaggactttgaagacatcagaagcttctcccttgtttccatcttttgtctgcctcgctgcatctgacatgactccatctatcctatcacggcgttacagcactttgcctctgcctctgccagcaattgagtctactgcagactgcgtccgagcacccgggggtcaggacggtctcagttgtaccagtgtgaccagctcagcgccctctcgtcccatcagccgggcatcggtttctttctgtgtcagtcggcagcagtaccgttgtcttcttgaccatcacaagcccatttgacggacagtcctgcttggagttgatgtgggactaggtcgtgaaagtcctcgtcttccatgcaatcagattcagccccaactttgttaggtcgttctcaagtcgtgctggcgttctcagttcttcatatcagcccgtctactctgttttgtaccgtctactttgtcgtgccgggagggtagtagtgcgcctgggcatcccatccccatgcctagggtaggaccgccacgtcacagtcacacaggcctggggaagacctcaagtaccactcccgtacgacagagtattcgactgcgtcgtaacgaagtagtcgagtcactcccgtgttgtgataaatggagcgtgatcgcaggtgggggatcgacacaatagcaaatggtgacaaggtaagcgtatcctgcggagcaaggacaatgaagatgttattcaccctagcacagtatatacacagtcaaagcacatattacatttaggttgccgtcatctatagatactaag

SEQ ID NO: 4980 - DNA, 5633 bp, Emericella nidulans
ggagccgtcaatccgctaccctgcctctggtcagttggtctcagcaatgtaccctgtgagtcttgatagactagttggtgactagtctctgtagatggaacaaatggtgcttgagagggcacgtatggcagagctccagtcatctgcggaacatatactgggcccgggttgactagttgtgaactagatggtaaatatccaggtagaggtggatattgcactggatttacaccaactagttgaggactagttggctgtagtagacgctgctgcataagccgagtctctacctcatatcgatctagacgtgcttggcgctcacgaagatcaagtatatgttgttcatggctagcctgctgatcgcgatagttctgagaagcaatctgggctagggatggagacctagactagtcagcaactagtcccggattagtccttcatgacttaccgctgtggtgtagaacttcggcttactcctctagtataactcctacccctggtactagacctggagcggcgtggccgtggagatccagaggatgagaaagatctagaaggacgtgctcttctaggtagtactccttctatattttcctcttcctcaatctcctgattacggcgtcgttttctttctaatactggttagtaaccagttaggcactagtcaaggctagacttacggtccctgattaaattctctgtaattcttgagatctcatcgtctggccgataggaatgggtaatgttataatgtatccgcacagagtactgatgcatatctcgtacatcaagaaaatatgcactatgagaactagtcagagtctaaacaaagcctagtcttgacttagaaacttacctagtaactgcctttagaattggtaggtgcttcccactaaaagcatatgatttttggtgggtttgttcacctgcattggtatgcatacgggtttgattaaaatgctgttcagggatttgtgagcaagctttatttaatccagcagaaactaccggatgcagcttatgttcagcccaagttgccacgcctggagttggatcctctatatcaatcagttactagttgctaactagttatggtctggacttacctagtaattgctctaaaatatccatatactgggctcgggtaggggcatgtaaaagactaatcattgccttaaataagactgtatgacgttggttctggccaattatattctcaatcccacggataaaatgaacccggcagaagataagaattctttctaactgccagtctggttcatgatgttctggatcaagctcttgtaggcattttcccaaacctaactagttagcaactagtgggtaactagtcagtgcacaaagaaaacataccgtccctctgtccttcatccatatcaacaacgatagtttcaatgccggttccatgaagatggaaaaactgtactggatggcctgaaagatcatgaatcatctcaaagacctttttaaatagaaaatagtaggcacggcctgtttgttggttcataaacgcacgaaggagtgtgataactagaaggtgattagttattgactagtctgggactagagcaggactagtattgtacttaccttttccatgatcctctaaaaaaacagcaaagataacctcgttaaacctgccctcacgtacgcgtttgaaggacatgtcaacttcaaatgagcgtaggctttgaaatagcttggcctgatcttgcaatatacaaataataattgtaatatcaccttcatgatagatttctcgcacataatgctagttagatgttatccactaatccccgactagtcagtaactagatagggactaatctttacataccttaagatattcattccggtcgcattctagttgtagtgcattaagatcttggccatcaggataaaatgcaagcttctcccggtaaataagagcctgtattcgatccatatttgctagagcaggatgaaggcctataattgagtcctcattatatcgcgcgagtaagtcctgcatttgaggactgcggataagttggcctagtctagttagcaactaattgtggattagaaagggattagtttaatagcagtactgactaattcgaagatcaggattctgcatgtcacgaataatataagagatttcatctgcaatttcgccagggatcttggctggaggaggtggaggatgagtatgtattcctgttgatgtaaaaagataatagggaaaggcctccaggtctaatggaatcataacattaaagatcgcagtacaaggttgcgactctattagtgatatatcatcaccatgcagaaagccttagcaagaattagttagcaattagtccaagactagcccaagactagctgtataactcactgcagttacagtacgttctctttgaccggcttgtgtcaatcattgcacagtattttggttcaataattcctctctgctcgaataattgagctagatataggatatccgtatctgtacgaaatgcaagagaatcaaaaaaatgttgtttatgggtttccggtgttgaattagagcaacatatataggatgaagcatggcccatttgaagctgactagttagtaactagacccagactagtctaccctaaggtacttacagcttcgccaagtaccatcttaggagcacaccctacttgttgcggccgacaagcttgatgtctcttaaatacacgaagcacaccaaagaaatgtctatataaacatgattagtccttgattagtctctaatcaaataaagactagttactcacgagattgctttctgttttttaggatccatttctgtctcttcaataagttgtcgctcctgtcggatatagttccagtcatcttctgtaaccttgtaatggtgcatatttctaaggttaggatggagataagagcatattcgaacgcctgaacactggtactgtattcgagtaaccctgcctcgaatatagggtgattgagcatcataacgctccaactggcgagcatggtattgagtctgtgactagtcagcaactagtcccttattagttatagaacgaacatttttaataagtcttcccttatcttccctgctccttacccggttcggatcaagtgggacaatataggtatagccgttctgatgagattcaggatagtaaggtaacatatagcagtattcaagtttagatgtgattagaggacgtgttggatgattgctaagaataactctgtcaatctgctgccagttagcaactagtcacaaactaggtaagaaaaatgaagtcttgtacctgttctggaacgtcaatagcacctggaatttgcggagttgtagacatggtggcagcaagttgcaaactagtcagtgactagtctgagactatttcttattggcagattgaagttgaggtaaataaaggaggaaaagtccattactgacaagtggtattatattttagctaactctaagtcgaccttactcctttgggttagtgcgctcaaaagaggaatagccgacttagagttagctcgcgacatttaccacgtcacatgtggtctctcacatgtggtctcgagagtccatgacgatgaccatgggagcgttgaatgtggagagcggacttcggacagacccgccggacgagagactcgagacttgacctcgggactttgccatcgcaagtggtcccggattgggttagcgtggattcttggccagcgactaacatcctccgcccgcctctaacagcacgcctctcgtaaacggatccagatctacgaagaaacgaccaaagagagagaacggagaatatctgtccaagcaaagtatgtggatggctaaactatgtgcgttataatcacttacagaatgctatgctgactgctcattctcccacaaggtgcccatctttgcaatgaggttatgtgtttccctactgctgcttctcgaaacaagggagccattccttcaacgcctgccggaagtatcctcgagacacttctccggtctccgaaccggtttggaaatcgaagcagtggacttggttagctccgacatacccaaacaccgtgtctgggccggtccgcaccccgcaccgagggacgtccgacgtaacgttaagctgcagggagaactgctcccccgataataacgtcagtgtcctccaggggtcgaattcgcctgcactgaagtatacgttcgatggccggatgttccaaccgccgaactccgcgttgagggcatctacccgtggctgcggagggagaagaccgttctttacggcctcggggaattgccggttacacatgacctgttgaaattccagggtctggtatcgagaaagcagggagtggactccctcgttgttgctctggtaaaaaccccactccgtgcagtactgccaggtccaggcgatggcggttggattcgttgtgggcttgttcagctcgcaagacggtgcaactgacttatccagacccttgcagtttgtctcgtaattcacgttgattaattgtgtaaatatcggccactcagcccaacgctccgctaggtgcttatatccgtgtcttaatgccaggccttcggtttccgcgggctgccccgtcaccggatctgactcgaggtaacgacaaaactcgcccagcgatccagcaggaccgtccataccataagcttggaaggagccgtaaatcaccgcaagggcgtgtgtgaagtcctcatttgagttcttctcggcgccggggccgaagaagagctgtttgattgacgccgctgtatcgttctgagagagctggttatcgatatattcaagagccgcgtgaatatttgaagcgcagcttcggaatccgttcgcgaccattgatcgataaacttgctcataatagatgctcatattgatctgcgcctgaaccggcgccgaggcagcgaacgaagcaaatatcgtatctggatattcattgcgagcaaatgcagcgcgtgcgcccggatacgagcctcctatcataacccaaggagttgaggccggggtcaagtcgtattcctggagacctggacgggtgaaattctccgcgaaggcagggatatctgcgagtgcctgtctcgtagtgagatatatcaaatgctctggcagggtgttgttattgacaggatatggtaacgaatctccataatacctgtttctgtcaatctctatcctcgtttcaactttagtggagacgactgaccgatgctcccagacaattcctatcgcgccgaactcttggagtataggtggtaagaacgaagaattcgatctgagatgagcaacactcggctctccatcagcctcacccacatcatacaaaaccactggccctccaggcacatagtacgcatcgttcacccagtagcgatttcgtaaggttccgatagcggggttatggtgatcaatagggagctgcagagcattagatcccgtacacatggtcatcaaaaagcgagagtctaccaaaacatattcacctggaccgttggtctgtgtgaccactgcccggagggactgggaatctttcagcaaaagataaaatccaaccccagatcagcagccagttgcaagctctttcc

SEQ ID NO: 4981 - DNA, 5245 bp, Emericella nidulans
ctgaaaacgcactatataatgacatgggagaatggttagggccgtgataatgtagagccgttcgcttttcacacagagacatccgcccgctaaccgtgtgccgcatactcataaagatcgtacagaaggtaatccgtgagagaagccggagagaatggataaacgactaagaaatgctaatttgcaggtcgaaattattcggatcatgctgtgagaacatctgattcattatcggtttctcgacgccgcacggcaatccagatccatcgcccatccgcatgggtccctggtgcgcgtttgacaggtccataccggctgggttgagactggtacgggaatggttaagattgtgatggtgaggggggtccctgggtatgaaggctggtcacagtctgacgcggcgagatacactctgaaccgtgacgctggccaaacgagcggtcaccctcgtcgtcctgttctctgctggaagctgaggtcccgctcgaagccgacgagatggaatcatgctttgttgcctgcttgaccatacgccccaagtacaggtggatagcctcatcatcgcaccgtgagtgcatgaggatctggtctttcagcgaaacgagttggctgtgcagttccttgatttcgatctcaagggtggactttctacgcgacacctctgggaaccgtgtccgcaattggtccgtctctcgcttcttcttctgacgcgacttgctcgcagcggcccggttgcgctcgaggtgcttggctcgcttctctgcgtctccggtctgccagcgtagtggcgaggatgacttgttgctgctgatatccgagtgcggcgagaaccggaactctggatcttgttctgcggggttaaaagtggtggaagtagaggagaaggatgagaaagagggcattggcccgtaagaattgaggaagcccggctggttgaagtcgtcggttgagtctttacgggtgtcgcggggcgctgggcggagggcgcgggtgcggtagcgaggacgcatcatgtcctcgtttgcatttgtgctttcgccctgcatggcccgtacggagaccatagcgggttggtggggtgagaattgcatgtgttccagcggcagctcgtgatgatgcccatctttttcgagtagagagagaggaagaaattctggagagaattcctggcccagaaatagtgactcgggggcgatcgcggaatccaggctgggatcgggctgatagaaagttgtttggctggtcatgctgttggttaccaatactgttcctgctcgattttggtagtcttgatatggatgttttagccagctgggtcttttgatatggtgcaatagcactttcccggcctatcgggagatggtagggagcgttaaggtcaattgagaggttagaatgaagaaaggctgtattgattgggcgttacagatactaaatagctggtctgaagttgcaaatgttggatggatcagcaattgaatatgaagttagaaaagaaaagctttaaggtggcccgtagctttgccatggagctatataccgatccacgagggcatcgagtaagcggggaaaccagccctcagcgcaggtattgacgttttccaaggaaggatcgcgataaccagactcaaggaaagttgatcttgcgctaccatacaaaatagcagttctgaaggtccatggctgtaagtagatcagtgtcagaatgacgcctgcactcctgaattcgtgcaggtgtcatgtctcgaaacaatcagagtggcgggaagagaaatactgcttgggtcccgctgcgattggtacctccactttactagcacaagctgtactaggaaaggtatatcgtagccttgtgaatcagttagtctttgaacccttcctgcaccgggtttggatggtgccattctgccgtttctcgcgcagcgggtacccgggggggtagcgattccggcgacccagctagtgtaattgagcagaattgtgaagaagtactggtaagtactggtgcagtaatctcgtaggatcagtctcgggagaaacgtccggcaaacgtgctgatgcaatatgacatagagccctgtaaggccgttgatcttggagttcttgttatcatccctcgctcagctcctaccccagcaaaagtccagaccatgtctcaatcaagccactgcgaaccttgaccattggagagtgatgagtaaacttgccacctacccttttgcctaaaaggttaatagccctgcatccgccaatcatggaaaatagatcgtgagtcaggccgcccgcacaacaagcagtgccgttgcccgaatgcggcgagagatgatcgatccaagccttgtaagcgtacactaggctttagcttcggccaatgaaaagcagctggaagtggtatccggctcatgaggcgggttttgatattttatcttgaccctgccaaccggttgcatcaccattcattggtggggcaccggcaagtgtccaagttgataacttgtttcctgaccaatcctgcaactcactacatcctggaattctcgatccttgtgctgggaagactcggggcgggaatgttgtttgccatcccgggattgtgatctatcaaatccatggagaccgcacgctattcgcgtgcaaccgctgggcgaccctgcctatcagccatcacattcctgggtttgacgtctttccgccatggacctttggaatttttggtgattgttcttgaatgcatagatggcagaaatcgagcttctaggaggcaggtcaatatcccttgggaactttggctgcagaattccagcacacggctgtctggaatgtgagaaagtaggaaaatttttggagttatattttaacgggcgcttaccttcttcgattcaatatcatcgtgatggacagaggagcttttaggagtgaattatctccctgcggcacttgatatcaaactatactgctgaaatggaaagagaattgaaggataatgcggttgcaagcaagcccgagctctcggtacgctccacccaacatttctctttgagatatagttaaccttgcgactcttttgaaatactcagagcgacgtcattgaagccaaaccctctgattttgcctcagaacaatccgcggtgccaattagatcgcaacgcagagaaagcacctattccacatgcttgaaaactccacgggcctcgagacagagtctgcaatctctggttaccagtccccagcacaatccagagaataactattaccgacagcctggctgtcgcgtgtttcggcgagtgtcgcatctcgatcatgcgaccagctcattatgccgtgacccagagagcccattgtcgcgaagtcgggggttcttgaggaatatgaaatcaaaaattcgcatgccgtctctatccttgaaccatcaggacgtgtcgcaggagatcaagccaaggcgtagtaggatgttcgttttgttttcttctcgggcgctattgtttgcagagggtcgccgcgattattcctcgaggagatattgagtttatatgaggtgtgcttttggtggtgctcacaactaccaacacttcttatatcgctccagcgcttctggcttgcatcgaataatcaggttgcctctgacacgcattgttgctggatttgacatgcggcatcacaaactcgaaataacaacatcctctggcaaatcaatcagagatgtcgtaagctagaaataaaacctggagtatggtctcgccctgcgtgagaaatccaaacgactcaataggagtcgggttcaagatcctgtgtgggtcatgtacgagagcttcgcgtcgcagaaagttcctacggccttgattggtggaagagatccaaagagagaaatcagttcattttgggaaaccagcatccaatgacgggcaatctttgggcgcttttcgctaattgaaattattgtgtcattagtgtccttagtttcaataatgtcttgtcgacgtcgaccacccgggacttccattatccgaggcacgtgctcgagggcatatcaaccatggatttgagtctctcaaccacaaaagcgttttgcctcgccgcatcaacagtcgcaatggggagtatcagtgtcaactggatttcccagcgagtcatcgtgactagacgttattgagagcaggccatggttttttgtggactgccgcaatcaacctggccgcttcatttcgggatttgacaccattaattatccccctcgcagcccgtaattgcatggcagaggcgtaacgcgaatcacgagaggccacaatccttcgtatgtagcttggagtagtgctggggtactgattgaagcccgtaataacgagacgcctatggactcgtgccaggatgcgcgtcaccgggttcttccgacaaccacagccaccgatataaccattatccacattgatccatcccaaaaaggctcaatgcgtcttcgcgcgctgcaggggcggggcagggtatcgtcggaacgggagcaatccggggtagctaatggagattgaacgagatctgtagatctagctggatcgatgactcaaagcaaatgcttgctatgatcagggatacggtaaattgcttgataattcgacggtccctagtcgaggcgcgagtcagtaacacggggcaagctaggaacgatcgcggaagacccgcaggaacaatccaaggttggttgatcaggtgctcaatgaagggctggccagaagcacatacgtaggcagactcaacttcaaggaacgtgaaacggcatcaggatcgaaatgacgtacgcgtagagagtccgaggttcgaattttggatagcctcgtgaagtggaagcgaatcgagtggtcgccgaccggaagccaagctgagagaaccccgtgggcagccagaatgcggggtttgcctgaacccgcctgcagccgggtcttatctaactctggtatcctccacctgtcttctcagccttctagctgaatccaagctctgaatccgagaatggaagttgaatatggaggtagaacattcaacgcctcccacgcctaccgagggcttttagaagatgcgtcgacggatcgtagcccagctggcgcgctaactacaggccgaccgtatcaatcacaaggccaaacgcgagcagcagaagcggcatatggagaacctggaaacacaagtctacaatttatagcaggccgtccagtcgctcaccgaacaagctcgcgacctcaacgaaagactgcgg

SEQ ID NO: 4982 - DNA, 7737 bp, Emericella nidulans
tcttcaccaagggcctgcgcttcatcttctccacccgatccaaagtgccgtacatcctgaaggagaacagcgacgagaagctcttcggcggctcatacgagttccagccaggcaaggaggagtttatccgcaagggcaaggctgggtatgtagtttcctacggcgacatgctctaccgttcgcttgatgccgtcgagcgtctccgcaaggaaggcctcgacgttggtctgatcaacaagcctaccctaaacgttgtcgacgaggacgcgatcaaggagtatggctcgtcaccgtttgtggtcgtcgtcgagtctctcgcgcagaaaaccagtcttgggtcacggctgggatcccacctcctggaccgcggcctgacgcctaagttccgcatgatgggtgcagtcaaggagggctgtggcggcctgttcgagcagatcaacgcgcagggtatgggtcctgacgatattgtccgtgtggttaaagaggttgctcaaaagtagatatgcatatgagataaatgatatatgctagaaatgatcttcaaggcacaatacactcgactacggcggtgaagttacctgttctaagtatcagtgtcgtattctataacgaatatccaccatcgccatctctctttttgattctcaaaaggccaaggggtttcatcaggcagcatcaatgtgccgtaatgtcagtaccaatgttcagtactaatgtgcgagtagtccaccctatattcctcaggcaataaataaaatgaagctaatgcgagaatgcttcgtctcgcaacttcttcactacaccctcgattacccttttgaccccttcagtatccagctcatcgaccccaagcagaatattatccgtcgtctcgaaatgccccccagcatccttaccccaaccagcacgataaatgaatggcatcatggactcgaagctgaacacgccctgcttgatcagagcccacgctttctcgacttcctgatctatatccgtttcatttacggtccagtccttgtcgccgacgacttcctgtactagtgagagcagctgcttgatcgtgacgtttgcctcggcaattcgcacgactcggttcttagtctcctcagggttggcgagcacactcacgaccgcatgcccgatcgtaggttgcgtggtcgtgctgtagaccctctcacccccatcatacaacaccgcggtcctcttccctacatcgatcggaaacgcgtgtgtcaggccccagtccaggaaagcaccgttatagatgatcgtatagctgatcttgttctctgcggctagtcttttgagaagctcctgtatgttcaccttgcccttgtaggtcggcgcagcccggtttactgggttatcgaggtcggaaccaaactcagaggggatgaaacgatagacaccggctgcgactgcggcctggatcaggttcatttgtttgtcgggcgccgtgtgggggagtagcgagaccacggcgtggatggagtggacggttagatgggtggtcagatcgtcgacagagtcataattgactgggagagtttgaatcctgggcttgggggttccggtactatttccgctgtcactgcaattaccgttactgttgactggaacctggatgggcgctgaggttgacgaaggagaacgaatcccagcgtcgttttcggccttgagccgagtgaagatggtgatcttgaagagcccggaagtgatgagcgcgtgaagtacggctgggccaaggttaccgttgacctgtagtggttagctagaggatataggtgggagtacgtctagtggagggatatagatataccccagcaacggcaacgttctggatgttcttggtcgccatctgggcaggccacgtaggaaagtacatatatatatatatattacttctttcttttcacgagtaagacttgacggttcggctatagatttaatgcgagggtctcaatggagaatatgtagtatagtcggctcaagaggtatttggagttaagtgagttcaagttgcaggaagaccggctgccgaaacgatagtgctcacttataacataaccctgtgttacaaatcgaactgagtctgggagtgtcagaaccgattcgtcatctgatgccgcaatcaatgttctttatcatccatctcacaccaatagaggaatatcccgttggggccaagaattaccctgtttgcgaacaaaccacaataacaaaccttactcgaggccaactcgggactcggcaattcagctagttataggaagacaactagcacgcttgcagagaagatgctggctgggaaggggttgaagacttagcctgggctaaactcgacgtgctctggtggtgtctgtaggcttgtataggaggctgtgggattaaggaacaagatgtggccgaacggctagttgcggtctgccactcaggcccactatagcgtgaaaccaagacaagttattggctggaaatagctgaatttttgtccaaagttatgctcacgacagaaatttaaaatccacgcactcttaggcctcccaccggcttcctagccgtttcggctcccacaatttctcagtcgttccatcctttgactctcgattcgattcatccactccaagcactctcatctagaccattgcttatccagactattctaaacagactagaattttcgggtaatcactcttcgtggtttattgtccaagcccaccgacgcgggctcggagatctagctcggaataacggtttcggacttgggacaagccagtgatgcttatgtgcgaccaccccggatgcacagcccagtacaggcgaaaagagcatttgacccgtcatgcccgcaagcatgcgccgctggcccaaaggctaacatgtgaggtatgcagcaaggcctttgaccggacggactcgcttcggaggcaccggcagctgcatcggagggagaaggagagcgaggggccgggttccaggacggtcaaggcctgcgatcggtgtcatgaatgtaagacaagatgtgatggtgggcagccgtgtggcgtttgtgcgaggaagggggccaggtgcacgtttgaccggtcgagcaaggctggacctacgactggacagagcacagggaggttgggcccggaccggccgcagaagctgtatggagtatgtgagactgcaaagacactgggcagtcaggcttacagaggcggctccgccgcccggcaaacgcctgtctcgggcagcgagatccaggatctcctgctccagcacgagagcaacctccgggaaagggggctgctagggactgcagccgctgggcccctggagccaagaagccagaataaagatcttgacatcgaccgctacgtcggtgtatacttttcccacttccactatcagtggccgctcatccaccgcgccgcctttggacggagtaatgacgcctccaatcttactgttggcaatcgtgatgatcgggctttggcttacgggtgaggccgctgctcgggaccgagcagagaagatgcatgagaagttcctggcgctgtggaaaaccgcatagtaggcttcctcttccttgtgataatacttgctaatggcctcactaggatgcctggaagctggacggcgaattcaccgacaagacctggccaatgacgacctaccaaaccattgtcctcaatgtcatctttgctataattcgggacgtcccgcagtgcctcgtctcccgcttccggtccttgctgcatgccgtcacaaccacctgcctggccggcggcctctttacctacgccaaaatgcaggccttgttggaaccaacggactccttggtctatagctggacatacatggaagaggtcaaacgccttgccctggccatatttaagttgaaccaccatctcaacacgggcatgctgcgtccctcggacctgcaatttcccctcccggatagtggatacttgtgggatgcgccggagacgaaggacttctattgccggtaccatgtccagctagagtcgcggactcgtgtagacgatggaccgttgatatgtgatattgtgagggatgtccaagatgggaagcggggactcgggatgctcttccaggcagatagttggctagggttcgcggtttcgcaggcgatactatccgagaaaacgccaccatctgtagactgcatgcaaaactgactttctgggttctcgtgtcttcggcgtggatgggtgaaggcttactgtcgtatcccaccgggataaaattaataatccacgtattcagcaatgcgcccaatgagtggggctcggcaattcctcttatactctgtcagcgactagaatgttctgaattgtcactctgtcctgttgggattctagagaccgcaccatactatgcctggcagcccaaatcgcccctctgaggctctggccagggccttgtcgcatttgactaaggataccgctgttggtagacaagctcattgtcattgccatcaccatcactaccaggagcatcaggatcacgaatggttcctgcaaatagatacatggggccagctcgaacttctccgccagctcctgtgtcgacggagcccagagattgaactcactgaagggcagctgcaagatatcgatatagtcctctcgtacaaacacagccacgcactatttaccccttcagaatctctccatccgcgactcgtggtcaacaaatcaaggatatccgtgtggaagggcgatattaccaccctatctaatgtgacggctattgtcaatgccgcaaactcggcgctgctcgggtgcttccagccgtcgcaccggtgtattgataatgttatccattctgctgctgggcctcgtctaagacaggcatgtttcgagttgatgatggagcagggccatgatgaaccggtgggatgcgcaaaagtaacacctgggttcaagttgcaagctccgtatgtcatccatacggttgggcctgaccttggacacggacaattgcccgatcgcaggcacagggagcagctgcgtgactgctatgtatcttgccttgaggccatggaaactgtccctgcgctaccagacgggcgcaaggtcatcgcgttctgctgcatctcgacgggccttttcgcgttcccgtctgatatagcggctcagatcgccattgacactgtgttaagttggtgtttggagcatccaacgacaaccgtcactgacattatcttcgacactttccttcaacgggactttaatctatacaacgacaagatctctacccttgtttccagtagcaacgactgcgtgcatatagcgcccattcctccacagccagcaccagttgcctccccatcaataaagacggcccgctcctggctcgagcaagcagactacctcatcatcagtgctggtgccggtctctccgccgcaacagggctggactatacttctacggacttgttcgccaactattttcccgcattcctgccgctcggtctgaggagattgtacgacgtcttcggcttcagcgggtggaaatcccccgctcaaaaatgggggtactattttcatcatttgaatatggttaagacgtggccaaagtccccattatacgcttctttgctagagataacatcacggtttggccctcggtgtttcgttcggacttcgaacgcggatggattatttcttgccaatggcttccatccgtctcgcatctccacgccccaggggcaatatgcctatttgcaatgttttgccaaatgtaaacgcgaagctgtctttccgtccgcgccgttcttgactgcggcccttccatttttggattcgcagacgcaactactcacggatgagtccaagatccccaggtgcaggtactgcagtggggagcttacactctgtgtccgcggcggagattacttcaatgactctccctttcaaggtcaagagcgggagtatgcccgctttttggagcacgtatcctctgaaatagagcaagggaggagtgcagtcatactcgaattaggcgttggaatgaacactccctctgtactacggtggcacaacgaagagctagtcgaagaatcgaatggcgggtcaaggctaattagagcagggtttgatgcggcagggtgtgtgccttggaggctagcggaggagggcgttgcagtaggagttgccggggaattgaatgcccgttgatgacctactgagaggacctgttacatgcaactgaattcagaatgcagtcttctgacaccgggagccggatgtcagctgaaggagttccgacagaagaagtatgagtcactaaaccaactatcttccaaccactctctgcgaagtgccaccgtgtgggcttactcgaccttggtctaaatggttacgtgtggggactagatgggcttgtacgcctggaccccttcatacgcttgcgcagtacccgctacgatgaagggttgtttctattatagaaaacgacaatgcacaggaataagcagcacctcaattaggcctaatgatacaggccgaaatatattgtgcaaaaccttgaggcacaagggggctccatgttacagaggttctatctcgtttaagagactctcagtcaggcaactacccgtataagtatatcaatatcctaaaccgttccgcgccccgacgaaatccaccacatcgaaaaagctcttcttgtagacccgctctaaggtagtgcggttgacaacttggatcccaaattgggatgcatagtccccaaactcccagttatcggcgaagctccacgcaaaggcacctgctacgtgcacgccgtcttcccagattgctttgagtgtttcagataggtaagagaggtagtattggctccgtggagagtcaaagacttgatcttgtagttcacgttcggattctgcgtacactgggaacccgaattcgccgatcaagacgggagtccggaaagtattccagaggtagtaaagataggagcggagatatttcggcgtgatgtacacgtagctttgggaacgatagccgatatcccagccatagatgtttgtcgtctcctgcgtaacgcagtaggggtagagactattggtgctcatgttctgttttgcgcaggtttcgatgccaccaggcggagcggagacgatgttgcatgttaggggtcaatacctaagatgtcagttgtgttggccatatagtcgagctgggcttcggtgagcttctgtgcgccggggagggtgttgagaagtgtctctgggtattgctcgcccaaacagagagggttgccgaaggccccaagctgcatctcgttgaagcggttggcggcattgatgtcggtctggttttctgggttcttggggacgccaaagttgttgttcagtttgaagccaaccttgccagtgccgccgagctcttcgtggtagtagtggtacagttccgcgtgtgcctgaacgacgttatggataccggtgaagttgaaggagtacaaaaggggttcgttaaacgtcacccagaccgggactcggtctgcatagtgcgtgaagaggatcttgccatagttgacgaaggtttgacgaattcgggatgccagtaccccccgttactcgcgccaacatccggggtggccgatacgctggacccctccaggaagtagaggggcgagtcgaagtggatcatggtcaccactggcagcatgcctacctcgagaatgtaagtgatcagatcgtcgtattgctgtattggctgc

SEQ ID NO: 4983 - DNA, 4975 bp, Emericella nidulans
attcgcgacttcatggctcacaatcctgtggatagggatcgtaggtcagacggaagccgattcacgagcccgctgagagattcatcaggcgataagagcatttccgagatgagagcatcgatctggcgaacaaaaaggcgtaaatgttcacggctgaagatccgactatcgcttgatgcctccagggtcatgtttccgcttggcgactggaaaacattcatggccatgggatgctcaacatgcaggccaatctggtcttcaagctcatgccagagaccaggcaggctcgcaatttttctgtcctttgattcgtcaagcgcgtggaaattgaatactgcagggtacaacggctctcctctctgccgcttaagggccttccgaatatctctcgcatgaacatgtcgatgcttccacgattgcaaggagagccggtgctgttctgccaggatcttcctcactgtcgtatccccttctactcggaacggaaccggaacaacagatataaaaggaccgactgcgctttccaaggacggatcaaagacgcggtctgataacgtctccgcaaacaccgtccccgacaggcccagataagacaggctgacgaacgcccatgccgccctaatgatcgacgcaacagatttcagccctagatctgctgcgactttctctaaaactgggaaggacgaggttattgacatcgcctcggatatcagtttgtattctggcgccgcgcctggtgagacccgtttacctgtgagatcgggccagacggggacgtcgagggcggcgtacggcttgagctccaaggaccagaaatcaacagcttcggcgtatttgcttggagttgggagcacaagcgcgagggcgggggtcagctgggtgcgaagaggcggtttgtaggtatatgcggcgcggacatcgtccatcaagaacttgagggaaggctcgtcatggattgagtggtggagtgtcaagaccatgactcgttcggtgccttcttccagtattgtgactgcccaaggaggatggcagaagtagttcttctggtgcgccgtcatgatatcccgcactcggttctttagcacccaactccactcttccttcctgtaggtatgagcctcccaatccaccgccggaagcttatacacaacctgcaaaatagaaaatcccgaatccctagcctgtttcttattctttgcaaaccgtctgtgcgacaggtataaaccccgtccggagcgtctcagtcttctggcacacggcataccaagcttgtcgtagtcggggaatgtcgacagacctatcaagtctgaagaaatgattgctccagtacatgtcgtatgtacccattgtctcagtaagcaagctctcctggatagctgtggcgcggatcgttgtaaacgcgtccttctcagggatctttgctgctgctgcgacgagggtatgccatatcttgttgaaggagacgatatcgaacttgtcgttgtgagggctagctgagtttgcagatgaactgaatgaagtagactgggctaatctgacaagatcctggatagtggtgcaggccaggacatccataacagaaagaccaaacccggcctccttgagcctaaatgcaagacgcgtggcacagagtgagtcaacacctagactgcgtaatctattgctctttgtgatagtcgagctctcaacatgcaccagcgctgccactgtctcgatgatctgagtggccgtggcagcatcatcctcatctgcatctccggggccctcagggttaacgttgttctcccacttgtcaatatcaaccgctgcgtacgcagcctgtaaagcgcgtcgatcgacctttgcagatggcgtttttggtatcttcttgacaataagatacacagagggaatcatgttctctggcaggacattgcgcgcctgaaggcttgctgcacgggcaatatctctaccagtgtcgtcaagcaccaacaaaccttcatccgcatcaccagcagccttcggggcgcacaagaacgcaacaacaactctgactggcctgtctttcctgctaagtatcatagtctccacgctctcgacgagttcatgacaccctctcagcgcaaaacttatctccgacaactcaatcctaatgccacctagtttcacaaggtcatcaacacgcgtgatgtactccagactcccatcagatagcatgcggacaaggtcacccgtatagtaaagccgctgcccagcgtcctcattccagatatacttcgtgtccgttacgtcctttaaattcaagtattctggtgaaagctgagggccacctaatgcaagctctccaatggcattcttcatgagcacgcgcttatctttggacatcacgaagaccgaaacactgctcattggccacccgatattcgcacttttgacggatctatgttcattgccgaattcgcggatcgtactgacgaccgtcgcctccgcggggccgtaggtattgaacgccctcatgtctgtcccccaatcatccgcaacactctgtgtcaatttttcgccgatcattgttacgactttaagcgttttgcatgatttcctcgcgacaccagccgcaaaggcaggcgtgagatgggcgtgcgttgccttggtgatatttgcaagtttagggaaagattcgagcattatctccctcgtgccagaaataagcgcgcctcctaagccccaagtgtagaagaggtcttggatggagacatcgaaggttggttgcgagaattggaggcagcgaatgggactgccgtcttcgttacccgggatatcggtctggagggagcgcatgctagagacggcggctgagtgcgtaatgggtacgcccttgggagcgccagttgtgccactcgtccagattaggtaggctgtatttctaggggttgctcggtgtctgcttgactgtggggtattgtcgctcgagacattctgaatgaacttgctaacatcaataactctgactccagctggaacagcattctgaggttgtggcgtatcgagaccagaaaccagaaggataccggcactagttcgcgcaatgagatcatggcgacgctgtgctggggaaagtgtatcaatgggacaccaggcgcctcctgccttgaggatacctaggatcgcaacatacaagggtggactcttctcgatgcaaatcggaacagaagcatctctcagatcaccacaaacctggagcagatgttccgcaagagcttcagccatagcgttgagttgggcatatgtccaagtgatgtttcctggatgatcatcattatcaaggtcctgcttaaatactagagctgggtcatttggatgcgagagggcatggtcttcgaactgtgattgtaggagtgctccttcgctgacttctggagctgtaattggactggggttcgctttcgatttcagagctaagctggcttgaagaggagcatcttcgaaactcgagtccgggtggttgaggatgtagctgacgatatcatccatttgtttcagcatgatttgagctccggtagagtcgagtttcgtgtcgaaactagcccgcagcgtcaacgtcgagtccggattggggaccacctcgatcatcacagagaaatcatttgccatagcgggatgttggacagaactccaggtttgagaaggtttcatatcagtgtcaaagtcctggtatgcgaggactgtgtcatagggaaccttgccatttacggtcacagatcctagctgaggctggaggtgtgagagcgcttttgcatttgaagacgacagatagtggaccactgattggtttgtcaaggatccggaacccttcaattgctggacggaaattctggaaggcgttatcgtaaaggtcggaccaatgcagtctttcgaatcgggatcaagtcgtccagacatcacacttcccaaaactacgtcctgatccggcgtagctgtgtagctgagaactaccgcaccccatgctgcctgcagcacagagagtggtgtagagccaatgctttttgagagttttttgagggctccgtaactgagttgagaggtgacctcagcacagccagtgcttttctgggccggcgctcgatgcggagtgagagatggaaaggggaggagagagtaaccttgtagatattccctccagaatttggatgtggaagtgtgatctgcctggaagtggtgtttgacgatgtgggttagtgaggttcgctgcggtagtgtgtttccggagtacgctgacgagacatcttgcaagaggagctgtagagagccgccgtcgaagattccgtggaacatgctgaggatcatgatggacttcgtcgatgactgcaccaaagacagcttccagggaggtctcctcaatgtgattgattcttcagcactccgaagagcgtggtcgataatgtcgttttctgcggagcactcgttagggcttgtgtaaacgttccagtccctggatgagacgccctcagccgtcaagatgcactgtgcaaacggggccagctcatcgtcgaccatacagaagaccgtccggaaagagtcatagtttgagataacatcgaaccaggccttcttgagcttctcaatgttggtacggggctcaagtggaaggacagtatgataaatgtatgttggtttctcataggactgttccgcagagctacgcagaaaactagtcaacatcccggattgagtagcagtggtaggaaggacttcatgtatcgtgtccgcgggcacgtcaagggattctgcgcaaaacatgcgatatcgccggccgaatgactgcagtcttaactgcaagtcgtttgttatactgcccttctgaagtatcccattaggctcgccattttgattcgtcagcatgctctggacgagagagacaagccgctggcatgtatgtgtttgcagcacttcgccgacggacagcccatggaccccattgtctctcagcttctgtaga

SEQ ID NO: 4984 - DNA, 3045 bp, Emericella nidulans
cttggtcgttacctttgcacgggggagcacgatgaaactggcggcccctctcgtcgaaatgttcttatatggccacttatcgggaatcattggggggtttacaatccttggtcggcgagggacgtttgacgtcgtctggaggtgcccaaatatgcagagagcctacgaagtacgtaggccagatatttcgccccgtcccgtcccgcttgacgtaagcggttccaacattacaaagtcatttgtgtgaaagatgaaatcatacacccaaagacctgtttgagtatgtttggaggggtcaggtgaactgtacgactccgctctcaacagcatctcgggtatacactgggcttggcagtaccataaaccatgaatacatcaattacatcaattacctcagtcgacgtcaattacgtcagctactacttgtttcattgttgctctatttagggtgtcaattgtcatcataaaagaagcgattatcgacgctaagatggtcatatgtgcagtctgacaattataaactgatacccattatcctgcttctagagtgtctttcgcggtctgtaaagagaatagtcaaaatatgaaaaataaataggtaaagaattgattaatcaaaataaaattgaattgaataaaataagactgttgataagagcatgcattaaggtagaatcaatccaaggctttggaatgatggatctacataggtcgacggctatcatgtacaaaaagggtatcgtttggtgaaaatcaataagacggcgtttaataaccacgtttgaccaatcacagagctggtatatagcaagcattgtctggccgatgatacatccagtgcgagatgaagctgcacgagcaagcagtattatggccaggagtgccgtgaggtgacgacaagagtagttgataggggaatatggcagtagaggcttctgaaggattagaccagatgtagagtagatcgagtgtcggtaaagagaagtattggaaaatagagcacttcctgacgtcgcagcggatcgcacctatcagagacgacaacggatttcttagaagagcagtagatgctgccaagtaacttgtgaaaaactaccgccggctacttttgccaaactgttcagataatttaatcttgttgaaagagaagaaattatactctcttatccgagaccaacttttccgggtatcgtagcccatgcatgcacacccaaccgaaaacctcaaacgccagacaggagaaggtctaaacctcatcttggtgcaaagaaaaggagaagatttatagtacagtaatccacaaccaccaacacaactgatacccagatagtcagtccagcaaagagcagaaaagcaaagaaactccgaaaaacaccatcacccataagatgcgagatttaacagtatgcatttgctcttctctctcgagtcagggcggcgacctccttgcgtagccgctcattcatttcctgcagctcctgcatgtacgtgattgcattgctcagaatctcggactttttcagcgacgccgaggacttgacgccattgctacttgaatttgtcgacgagacggccttcgacacaccggacgtcttgacagacatggccttttccagagcaacgaacttggcgttcatgtttgtgcggtagcgcttctcgatgatgttgtgagcggcgcgcttagcggcgttgcggccacgggcggtgttctcatcaccgtttgtcgcgtttgcggctcgggactgcggccggtcgttgttgtttgtcgaggtggtggagagggctgctgtggtgagagtcgggaacaggagaaggtcctcgaaaggctctgaatgagtgctcgatgcgcctctgacttgtcggggcacaggacggggatctgcagtgaatacgaggtagggttacagccatcgcatccttagcgggccgtttatgactctgtaagatttaaagccgggggccaggtcggaccagatcgtttccgatgtggttaggatgaagttgacccagagtctaggtagggccattgaaccttggaataagtattgagctgacttggcaagggaatgtgacgaagccactgtctgatgagactgcgattgctcttcaaaagaactggacagatgaagctggtgagtcaccactctttattacgggacggtctactgacgtaacatagactggcacacaatccctgtcaagaagaccgtcctcgatatcgtcgcccagttatcgtccaaggtcttcctaggtgaccaaatctgccgcaaccccgagtggctccggatcacggtggcctatacggtggactcgtttctagccgcacaagcattgcgcatgtggccaaccttcatgcgacgcctcgtcgccccatttatccctggtgtccagaagatccgcgcggagctcgaggaggcccgtcgtatcattctccctgtattggaaaagcgcaaggcagaaaaacaaactgctattgcggctggcaagaccccagctcggtacaacgacgcgatggaatggatggaacagtgtgctaaggggcgtccgtatgatgcggcggtgtcgcagctttctctctcactgggcgctatccataccacatccgacatgctgacccaggttctctacgacatttgcggacacagcgatctggtcgatgagctcaggcaggaggttctcaccgtcattgcggcggaaggatggcagaagacgactctgtacaaactgaagttgatggatagcgttctcaaggaaagccaaagggtaaaacccatcgggatcggtacgtacgctcctcacacaggtacaacgtctgctaacgagtcagcaacgatgcaccgcttggctgaaaaaacagtcaagctttctgacggcactgttatccccaaaaacgccaacctgatcgtttcctcgcagcggatgtgggatgagagcatctacccctccccagacaaattcgacccttaccgcttccttagattgcgagagacgcctggtcatgagacttcggcccagttcgtctcaccgtcgccagatcatatgggc

SEQ ID NO: 4985 - DNA, 3475 bp, Emericella nidulans
tttaaggatgccaaaactaatggggtagatatctgaggcccaagaaattaagtataagaaaaagagaagggagggtgtcctgcaatttcaggcattataggcggaataggggaaaaagaaacccctgttttgctaaaaggccattacattgttatcgggaaggaatccaaagtttccctcagagcgattttgctaaaataaccaatgagaaaaagggcaaagcatacttttctttaagaacatttgcgctaagttaggtcaggcgaatcccaaaccccggaccgtcgaatgccagtaaatactgtttaagcacgataacaacattggtattggaagacgcggcctatcaggactccaaactcattcgacgaacttaggatgttccttcgaagacgcggtcataccttttaaggtaggttctcatttgaccggatgtgcaggatgcccaatgaatctggatctcaaccctaatcattattccatttgttgactactaacagagggctaacctcataacagcacaagagcgtatcagtggctacatgctgagccattcccaccgtaccaatgccgcagttgggaatgccagtggttgaggtgcacagattgatcagggccctacgtatcagtcgatttaccaaaagaagcgtatgctatctttaccagccaagcgaccctgcacaccatttaaaaacttaagcttgaggttgctagcttgtacgcgaatagcaagacgggacagaacacggccgttgcgaagcttgccgtccagtatgatatagagggttttcttcatgagtgtttaaagttatggtcaatactgggcacttagctgacggagtttcttcttcatggaggggaaagaatggctaatagttatcctagagtatgatctgaacaggctgtgtcccatggacttctggattcgtttgccaacccgcatttcgaagaggctagtgagcgcgagggatgtggtcaggatgcgcggaatatgatgtaaaagccattgtgcaaaagggaaataagaggtcctcttcgcattacgggcgcaagcagtggctttggagtatatattgtatttttttggggggggaaaaccctggctgtcttttggttggctagtaccaagaaataaattacttaaagcggtagagcacgtcacctgattaactttgctggcacccctccttaaagcagcaacatctggattaggcaggaagctacctatctagttaagccaccctcaagctaggcctttatcccctgaatatatttctccagtacgcagtaccactttgtttattagcatctcaaacctctctttgttcttgctgttacttaattttcaaccgctctcttacctcgagtaactcctttctagcctccacaattgcgtacctctgcccctcctcccaccatgcttcaggtacccgtgcgagaatataacagcgtggcctcgggtgtgagcacgaaggctataatcctggtaaggccatcttcagtttcccatcgttttcaccttttgagaaaactttgttctgtaactaatcaattgcttgcaggttggtggtccctccagaggaacccgcttcaggcccctgtctctcgatgtccctaaggtcggtttctgcacaaatcgaggctttccgtgtcgaactaatataactgacgacgtcaatgtctatcacagcccgttttcaagtcgcacgccacccgatatgcaccactgcctcaaggcccttgcgaaagttcccgagcttcatgaagttatacttattggctactacgatgagactgtcttccgcgacttcatcaaggactccgcgaaggagtttcctcagttccgaatttcatatcttcgagaatacacagcgctaggaactgctggcggtctataccatttccgcgaccctatcctcaagggcaagccggagcgcatcttcgtgctgaatgcggatgtctgctgctcattcccgcttggcgagatgctaagactgtttgaggagaaggatgctgaggctgtcattttgggaacacgagtccacaacgacgcagctacgaattttggctgtatcgtgtcggactcacacactaagcgagttcttcactacgtcgagaagccggaatcacatatctctaacctcatcaactgcggagtatatctattcgcgacagaatgcatcttcccctccattcgtagcacgatcaaacgacgaacaactcgccctcgcctgctctcctatccttcttctgacaacctggaagcgtcatttgtcgccgacgatgattcagaacgaaccgaggtcctgcgtctcgagcaggatatcctctccgacctcgctgacagcaaccgtttctttgttcacgagacgaaagatttctggcgtcagatcaagaccgctggatccaccgttccggccaatgctctctacctccagaaagcattccaggcacagtctgaggagctcgctgctccttccgctaccatcgttcctcccgtctacatccatcccaccgcaagtgtagatccaacggcaaagctcggtcctaacgtatcaattgggcctcgcgctatcgtgggtgctggcgcgcgtgtcaaggactcaattgttctggaagatgcggaaattaagcacgatgcatgcgtcatgcattcgataattggctggagcagccgagtcggcgcctgggctcgtgtggaggggacaccaatccccatgggaagtcactccactagcatcattaagaatggtggcaaggggcagagcattacgatccttgaaaggagtgcagcgtgggtgaccaaataccggtgcagaaactgtgtctggttgccgattaagagctcaaccggggtagttatttctgacgcattatacgttggtatagctggcattaaagttggatggtggcacgaggtcatcatgtaaggcatttagcgtattcactttcgattatattatattaaattaatactaccgatcttctgatgaaccgatagcattacccaatacacagtatctgatacgtcgctccaggtcttgtaagaaacttgatgaaatggcacgtaaactcaaccagcacactaacaagcaaggctgatacttccttgcgtagcctcgaaccaaacaagtctatgacatagatacgcagcaaaacaaaacgccagtgccgacgggcaaagctgaaacccacagcaaaaacagtatcataacacttccgtaaagttctctcaatcatgggtggccagcttgactcctcacctataggctgtggggtcatagctcgtctgctgtccatacccgtacgggttatcataggcactcatcctcatcccggagtgcgggtgctggggtccgtccgaatacctctccaacaccggattactagcatacggaggtggctgatgcaacggtctactctccccaatatccatttcttccgagcggcccctcaaatggcccgaggcatcgta

SEQ ID NO: 4986 - DNA, 5047 bp, Emericella nidulans
tatttctccaactagaatattcggtaagtttcctctgatcatctactacctcgcggtagactactgcacggcgttgagatctatttatgtacatgctagggcttttctgagcccaccagcagaaggaactataaacgtttaaccgagccgttaccgcatggtgccgaactgtgtgcattggcgattcccaagcagaattcattacatggaatagccctgaactgtgtataatcgagctcgcaggctaaaatacatcattttgcatgtatgattaggtaaaaagcctataatttggggaaatggggatgattttccgggtgtgatccccttttgttgtccggccagtgaggggatttcgcgggcgtttccgccgatctctaatgagattatgtggaaagcaagacaaaacaaagtttgatgctggctgcttgaattcttccgggcagtgtcgtatcccttggaactagacgaacaacgtcataggccctaaccccgcaattgcagggaaacccgagccctaacttctgcaccggacatactacaccgggctcccgggtatctattcaccgagacccggggtccctctatgcggggtacgcgaagatagttccaattcagcctgaacagtacacagtacacaggaaacctgtagatccctttccccgccgcatatagcggtctgcctgcaatacttccaccaaccaccatcatggagatcatccgtatcaccgagagctgcagggcaaacaagcttccagcccactttgctcttgtatttggaataaccgaggaatatggttcagtcctataagatctgcgcgtatcctatcgaaactcgttctcaatccgctcactcagttagattcccgtcaaaaatgaagtccactcttggctccctagtgcttgcgctggtcaccgcagcgtccagtgcaccgacaacgctgcaccaccaaggcctccttcgcaggttctcctcgcttgtcgtcttcggcgatagctacaccgacaacggggtctactcctacatcccgcctgtcgcgccgcagtccaacgagactagcaccggcggccgcgtctggcccagctatgtgcagcaatatagcggcgttaacctatacgactatgcggtctcgggggccgtctgtgactccgtgattgccaacaccgagcgcagcgggattaagcaggaccagatgtccagctttcttacggataacagctacagagataatcgcaccgggtctcgcgcgctgatcaatccctccgacgagaccgtctacgcaatttggatcggaaccaatgatctaggatacggcgggttcctgaccgaagtacagccggacgggatgccgctgacgtattttacggactgcgtgtatgagcagctcgaccggttacatgccgtcggcgcacgcgcgttcgtgctgatgaatatcgcgcccttggatctctgtccagagtatgcgcggcctgagaacggcggagacgagaccggacagttctggtcgaacaaggccgggtatgatacgaacgtcacccggtcaagtgagaagatgaggcagtacttcactatggtgaacgaggtctttgagtaccggacgccgtttgagctgcttttggcgaacaggtatccgggaagccggttcgcggtttacgacgtgcatgccttggttggttcacctcttcctttcttacctattccccaggatatggatggaagagcatagctaatattgagttcaaaactgcagatgactgatatctgggagaacccaggaaattacctcaacgggactgtgccatataatgtcacgagctcggtctaccagtgcggcgatgcgtgttcggccagcgaggtccgcgacagctatatgtggtatgacgagctgcatccatcggagcagacggatcgcattgttgcgcgggagtttgtgaacgttgtccgaggggagaccaagtgggctaggttctggaggagctagaacgatcacatatagcttactcgtctaatatggctcgacgcaacatcttctatcttgccttagagcacgacggactgtaggtcagagaacggagtgggcaagacgcacggagttagggttgcagtatgatcagaagcccttacgatgtggacaggaaatgacccaagacatttccagagcacgcggatagagtgaaagatttaatgtataccaaattacaagagctatttttgccgacgaaacggataaatggaccgtactggcggcggatacgacatatatctttgcgtatcaacgatcgctgccccagagagacggccgtgctactggcatcaacagcttcaacaccaaaagctcttacaatctttatagcacatgtctatgtaccaaagaagcataggtgcttgctgatataaaaactcatatactgcagacagcggagcgattcatgagctcggctcgagtggggctgaatataattttgactccatcgaccgaattccacactggtgggtaccatgaacgagattggtctcccctcctttaatccacctccctgtctctgtaagcacttcttcatctctcccacttgagaagccatggtaagcaacacgatgactcctccaacaaccctccccacagctctccacccgcgggccgcccatatcacacaatccgtccacgaatacctggaaggaacataccccttttcgtctccagaaacgaagtatgctttttatgaaatggacttcccccgttttatggccctcttagcacccagtggccggatagagcggctcgagagcgcggcgctctttgtctctctgacggcgattttagacggtactgtgccatctatcccttattgcaacttgctgtacggatattaacacggggtaaacagatgcattcagccaaatgtccatctccgagtctaggcagatcggagccaagctactggatatcatgcggggcgttgcgctggctgacgtcctgaaccccctagaaaagatccttggcaaggttgttgaggatatgaacgcgcaaagccctgaacttgccaaggatgtgcttgatggtgccgttgctttatttcttgcgcagacggacaaagcacggttggaaattacgcaattggatgagtattttgagtttcagtttagggatgtgggtggtgagtatgtatctaacagtctgatgtgtggcattggggctaaaaggctgactgaattatggcggaagattcttcatagcgctaatccgcttcgtgaatgatattgttctctcacagtctgagcgggccaagttcaacagcctcgagaaaacgacgatccgacttttgatcattgcaaatgatatcctctcctgggaaaaagaactcaaagaagcgaccgagagcaacgaggaaggcgccgctttgtgttcagttgtcccgatcctggccagaaatctgggcatagcgatgcgcgctgctaggactgttggatgagctggagtaccatcatggatggccggtagcaagctatcggaaccagttagaagtatcatggggagtagccgtagacagggcctaatatgatcgcatagcagtggagacgacgagatagaactagggacgttatagaaaacgcagggtatttaggcgtttataccaagaaattcagcgcagtttcagacccacatatagtataaaatttccacttatatatttaaaaaaggccagccgaatataaacgatatagaacaactcctatgtatctatctctagagatatcgccacataacccgcctatgcttcaaagccataaccccagacggcctatgatcctggcactctccaccctccttcctgcctcatcaaacttgatctgtctcccagtaacgagtgcctcctgcaaccaagcaccaatctgcaccgccttgaccgcgttgctcagcttcatgggaagaggcgtatcgtccagacaagcggccacaaattcattcgtttctttcacaaatgcctgctcgaagcggccccagtaggtcgcagggacttcacgtgtaatcccaccagcatggtagtaattgaccaagtcattggccgggttcaagttcacggagagtttcccttccgtcccaataatctccgtcacgtcttcctgtccgtgcgccatcatccttgaacagtagaagtacgcgatttttccgccgtaaaactcgacgacgccgacggcgttgtcgaagtcattgtatttcttcagatcaggcgtcaccgccgtgattccgtacgcggagatggacttggggataatatcagacccgaagaaccaaagtgtcaggtcgatgtcgtgcacggccatgtcgacaaagacgccgccagaccaagaggcgtactcgacataaaacccggatgggtcgtgcttgtcgcacgtctgggagcgcaggatagacgggcgtccaatgaggccgttttcaacctttctgtaggcggctcggtaggacttgtcgaagcgccgagagaatccgcacatcaccttgaggtgtggccgtttttttgctgttgcaacgaccttattacactacatatgccagttagcatctcatctagagaggaggccacttgatacgtacaatatcaacattgatactcaacgggttcttgcaagggacaggaaatcccttttcattagcttgattggccttcttgcatggactgacgtcgcaagtccgatcacaacagtctggaaacccgatgactgataatgtcttggaggttggggaacaatgtaaccccttacggttaggatgcttgttgcccatggccctcttagattaggggaaaaccattacttagttaatctcccggctccgttgagaaatttaaggcttggttttcccatgttccagtcactggcccattgaattttgggggcatcttataaaaaattaaggcttaatcttttttgattaaaaaaggacggccaaagggtttatttgatccggcaggttttttccttagtactacatccctgtgatcttgtgaaattattgattttttataaaaaggtattaaataatgtttt

SEQ ID NO: 4987 - DNA, 2499 bp, Emericella nidulans
  unsure (1)..(2499): unsure at all n locations
tttctatactatctcccctcctagcatcaagcaagggttctagtatatttactatattctatatagtttaataactatactaaaagactttattactttagaattctataaagagggcctctaaggtacttattaagaatactaataactatatagagtagttataaaaaggctttgaagttactttatataacaaggaatttcttgcttataaaaactaacttctatgcttagaaagtacaaagaagaggcttaaaaggtaataatctaggtactagataatacctaataaagatatcttagtacaagaagcaagagatttaatattatagagaaataggtatctaaatattaaagatcttcctcctgacagatctactctagagtcttcttctatactaagataatatctactaatatattctaattataatacttcaggttataaaagaacttaatatcctgtacctagttatctttaaattatttcctaatttaacaatttgcgttgttggtgatagcttcaagtttgtcaagcatcagtcattttgggtgggtggacagatgactgtgggtggatggctgacttgataattatattattatattttattaataagcagtttaagttactaagtatatttataattagttaattaccttaatatagtatattaagaccttgttaagctttcttaaagtaatttttatctagaaagtaaagatctagatattttataaaattttctagtatattattaataacttagtctttaattatataggtagttatctaagataatattatagataatatagtaccttctaattataaaaagatatattatatcttagtataatcattactaatagccttagtattaatattaatcttggctattaagaatatttaaaagatattattgattttcttactttatttattatattaggctatatcaggtagactggtcttagacttttaaaatagggatttagtagataataaaagtatagagataaataatatttaatagttcttgcaggagtatatctaaagtctaagtaattacttactctaattactagtataatagctttatctcttcttaatattatttatattactgttatagttattctatttattattagtttaatatctttacttattattatagttgctattagatttattattatatagcttatatagcagtttaaaaggcattagggtttattttatttatttatcttatatttctagtaagttccttctgctaatttgtttattttattatatttaaaaactatagggtctgcttatatagcaagcaaattcttatattacaagctagaattattaatactaatagagtagtattagactagaggaatttgctagaaaattaaaatataataactatcaagctttctatgagtattatagactaatattagtaccaaccttgatttgttattctagaagttagtaataattatatgagaactggcctgtacagggcttatcccagaccagagattcaatcagcagttggttcctagtagaccagctcgtcgcaattcaggcaatgctcaaatcaagacttcgggcgtagcttgtcacactactagaaagtaaagattatataaatattataattactacagactaattaaccaaagatatgatactagaaggaatattaaaaattaactttaaaggtatagcctgggtacttgtataagtatttataagtaaatataggatcttaaaggctattaccttagacaggggatgctagtttataagtaatatataggcctgtatatataccctaacagggattaactaccagctatttatagcctattattcttagactaatatgattaattaaaagagtaagcagtataggagaaatctacctctatatatagtacctgctgataactagatagggactagaatacaatgtatttctactttatagcagctcgtagaattaataagctagtactattacatacatataccaggggatataggctgatatttttatctaaagctataacatagtaatcttagccctatttattcctactaaagaggtagagtaactagctgaagaactaattaagagccctatctagaaagaggaagctattatatagaaagttaaggaagccctagactgggcttaagcctctatagcctattcctaataaaatataaagaatcaggctaataagtgtcacgggccgacgccggagccagctggcgacgacctggccctgtgacacgtgacccctatccctcaattcccacgtaacgcggacgggcgccttaccggtgcctatccgccagtaggaatatgagggatcgtcagatacgcaccacaccagccccggattttgggggagtgtccgcgcccnctccggtcccccatggattggtaagcccggtgacctttggtttacctatccccagactattcg

SEQ ID NO: 4988 - DNA, 1301 bp, Emericella nidulans
aagcgtgatgatatctcatttatatctttgtctgattacccgatgagcagaattatcgccgcagaatttccttatctacgtcagttatgctatgtttttctgactacttcatccctcagtcacctagttttatcactgagatatctagatatttctcggtgtcagctggttggggtagagacaggtctaggacagttgaatgtagcccactatgacaggggtatcaatggacaatgggaatattattgcagcttcaaattcaattcagtggctgctcaccacgaactgcaacacttaaagatcgtccatcaacgtccttaattcagctccctcgtcaccgccttgatcccgaacgtcaaacgagagctccccaaccaaggacttcacattgctatgcatcgttagcattgccacagagtcaaaacagtctaatattggggtcatattggatgccatacccaagcaacttccccagtcccgctcccacaacagaccttagcacctccaacgaggcaaacgctgagaacgcgggatcatgaatgtgccgaatactcatcaagtccttgtctgtctgacgcacggcacgcgcaagcgggaatgaggcccctgtagacagatacgggggtaacggctgggcgttcaaaaccgctgatccgaggtggcagaggagagaggttgtggcgtgggatttgaagtctgtagattgtagcgcaatagaggctaggcgagaggaccatttttttgtgaatttatcttccatcctggtattccctcgcgttgagagcaaagatggatcttgaaaagattgggctgtctgggccatcagggccatgctgatgaacattcgctggatctcacggatgatggcatcgtatgtcgatttcgggaacttacctccgatacgcggctcgaaggtgctaaaatgactgagtgtccgtagtttcgtcagaagtatcatcccctccttgaagactcgctgtctagttttctgcagatcctgtgtaatcgcggagttcgtagactgtacagagccttcacccaggtcgcctttcatccacagctagatggtcgcgtgcaggcagctgtagaaccgcgcgagaagatatagcccttccagaagggatttgcgcagtgtgctctctgacgctacagggcaggggaggacaacgcagataaaggagatcgtgcagcctgctgcaacagctagatgctaggcaggagcgaacaggtccacagaataggtgggatagcgcatgacaggagccgacatctgtagccagcctgcgcgtctgcaccgcgga

SEQ ID NO: 4989 - DNA, 13173 bp, Emericella nidulans
ggtcacgtctttgccggcttcgtcgttggatgagctatttttttacatgcatctcgtcagtttgcacatatgcatgcattcctcacaccccgtgagtgattacaagcacatttccggatgcactacttacgtcgctagccttgaagttgaaccgagtagtataaaactcgtaggcgcgtgcaaaatccgtcacgcacatgccaaaatgcccgagtttgtggacgggagcggggcctgatcgcaggttagtttgtatacagtaattgatgccaggtgatgccagggaggacatacccggtttgaacctctgactgctatttcctggccgatgcttttctgtaggcttcaacaagtcagtcccacctcgttcgacacgacgtagtgatgaaaaacggaagataagagaggtaggagatcgaggacacgtacaaaattatactgcaacactggcaagccgtcttccccctgtttctccccctcctcttctcgccctcgctggccccagaccagatgaaacggaaatccatcgaccgggtcgtggaatgtgagagacagtccgcctccaggaacaccttctgcctccaaatcaacaatccccgccggcccaggaagtgtctcagccgcatagtcaaagtcttctcgtgattcgaccacaaacgcggcaccgccaaaggcgtcctcgggcccttcgcgcgcgcagtagacaaagggctgctgggtggttgtgccgcggtagtagattgttctctggccggtgctcggcgaaacagtctgggtcagctcctggaagccgaaatctatgagaaaccgggacgctgctgcgaggtccacgtgggtgtagcagacgtgcgcgaggcgaacgagacggattggcttggttgctggcgtcattttgttgtgtggactggtctggcctgtcttattatctgatattgttcatgggttacttagctagctgccggtgccactgcaatgaaatgcgttggcttttaaagtcatccaaaatatcaaggaaatgcggacttccttatctgttgtcttccgcttattcgttccccaggccgtttagggatgcctacagctcggacgatccagtcggggggtcttcggtcagattaatgcagatcgtccgagtgggcccattcatgcgattgcggagtagagaagagaagccgagctagatgagagagcctcgggctaagacgatttgtggataaagacgtgcgttgctccaaagtcccttgcgcagcttttcgactgactgtattctcaaacagtcaaagacctgcatatgcagcccacgatggccccctcatttcttacaaattcgggtgcatctgaagccctcacaaatgccaataccatgtcgggtgccagtgtagatgaaattgtcgagacggaattcctgattgccggtgcaggtccagcaggagctgctttggcctgttttctcacttcatacggtagacggacctcatctttttttttttattgattcttacaatatcttgaaatcaagcactaactatagaataggactcaaaggcatcatggtcagtgcggcgcctggcacggccaacacgccgcgagcacacatcaccaacatggctgctcttggtatgttgcgctctgttgcgctctgttgcgtcctgttctgcttgtctgttcgctctgatacccgcgcgaatgctaacctactgagtttagagtgtcttcgtgatataggccttgaccgtgagatgctgaaggtcgcttgcgatggagaacaacatatggtccacacgcgatggtgtcacagcatggcgggcgaagagtacgcgcggatctactcgtggggaaacgacccgagaagaaaggtaagtttggtatctgatttcccatgtgcattcacaagagaagaaaagtaacatggaccagggagactatgaaagagccagtccatgctcccccgtcgatctgccccagacgctgctggagccaatcctcgtccgtcacgcaacatggcacggattcaccaccagattcgacaccacgctgctgtcctttgtgcgcgacgagaaacagcgcatcactgcaacagtccgcgacaatctctcgcgcagagagtaccagattcggacgagatacctgtttggtgctgacggagcgcgaagtcagattgtgaagcaactggacctaccgctggccgtcaaaccaggccagggacttgcgatcaacgtgctagtaagagcagatctctcccacctagtcgctcaccgaaaggggaatctgcactgggtcatgcagccggatcgcgaccatcccagcttcggctggatggccatcatccgcatggtcaagccatgggacgagtggatgttcatcctcttcccgacccgagactatgatcctgcgagtgcgaacccgtccaaggaggagtacctgcagcgagttaggcagctgatcggggacgagacaccggccgagatcctgaacatctcgaagtggtatatcaacgagattgtggcggagacatactcggacggcaacaacgtcttttgcctgggcgacgcagtgcatcggcatccgccgttgaacggccttggatccaacacttgtatccaagatgccttcaatctcgcctggaaggttgcatacgtccaccgcggcattgcaggagcccaattgctgtcgacatactccgccgagcggcagcccgtcggccacgggatcgtgacgcgcgccaaccaggcgttcagggaccatcagcagatctgggcggcgctcggaatgctcggcgcatcgctcgaggagcgacagcgtgcgcttcaagagctggccgagcccacgatcgctgggcgcgagcggcgtcaaaccctccagaaggctgttgcgcatactgcacacgagtttcacggcttaggcgtcgagatgaaccagcgatacgagggtccaggaatctacgacgcagacgaggccgatccctttgcactccctggccgggcggccgaggatcccgtcttgtactatgagccgaatacctatcccggctgccggctgccgcatgtgtggctgaaccgggccatcccagggcagccagtgtccacaatcgacctcgcagggcacggcgctttcacactattcaccggtattggaggtgagccgtggaaacaggcggcggagagcttaggtggcaagcttggagtcaccgtgcatgcgcattcaatagggttccggcaagactgggaggacgtgtactttgaatgggagcgccttcgcggggtggaagaaagcggtgcggtactggtccgtccggatcgatatgtggcctggagggcagacagtgtgttgaaggatgttgctgcctgcgaggagaagttgtcagtggtgctgaaagcgatcctgtgtgttgattgactggtgaaacactcgccggaatgtttgttacatagactcttagtagataccaccagcatacaccctgtcaatcaaggcaagccctgcatatccagacgcgtagtggcccactcagcctgaggtcccagttcccataaccgggtaaagtctacagacggcatgttggtcccaaagaggaacatcggatcgacaagtgtggccgacgagaggaactggctaggcaacggctggcaatccatcgactgtagcaccatagaatcgagcatcgatccctcgttcaccataccgccgccgggccccgtctcggactgccagtcagacaggggcgcgacaatatgactctgagccaggctgggaaacgccggcgctgggcctgtactgtctggccggcgagcaggagcagatgttgtgctctccgcttgcttgcatgcctccaactgttcctcgagtgtctctaggctctgctgaacggccggatgcatgtcccagaaccggacacatttcttgtacgtcaagtggaggacctcatatcgcgacttcacaaccaacttgagcgttcccgggcgacagagctggctgcgcatcagttgcacagcagacgccagccagatcgtgctcgagaggaagggcatggtgtactgaatgtggtcggcgctgctgcgttggatgatggccaggacattgtccgccgcgttgaaatattccctgacggccgcatgctcgccttccctcataccgctgctactatcatgatggtcatgatgatcatgacttggtagcgagacccggacccggcccttaaagacatcataacggtagaccatcagcctggccaggtgggtcatcatgtggatattgtagacggcgctgttcacccgtctcgtgccgcgcgcgtcgaacgtcagatcctggttcttgtatctgagatgatcgggcagcgccagttgaaagcaccggatcgcgttggcgatgatctccagctggtggcgggcttcgtcgacctggtccgactgcgatcgactggggatccctctcgggctcgagatgcgctgcgcctctttcatcagcgagttgatgacgatgaaccaggccttgggcgactggtttccgcaactctcgagcaccttccaccggcgaataggatccggttcgaagaagcagctctcctgtggctggcactgaaaccagtattcgtcgtcaacaggcagcaggatctcaatctgcgaccagtctattgcagtgggcgtgcgtcggatggtggtggcaaagacatccatttcccagattgcccaccaagcacgacgctgctcctcgtcactacaccatttagaaacaactaggccagcgacagcgtgcctagggccctgaacatccaccaaatgcaggttcatctcatacgctagccgaacgcacgagccgagagtgcgccacgcccggccgagaacaccttgggttaactggcagtgggcagcgaggacacatgcctggagcaagcacagtggcggcgtctcgtcgccgcattcgtccagggcctcgtcgatctgctgcagggccacattcaggaaccgggcggcttgcctattgacgtcctcctcttctggacgaaaccgcacggcgaaggcgaacatggcggccagtagggctgccatttgggctgcagacgtaattcgtgccagcttctccgggaagctgggctggtgaaacagacttatggtcgtcatcttgtcaaagtagatcatcgtgctggaagaagtgtcaatcagatgcctgttcttcgtcttcttttgtcttcgtagtcatcctcgggtagtgtactcacagttgctcggcctcttccagggcgacacccaaaacggcgtgcgctcgctgcatggccagctgcgtcgtttggacactgcctggacagtgtcttgctggcccggaggcctctttatttgggggggaggatacatgggatggatgcaggataaacgacagatccagggctttggcctcagccgcagtcgagccattccgtacgctcgcccctaccagcactgtgctggcgccctggccgtcggggacgcagctttcgctatggatgtccgatgcatactctccttcttccaaccatgcgacagcggcaccggcgggaggctcatgttcattgtcaaccgtggcacgggcccgtttcctcgtccgcagagagccgattttgggtccgggcttcagggggccagcaggatatgtgcaagtattatcggtctgttcacagacaaggcagtgaggataggtgcggtcgctgggtctgttagttcttgtccaaaggaggagtccatcactatggtctgcagtctgcagtctgccacggacgcaccatttgactttccgcttgcggcacgcatgacaggagatatctgaacgttggtcgcctgaagaagagggcattttacggatggaaaccaatgaggagaataggataatctatcagggcatttggtggaaagtttggggaaggggtaagagacggagtgtgagcttgcgtccacaagcccaggtcgtcagggaccagagttagggcaccccacacaccctttctcgttcgcggggtaaaagaatgtggattacgctggttataaaagtggaccactagtaggaggtggtggcggagaatgggaagtagtaagtgggaattcgtccgaaatcgcaccgaaatctcttacaaatcccccgacggaccagttatcgctttggtgatcatttcatatttcagagtatattctgtactggaccaagctatgcagattattcatagtaaatccggttacagagcgtgccgatcccctggatttgaacacgcatatcgtcgccatctctcagcacgacctttggatcacgcattgccccaatccctggccctgtccccgtcatgatcaccgtgcctcgctccagggtggtgccctgcgataggaacgcgatgattttagggatgtcgaatatcatctcttctgctctgccatcagccacgggctcttcccattgaatgatggaccacgcaaaaataaaaaagaaaataaaagtaaaaataaaaataacagaataaaactggtcttacctcgtgttggagtcctgcaccactaatccattgtgaatagccttgatatcgagctggtgcgggtcgacttctgagggagccaccaagacaggtcctagcggacacgagccatcaagccctaacattcaaagtcaggctcaagcgggacaacaaaagacgagctgggagtgccagtctgctccgcttaccttttgaaaagctccactggctattcttaaactgctgcgtgcgagcgctcacgtcgttgctgcacgtgtagcccagcacgtagtccatggcgtcgcactcaggaatgtcgcggcccgttctggacatgatcacggataattcggcctcgtagtcgctggagccatcctgggcgatcttaggtacattgatcatggctgggtgtggaccattcagcgcagtccggggtttgatgaacagcaccggcacgtcgggaataggcatgttggcttctttcgcgtggtcccggtagttgagacccatgcatcgaatgagaggcacgtcatccatatcgatcggggcgaggagctataagacgtcattattgatttggcaaggagacatgaaggagcctaagagacggggggcaccaactcgcgcaacgtgcaaggtcttttcagtaacgattccgtcaaagatagatcctgtaaccattcgtgcaacaactcgctctccatttaccacagacaggccaacgtctggatattgggccgcatctacttcaccaagatgcgtctgtccatcctcttcggcaatgaagcggatcaatcgggtccaggtcgaggtcggggccattttgtgttgtgtaaatttttgttagagtcaagtaatatgtcctcttctttgttatggataatcttttgttgcagcagattcgtgtgcctccttatatgatcaccatcggcagttgttgacctcaagcagcgagtcggaccatcttcggtgcaattgctggacttcattcgcggagcaattccagcccacagtccgccccaggccgcgccgcgcatcctcaaaaagctcgcaattaccaagaacgggccagttgccggccatcttcccactgattagtagtatggtgggtgatcacatgtcggctttggaggtggtagctggcgtcgatttgatcatgttattgatatctgtaatgagcgactgcattgaaggtcttgatcttctaactatgatctgtatagctaatttatacacttccaaaggcttcaaaagaatgttctcgatatcggtaaataattaagttaatatatggttaattgcgatccgtctatggcggtgtgattgcatcatatgattggacgagcgaggtgctggatattgattagtaagaagaggtctcctctggtcgataacttctaccaagaataggggggtatttatacacaagctgttgaaatcttgctaatcaagtcgtatttctctagctatataacccctctgtacgcaactttatacagaggttatttgttttccaacttgctcttgctgtagtcatctatttaatcttgttcttcctggactatagccacctgcctagggcgcctggtaggttttatagggcactcttatacaaagtagtcaggattactatagtataggtatctgcccttagacaacctcttttacttctcctctgcaggtgcctgactagcttttcttagggtcctggtcccttttatatggagggccgcaacttccttttatagggctgcaatttgagcatgggtagcttcccagtctatctgatcaggggttctggtctggtcagagcctcctgctggtcttatacaagtaacatgcataggaacagcagtacaagatcctttttatataagcctggctactctctggaggttgtggttgattttgcacagttgattatagtagttgttgtacaaatcctcctgcctaataccaaccatggcttttagcaactcaacattaattgccctgtccaacaaggcctttttctagttatcatcccaattaatccctccagcattaagaagttctttgtcaaatttattcaagaactcttcaaagtcatatttcctttactttattatatttacttgtacaagagcctttctctgttagtcagggttaccaaaggccttgtctagtactacagagaattctgcccatagcacaggagtcttagatttctggcgagccaagagctatggtagtatatgctggctggcttttcctctcaggcggctataggcatagtaaacttgttcctcctctatagggtagcaggcagcgttgattgcaaactttatataaaggtttatctggaaaggagggtagtccttagggtcttctccagtaaagggtttgatatccaggtaacaaggacagggatagctttgtttatagggggtaggcgttgcagatataactgtagtggtaactggtagatagtttctcagttgcgagttctgtatggcctgtagttccgcctgtaagctgttattctcttcttggagctgttgtttctaagtctgtatctctgtacagagctcctggagctgctgtagcaacaatacaatgctttcttcttctattgtcatagtaaaaggtctcctcatactattattgagattggtgagcgattcctaatgttaagggacatatttagatggatcttcctatctagacatgccgtacgtacaagaaggaatcgctaaagaagaaatgagaaagaaggattgttgttgcaaggaagtcttgtaggtggctcaccgccttcaggacagcgcaggccttggccgagtcactaaggtctaaggtccttgtataggcaaaggacccataacactggggaatgcaggttcagagtccaaggttaagaatagggtcgtgccaatctccacctcggccccaacaacgacaacctcggcggtccactttacttaccccatggagctagttgcctttcgttcctcctcataccatatgatagtgcaatgaacatggcttccctgtcaatattgacgagatctttggcctggacctaagagatgatgacatgacagccaggctgggtccgtggtagttcgttcatttagttttagtggctttagtgaggtagttgagagaaaaagattgatatacgccgtacatacatagatatcgatctaccgagtaattataaagccatgtctaccatggcagcgcttgcccaagactaaacaccttaatcagcaacagagcaaaaactaacttgaagaaagtcacagccttattcttcatcgtgattttcatcgtcgactgctgcttcgtcgccgctgtttgcttgatctgcatcctgagccaagcgatcctttccagaccagcctctaatggtaggcgccgagtacaagtcacggtcagactttgactatatgctttgcattccccatgcccgtcaaggttcgcaccaaaagcggattgttgggtgaagtcattttctttctagtgttggtgaccgctagaccgattttgctggtatcaaaaaagaggaactaagaactcctggctgagcgccttgcttagacttgatgtcctcgtccagctgctgctcattttcgtagcatgtctggacactcctctccccggttctgatatttatgaagctcgccaagccatgatgatttcccccgcgcgacagggatacctggaaaccctggtggtgctctgcgtttcggttcattccctttgcagtaccatctgcgccatgtcatgggaggccagaagaacaagtcccgtagtccatacgggagcatccgcttcactacacgagtgccgtagttcagggtccgctgctgcttgcttttgtgggagctagaagtaccccgaccgcttggttcttctgcagtggtaggctgtgcggttggaggtaggagggagtatgtggcattgataactcaccatcagccatcaatatcggaatgagtttctgagaggataatcatgctttgaaaggctgatatgagagccgatcatggcctcatgaaagagaagagagagagggggggagagagagagaacacaaatgtacatttaagggagcgtaattctgagcggctatcaggttacccaggtggtatgtatcccacccaaatggggaaggggtaaaccccacgtgacgcactttcatcgattcctttattgaagtcaagtcccatcactttccattcttctctattcagctcgtgcaggcgctggcagcatcagcttctttttgagcaccacgtcctgacacaaatacgtcaccaactctttaagcactctgattttgtcttgtccgctgctcgccttgtccagctcgctacctttgttgcgaaaaatgccccaaactgggacgatcttcttgtcctccttccaatcgagccaccggttgatgctgctaaacgctttgcgcatattggtatgttctcgcagagcttgcgcccaaactttgtattcatcgccagccccgcttgaatgtaggcactgacaacaatacatgataagagatgctagaccagcggcaagcgccgtcgagaccgatgagccattgtggtagacaacgggctttgctgattgcggcctctgctcctcggccacctggttgcctggcaggtagtacgtgatggagttctcgctacccgaacctgggtctcggttcgcaagaggccccgttgagccgatacagagaatctgcccggaggcttcactgtacgggagagtattatctcctacaagacggatatcgtcagctgcggagcagatcaagagtcgtttgttgttcttgacggcttctgcgattgctgttcggaggagctgaaggtcattctgctccgcgtgcttcttgttgccctctgcatcagacatgttctccgaaatcagagacaaccggtattctaagtcggttatggtccaagacatggagataatgtcggcaccgtgcattactgccgcgttgatggcgtccgcggcgctctttgcgttgatgctacgcgccctgtcaccatgtatgaacgatggcctgctctcgatcttgatcacgtcaaggcgtacccacggattaatccggctgatcatgttggccattacagttccatgcccctcagtggatttccaccaagcgtccccgtcgcaacaacttacaccggtatactgggttgtgttgttgtaggtgttgaaatcgtcgaggtcaatcccatcatcgatcaaggccacctttccaccattagccagattacaaacgataatatttttgtttcttctttggatcacttacccgaatccttgggggctgatttagcagtttggtatcatggagccccttcagtgcatctcgaaattttaccatcgcttcaatccatgcgtccgaacgtggcttttcaaactgctctccaagaagtgtatctcggtcgccatcgatcatcgtactgacaacggcacctcgtaacaacgttttggacgtaacttgcactttgccttttggtctctcgtcgatcgaagtacgaaacttacggatcatggattttctgcgcgccgtattctctaaacccttaacgatcctaagcctgctgtcccaggatatgtggattcgtcacgtacctgatatgcgtgaagggtaattttggacaacagtgatcttgggttcctgcacataagcgggatcccatcctcactgcttgcccagccgtgaaggacagcctggtttccactccaatgaagatgaatatgttccactaacggcgccgcatggttgatgacatccaaatttatgtctggcttgcgccaatccctgcgattgtcaaaatcagctcggacacaacaacaggagcattggttactccataccattctgctatttcgagcgactccctgcgttctccactggaataaggagtgtatcccctaatggcctgttcaatggccgtatctgtatgtgcccattcatcggcattatcctcaacctcaagccgtaggattctgcgaacattcacatcaaccagtttgttaaacaccttgactagagtgtctcgccctctgggttgtctgtcaagaggacctctgttgagttgtcttttctcatttgcgacattcggtctctggcctttcggcccattctgtgtttcggacgccagtttgggaatccttacgtatgagagggtgtcttcgaaccctccggccttggaaactttgtcaattaggcggacgacatcatcgacatttttgccacggaaatgactagcatcaaaaaagagattcctgtctgcgaacaaaaatgcgcgttaaaccttccgagtcacacaggccaacatccataatgcatgggctcacctgaagcaatctttccgtacaataggtcttttgcatctctgtcactagtgctctgaatgaagaagcatttcacgaatgccagaatatcagctgctgctttcctctgctcttttcccggccacgactcagtttctgcggcaacgccggatcttaaaccatccgacttcgcaggtttcgcttgttttgcgtccggcacagatctttgctgggcctcattttctgtgggatcaaggttagccgtgggccttcgagacagtgatccattattcggctctccgaggctcttttccttttccggaaagactgaaggagctgagagatgcaggggttcgcgcgccgtg

SEQ ID NO: 4990 - DNA, 3746 bp, Emericella nidulans
gggatgatatcattagggaacgaataatgggtctcattctcacagctgacaatgactttacgaaggacaggggcttacactacttcaggggcatccttaaccgacactcacctattacagtgggtgacgctggcaaacaccgaggcatgtgtagccggcattgtataagatgccttaacagaaactgacaaggacagaacgtatgcctatcatccgacctcttcgaatcctgtttgatacatctgatggatgttgaaaaccccctgctgcgacagtggtcgtgcctctgtatcagtatgctgtggtcagactttccggagccaagtggatgggaattcggtgttctgcgccgatgagactttgcgaactaaacttcgaccccgtcccagaagtcagggccgcaatgcttcatgccctgatgaccttcctcggtatccccgatctgaccgatcaggtggcacagattgaggaatctttagcccttgccgtcctaccgatggcttccgatggtagcgtgattgtcaggaaagagctccttgtgttcttttcaactttcgtgaagcgctatcagaacaaattccttgttgctgcttacgaggaacttcaggatgaaaagctgaaccttctcggtaaactaggcttagatagctctccgcctgcagagacgggtactgcaggcaagcctcagccactgtccaagaacacaacatttggcacaatctggaagcaacttctgattctctccgttgatccccatcctgacattgcgcaggatgcggggataattgtggattacatgcatcagttgttactcgaatctcctatggccgcgctaactggacgacttcgcaaggaaatattggacctctcaaatcaagttgaccaacagtcccaggttcgtgaaaagccgaatctgaagaaggctgcgccgccgccgcctcctcccaccgcgcccccgaagcaagaagggtacctctcattgagccttaggcggactgctagtgtagcagcatcgctaaaaaatctcgcatttggcggcccttcgcagggagaatcatcccaaggatcggaggcatcaacatcaccccaaagtcgtgcacctgccaccccacgagggcgagctcctccggaatggactcggccacccgaggtcaacgaccaacttgctcctgcaacaacataccaacaagcaccagttcccacttcgcgtgggtttgaacgcagagattcatcagttgccccaagcattccactagtgagtagatttttagattggtccacagaggtaagttgagaactccaccggatttgacgaaaaatccaataaacgttttctaacccatgcgcagtacttccgcgaaccgcaaatgaaacccaatgaacccgacgagcccggtagcgcggattacaatgaacgtctctggaggcgcagccgcaacgagaaaatcatttcggagacccagcccctgaaaggaaaagcaggcagcagccgctgggataactcgatagcgctgttatcgaacgccactcagcccctaaagatgtgctttcatcagttcgaggaccacattgccgtggccgatgatagagatacgattgcgtacgtactttgaaggcgcaatggcgcggtgcatgctgacataagagtaggatctgggattggcagaatcacaaacgcctcaaccgtttctccaacgggaacccattgggatccaagatcaacgaagttcgttacataaacgaggatgaccaagctcttctgatgacagggtcgtcggatggcgtgctcaaagtgttccgcaactatgaatcagccaaagacgtcgaaatcgtgaccgctttcagagcattaccggaactaatccctagtaaccggaacgccggccttgttctcgactggcagcagggtcaaggtaaagctctggtcgccggtgatgtcaaagtcatccgggtgtggaatgcggcaacagaagtctgcacgactgtaagtcccacttgccaaactacttcgctttttaacttaccgaactaggatattcccgcccgctccggctcctgcatcacgtctctaacttctgaccaagttgcgggcaacatcttcgtggccggctttggcgacggcgcagtccgcgttttcgaccagcgcctcaaacccacagcgtcaatggtcaaagtatggcgcgaacataaacagtggatcaccaacgtccatatgcagcgcgggggcctcagggaactcatctccggcagtcgaaacggcgaaatcagactttgggatctgcgcatggataatcccatctcaacgatttacggcacaagagataccctgcgcacactgagcgtccacgaacacgcgcctgttttcatggtgtatgtcctgcctctcctccctttaccattccgcttcgtctttgtgtgtagtgtcataaactaatagcaagcacagcggcacaaaccgccatgaagtaaagacttacaacgttgacggaacccacctttctaccttcgagccttactcaagcttcctccaccataaccgctcctcgcccatctccagtacagcctttcacccgcaccgcaccctcttcgcctgcgccgcgctcaacgataatcatatcaatctggtcagctgctaggattttcaacgcctacctattttaactgccgtttcttctttcatgtcttttgtctctttctcgtcctcttcctcgtcttgcttgacagcacggacattggcgcttgggtcttggtctgggtctggtttgggcacgcaggtactgcctctattattctctgctttaccttgtactttctgatagcatggccgtcagttcgtatgtttattttaatgacgcatcggttttcggcgttcggcaggatggatcttcgatctcgattttcacatttcagatacttgtctttttcagcactagcatcttagtattgttgcgctctccgcgattcttattctatatgtgcctgttgactgcttgtctgattgtatattgatggagccatggttataggacctactttacttagagtggataatagggtcgcggtaactgccgtcttcatctactttagaaatggaagattagatggattgaacctgactgaaactaaagaataggtatgtaagtattgtgcactaaactcgcgataaggtcctgcactcgtaaagcaaagcaacggactcgagtatctctgatttcgtaaggccatggagagaggtatattaacgcgacccttacataaacaatgaaaagttgtgcataaacttgatcggacggctgaacgccgtaatcaatatgctagaagaggcgcaagtgaatttagagctgcgaaacgtcatgctaagtgaattcgccatcatggattatctgctccatgagtctctcccaagggtcttcaaagtaactgcgctgtccgctgactggcagatcgcagaagcgcgacgcgacagaggcaaaatctgcaaaatatcccctctggtcatcgccggagttgtaagcgtgaagattagcgatgacgtcgcccagggccgagatagtttgcttggtaaggatgcgatcctgtctcaaataagtttgccctcctacacactcagtcgtatcaacaaagttttcaacagtgttagcgatatgttggcgtactgctcttctccacgaacgtcttggtgaaacagtaacctgcatcacgaagccttgctgttgtggacgctgaaattttgtcccaggcggtat

SEQ ID NO: 4991 - DNA, 6276 bp, Emericella nidulans
atcagatgtgccttgaacaaagccatcaaagatctggtggaggtaagtggttagagccaggcattctcgcttcctgggatggtgcactagcaaaggataacctacaggcaaatctacactgcaaaatgaaattctaggagacttgggcatagagttcggttccacgcctgaaaagccagaagacacccctctagatgagttaggtgcatctatgcaagccacattcagcgggcaactaggcaagcaatcttcctcgctgattgctcgtcttgtctcgtccaaaatgcctggaggtttcaatatcacggctgttcgcaaatatctggagacaaggtggggcttgggtcctggccgacaggatggcgtcttacttctcgcccttactatggaacccgcctcacgtatcggttctgagcccgacgccaaggtgttccttgatgatgttgcgaataaatacgctgccaactcaggcatcagcctcaatgtcccgacggcttctggagacggtggagcaagtgcaggaggaatgctcatggaccccgccgctattgacgctctgaccaaggatcaacgtgctttgttcaagcagcaactggagataatcgcccgttacttgaagatggatctccgagacggtcaaaaggcttttgttgcttcacaagaaacccagaaaaccctgcaggcgcacgtcgatttatggcaagcagaacacggtgacttttatgcctcgggaattgaaccttcctttgaccctctaaaggctcgtgtttacgactcctcttggaactgggctcgtcaagatgctctgagcatgtactacgacatcattttcggaagactcaaggtcgttgatcgtgaaattgtcagccagtgtatccgcatcatgatccgctcgaaccctcttcttcttgaattcatgcaataccacatcgacaactgcccaaccgaacgcggtgaaacctatcagcttgccaaggaacttggtgagcagcttattgagaactgtaaagaagttcttggtgtctctccggtgtacaaggatgttgccgtacctaccggtcctcagaccacgatcgatgctcgcggaaacatcgaataccaggaggttcctcgtgccagcgctcgcaagttagagcactacgtgaaacaaatggcggaaggcggccccatctccgaatatagcaaccgggctaaagttcagaacgatttgagaagcgtctacaaattgatccggagacaacaccgcttgtctaaatcctcccagttgcaattcaatgcactttataaggacgttgttcgggctctcagtatgaatgaaaaccagatcatgccgcaggagaacggcagtacgaagaagcctggccgcaacggctccgtacgcaacggaagccctcgcgccgggaaagtcgaaacgatacctttcctgcatcttaagaagaagaacgaacacggctgggattacagcaagaagctcactggtatttatctagatgtgctggagtctgctgcccggtccggcctcacattccagggtaagaacgttttgatgaccggtgctggagctggttccattggagcagaagttcttcaaggattgatcagtggcggtgctaaggttattgtaaccacgagtcggtattcccgcgaagtgactgagtactaccaggccatgtatgccagatacggtgcacgtggttcgcagcttgttgtggtgcctttcaaccaaggcagcaagcaagatgtggaggccttggtcgactacatctatgatacaaagaagggcctgggctgggatctggacttcattgttccatttgctgcaattccggaaaatggacgagaaattgattctatcgactcgaagtcagagctcgctcatcgcatcatgttgactaatcttctcagacttttgggtagtgtcaaggcgcagaagcaggccaatggtttcgagacacgaccagcccaagtcattctcccgctgtctccaaaccatggtaccttcggtaatgacggactttattcagaatccaagctcgctttggaaacactcttcaaccgctggtactccgagaactggagcaactacctcaccatttgcggtgcggttattggatggacgcgcggtacgggcttgatgagcggtaacaacatggtcgccgaagagttgagaaactgggcgttcggaccttctcgcagcaggagatggcattcaacttgctcggcctcatggctcctgcaattgtaaacctttgccaacttgatcctgtctgggcagacctgaacggcgggcttcaattcatccctgatctgaaagatcttatgactcggcttaggacggagataatggagacgagtgatgttcgcagagcggttatcaaggaaaccgccattgaaaacaaggttgtgaatggagaggacagtgaagtcctatacaagaaagtcatcgcagaacctcgcgcgaacatcaaattccagttcccgaacttgccgacttgggatgaggacatcaaacctctcaacgaaaaccttaaaggcatggtcaatttggacaaagtcgtcgttgtcacagggttttctgaagttggaccatggggtaactcccgtactcgctgggaaatggaggctagcggcaagttctctctggagggttgcgtggaaatggcttggattatgggtctcatcagacatcataatggacctatcaaaggcaaaacctattctggctgggttgattcgaagactggggagccagtggatgacaaggatgtcaaagccaagtacgaaaaatacattcttgagcattccggtattcgcctaatcgagcccgaactcttcaaaggatatgatcccaagaagaagcaactgcttcaggagattgtcattgaggaagatcttgagccatttgaagcctcaaaagagaccgctgaagagttcaagcgggagcacggagagaaagtagaaatatttgaggttctcgagtccggcgagtacaccgtccgcctgaagaagggtgccacccttctcatccccaaagcactccagttcgaccgtttggttgctggtcaggttcctaccggttgggatgcaaggagatacggtatcccggaggacattatcgagcaagttgatcctgtgaccctctttgtccttgtctgcactgctgaagccatgctctccgccggtgttacggatccttacgaattctacaagtatgtccatttgtctgaggttggtaactgcattggatctggtatcggaggtacacatgccctccgaggcatgtacaaggatcggtacctagacaagcctctgcagaaagacattctccaagaatccttcatcaatacgatgagtgcttgggtgaacatgttgcttttgtcttctacgggtcctattaaaacacctgttggtgcttgcgctaccgctgtggaatccgtcgacattgggtacgagacgatcgtggaaggcaaggcgagagtctgcttcgtcggtggttttgatgacttccaggaagagggctcctatgagttcgccaatatgaaagctaccagcaatgctgaagacgaattcgcccatggtcgcacccctcaggaaatgtccagacccactactaccactcgtgcaggctttatggaatctcaaggttgcggtatgcagctcatcatgagtgcccagctcgcccttgacatgggtgtacccatctacggaatcatcgccctcaccacgactgccactgacaagattggtcgttctgtgcctgcacccggtcaaggtgtcctgaccacggcacgcgaaaaccccggcaagttcccgtcgcccttgctggacatcaaataccgccgcagacaactcgaactgcgcaagaggcagattagagaatggcaggagtcggagcttttgtatcttcaggaggaggcagaggcaattaaagctcagaaccccgcggactttgttgtcgaagagtacttgcaagagcgagctcagcatatcaaccgcgaagccatccgacaagaaaaggatgcccaattcagccttggtaacaacttctggaaacaagactcgcgtattgctccccttcgtggcgcccttgccacatggggtctcactgtggacgatatcggtgttgcatcgttccacggtacttccactgttgcgaatgacaagaacgaatctgatgttatttgccaacaaatgaagcatctcggacgcaagaagggcaacgcacttcttggaattttccagaaataccttaccggccatccaaagggtgcagctggcgcttggatgttcaacgggtgtctgcaagtcctggacagcggcctggttccaggcaaccgtaacgccgacaatgtcgacaaggttatggagaagttcgattacatcgtttatcctagccgcagtatccagaccgacggtatcaaagctttctctgttacttcgtttggtttcggtcagaagggtgctcaggtcattggtattcatccgaaatacctgtatgccactctagatcgcgcacaattcgaagcatacagagccaaggtcgagactagacagaagaaggcataccgctacttccacaacggcctggtcaacaatagcatcttcgttgccaaaagcatagctcctatgaagcgaaacttcaaagcaaggtcttcatgaatcccgattaccgtgtggccgcagacaggaagctttcagagttagactatccacctaagccccctgttgctactgacgcaggatctgaaagtaccaaggctgtgattgagtccctggcgaaggctcacgccaccgagaactcgaaaatcggcgtcgatgttgagtctatcgatagcatcaatatctcaaatgagactttcattgagaggaattttacggccagcgaacaacaatactgccagaatgccccgtcgccgcagtcatcgtttgcgggaagatggagcgcaaaagaggctgtcttcaagtccttgggtgtctgcagtaaaggtgctggggctcccttgaaagacatcgaaatcgagaatgactctaacggggcgcctactgttaaggtaagatcactcaacatgtttcatgttcagttttacatttgagctaacgatttctagctccatggtgttgcggccgaagctgctaaagaagctggtgtgaagcatatcagtgtcagcatcagccacagtgacatgcaggctgtcgcagtggcaatctcacagttctaatgtgtttgatgagcagaataattgttcaggcttttgaccttgtatgcggcatatagatgttattgttggtatttaatgcatttgttgatgtcagttccaattcagcataaagtctcctgctctctagtgttgccagtcaggtcttctaacgggaatcgcgcgtaaccttgcctagcattgctctacaatccatgtcctgaagatcagtacctaggcaagagagagagtatagtcaaaccagggccaataacgcactttgtgagggtacgtgcagattcttggtcaaccatatacccaagactatatactcgcttttctgttaagaagctagataaccgtagagtaccacaaatattgcttggattttcgtcgttgttccctcctacatctatttcaccgagtctacgtctaagcggacagatacgacatttacgagtactaagagctctaataaattttttatatctcaaataggccacagccaatacctatacagatgttatttacggcttcccccagacgctcgacccaagggtccccagttcgctctcggattcacctgatacctaacaagccgctttcggcgccgtgattgccgcccaagagactcgtcgaagaccactttaagctacgaataatcctggggaggcacaggacggttatctagtccgtcatctgaagaatctttctcctgctgtagtcttttctgtgcatcagatgaggaagaatctgctgccccgtcatcttcgcccggcaccgatcgtgaccccgcgcggtacagtgcagcctcgactctagtgatatgatctgacaagtccttgccggtttgagcgagagcaacgagctccttcttcaaatttgcaaattgtggatcacccttgaccttctaccgactcctagccatgatcccagcagccgcagtcccgggtttaatcgacttctctttaatgagacccttttgtcttgcccattcgcgcatgatctctcacataacggtccatggagcatcggtgcgaaccgagtttggagtggggtgactgctaatcaatggatggcc

SEQ ID NO: 4992 - DNA, 4636 bp, Emericella nidulans
cctcttaatactaggcattgcattggtcttcgcgccagcagcgttgacagctaggagaaagtttggttttgagcttcctgattggttatctagaggcccaaagtcgaagacaattggggtcctgaactacaaactctagagggccattcagattggattgaaacagttaccttctcaccagacggccggctactggcatctggctctaatgatacaaccatcaagctctgggatcctgccagcggtggtctcaaacagacgttggagggccattcaagttcagtacagtcagtggccttctcaccgaatggccagctgctggcatctggctctagtgatacaaccatcaagctctggaattctgccagcgatagcctcaagcatactatggagggccattcagatagggttgaatcggtggccttttcaccaaatggccaggtcctggcatcatgctctgaaaataacgaccaagctctggaatcctgccattggcagtctcaagcacacgatagagggccattcagattgggctctgtctgtagctttttcaccagatggtcagctccttttatctgggtctgctgagaagaccatcaaactctgggattctgccacttgtggcctcaagcacactttagggggccattcaaattgggttctgccattggtcttctcaccagacggtcggctactggcatctggctctaatgatgcaaccatcaagctctgggatcctcccagcggtagcctcaagcataccctagagggccattcgaataaaatcgagtccttggcattctcaccaaatggccagctgctggcatctggctctagtgacgcaaccattaagctctgggatactgccactggtagcttcaggcacactctaaagggccattcagatatggttttatcagtggtcttctcaccagacagccagctcctggaatctggctctggtgataatactatcaagctctgggatcctgccactggcattctcaaacatagtatgagaactcctggcattgttaggagcattgaattctccatagagctgcctcagcttattaccaacctgggaacttttagtattcaagcctggcatacaggctacccatcaagatcttctggaaaaaagactgcagtctctgtacagcgaaatcgttgggttgctattcaaggccaaaaggaattatggatccctcccgaatatcaacctatctcttcagcagtccaagacagttctatagcgcttggctgcaaaaacggccaggtttgtattatatcattctctatatagcgaacttgactgcactcttctgaacctagatctcttattatgtttaggtcttttgtgagaagaaagccttggttgacataccattgtatatttagtaactctcaatgaagttatcgcgatttttcatatttactttgatctgctagtcaactccagcaaacctactgagtcctagattatctatcgccataccgtcgagctccgtattttgtcagaacagactagcatagtttggcgtaaagattcgaaacccaatgtgggtatcatgaataatgaaaccggttctgaaaatacctgtaaaattgtcatattagaaccaccgaatacagacatcacagttttaaaaccatcctctgaccgttcatatgctacactcacaacagacatgagaatacgtcttgcatcgcagcgatcgacgctgcagtctgacgctatatgcctaataggtggtaacttcaaaaaaaaaagatatctacgtcacgatggacatccaacttagccggcacatatccagacattgactccatctctcgcacttgtatgaccatggcagatcagctcccttgaaacaatgtaactgcgccacaggaggaaagcgcacatcttctgcccgagaactcatgccagacaatattcggaggccgaaccgctagcggctccgacggtgcttccgaagccgacggcgcagacggagctccaggcactcttcggccgcgccaaagtgcactgcctgccgttggaacgggacgcataaagtggtcaacaagcagtgtctgacggcttgtcaggcctagtgtaccaatgaagcctgcatagccgcttagcagcgcagctataggatatggacttgccacggccgttgagctcaggaagtggacgcgactggagcttcgaccgctgaaatcgcaatgggcttgctccatgagttttttcagatgatttggagattgggggcgagaactggtcgtaatgagccagtagtgttcaccgtctaccgatatctgatacgaatatattatgttgagcctcgtgtcacgtgccacgtgatctgtatggcatgatctctggcccctggcctgatccctcgaggagttgtacattgaagaagtgacaactatcgtcatcaagatagagaatcaatcgtcatatggcatcctatccttagtaggctacgttcgtgtagttgatgcagcttccttctaccctttcccctttgagcattcataacaatatcaaaccgtaatgagtgggcacgatttagagcgtagcattatatcgatattgtcgcgattcttaccccagccctggctccagttcttggtattgagagttttggaactatagatatatacccctgctgcagtagattgtccctggaatttaatactggcagtccgttgagagagagcattgatagaagcgttgagagagaacgtcccatcgacaattcgtcgaaccggatgagtctacagtgcacaatcaacctggcgcacgcttctaattctaccgtaagctcagatattccttcggctgcaatgaccaagaatccatggagattccatttaaatgagtctcactacccgcgtttgcgtggccgaccggtgaccggtaggcgcagcaagactccccacctgcttacggtgttacaggcccggcactctccgacaagcagagaccaccagagaccgagtatttaaccagttaatgatccaggtagacgttcctgcttgaaccgccccgaatccaccttctcgcgatcaaactctcgctttgcagcacgattcaaacatacgtcgatggcaaacctcgtgaatcggcgccttgtcgccaacgctctggcggtcctcgctctcagtggaatcggcgtgtatactgcctcgaattgctggatcaagaacgcgtccgcagagtcgcgcagtgcagaaccacagaaggtctttggtcgtggacctgcattcaagtcgctccgtcttcatagctcagagagcgttagcgacaacacaaagcggctgcggtttgagcttcctggtggagagagttcaataagtggactcagtctgacttgtgagtctgcctctgggctcaattgtttgcggtgctagacaaggaaagagaaagagggggagagggctaatttggatctcacccagctgctctccttacgttctcgaggccagaaggtagctggctacccgctgtgcgaccgtatactcccatcagcaaactgggtaagcaagacctcccagccggttctactcgcgctctccgaccggattgaccaaacatctgactggaaccatagatgaacccggctttgtcgatctgctagtcaaacggtatcccaacggaaaggcaagcacgcatttgcatagcttgaagccaggcgacaacctttttatcctcgcatccattcccggtttcaattggaccccaaataagttttcccatgtctacctcatcgccggcggcgctgggataacgccaatctaccagctcgcgcagggcatcctcgacaatccggcggacaagaccaagatcaccgtgatattcggcgtcaatacggagaaggatatgcttctgcgcgaggagtttgatgcgtatcaacgggcgtatcctgaccggatcgatgttctctataccgtcagtcggccgggcagcgagttcaggccggctccaaacgtgcgatcaggttatgtgacaaggcaggtccttgcggaggtcatggggggccctgacgaggccgatacgaagatatttgtttgcggaccgcccgcaatggagaaggcgctggttgggggcggatttggccagggccagccagggattttgcagcagctgggctatccgagagataggatctaccggttttaaagcacgacaccgctcaaagttttgtactataaacgtctcttcaactctttcaatctcatatctctttctggaatcagacaaaaaagcacgacattctgctccacgtcattcgcttactgctggggtagagcttgggcgatctctgatctctctgatctagtgtcagcaagctcgccacgtttcggggtccgcgggtcccactccggctcgagccgctccaagtttgaaaacggagttcatatccgcaacaagactttttctaatcgactttgccctccctgctcaatatcgtggaagttcagagtttgactgcacaagttatcggcaggtatcttgggcactgtgcctttttacgaatgttgacggcattgcggtaccgggaccggaaacacccgttgctgctggaatggagagcctcaaaagggtttatcgtctttgtggttgtattcgctatttaca

SEQ ID NO: 4993 - DNA, 4748 bp, Emericella nidulans
tgcgttagtaggatgaggcgatgtagggatttccgccctgtgaagcgcggttctcgttccagagggtggcgaataagacgtcgttccagcttaggtcgacgtctgggttcatgtcgtaggtgtacttgctgggcggattgttttcattttctgcgttcttgattagtattgcgtaaatatcgcttacagaaccctatcctcatttctggggtccggactagggttagttgagcaaacctaccgaaaaggggaatggcagaggcattctcattttggtataagatgagactgactcttgtccaattcgttatccaagtaaaggtgaagttgtcacttcgtgtatagacaggatattgatctgtgttgtttccgctgtcaagttgttcttgctgcgaaccggggctcaggaagaaatttgtcgcttgggcgtagcataggctagcgccgtagacgacgagaaaagggacggaggacttcatcccctttacgcttgtctgtctagtacgtaggagtacgaagtatgtggctcaggaggttggagggatgttaggaagggctgttaggaatcgggccgtggacgcggttatgaaaggcgaccctgagatggcacagcgtaaacctccttcaggaggagaatccaggaacttcgaaaatgaacccgaggcctgggcttgccgtttttattaagtttattggcttgagtcagcctcagcgcaggtctctccacagacctgccatgcaaatgcagatcgggggccgtgatgagtgggttcgctgtatttacatagtgcctggcatccggagtctggcacctgctcagccctcagctggccttatttcagggccctaaacggctcgcaaggtgacgcgaaacctctgtcgtcatttggcccccgaagttatatttcgctttgcaggaataagcctgaaacgagacagtgcaggatgaattgataggaattgataggtcaccgacttgacccgaccaatttggagattccggcatttagctgcgctgatgggatgatctaaatcccaacggcgcctgggattgattgtcttagtaggcgcacatattatttttgcagaactccgcgtcagacaagaacccaacgataataaggacgaatctgattttcgcgcgaccactcggctcgcggaattccaattatagcaggatttataccgctgcacttgtgccaatcaagcaatggaaataatcgctggccggccagtcgaggttgtgtggaggcggcagtaaagcgcgggctgcagttggtctcgcctagtgtcagttagcgctttgattggcaggtaagctaacgatcaaacgggttgcctgaaactcgacgaacgatgactgtgtatcgtcgcaatcagatggagaccgtcatgatgccgatgcatggctaagtgtggagcggggcctgaagtctgaaagagctggagtagtgttgttccatccctggcgccggcctcgtcagcctttgaacctcacaattcgacctcatgtcgacggccatcctcttctaatctccatccccaacttcttttcatttcaattcttccccatgcgatcaccggactcgtggctttctcttaagccccggaagaccgcgtgggtggcgctggccgccatttgcctggcctgcactctcttgctgctctttcatcagtatgaggacatcccactgtcctcatcctcaaacctaccagccaccaaagtcctggaaactcagactagtggtgatttcagaaacacgccaaccactccaagcagcagcagcagcagcagcagtagtgccaccaaatacaaccccagcaatgccgtgcaaggcgatcgccgctgtcaagcctttgctgaccccggcaacgtcgccttcgtgatcaaaaccggcgctactgaagtctacgagaaactccccacgcagctccttaccacactcggctgcgtccaagacttcctcctcttctccgaccttgatgagcaaattggtccctaccgtcttcgcgacactctcgccgacttcaacgagactctcaaggccacgctccctgatttcgagctataccgtctgcagcatgagttccgtcgtacaaaccaggatatggcgcccctaaagggcgagcatgcatggaagctcgataaatacaagttcctgcatatggtggaaaaggcgtggctggagcgcccgggtcgcgattggtactttttctttgagacggatacgtacattgtgtggactaatctggtgctttggctgcaacgtatttcgccgcctactgagccgctatatctgggctctgttgcgtactttatgaatgatccttttgcgcacggtggctccgggattatgatttccggtaagctccttgagcagttcattggtgggggagcccgggctcgccaataagtacgacaatgcttttacgtcaaactgctgcggagactctgtgctcgcgaacaccatccgcgcggatgctggacatccaagtccagaatatgtttcctcaaatcaacggaaagaagccgactacgctcccgttaggcccgacgcactggtgccagcccgtcgtgacaatgcaccaccctccacccgcgggagcgaacggcgatctttgatttcgagcaggctcggccggacctaactgtacttctccccttccctctttattccgcctttctatcaccaatacataactaacaattgtttttacgcacagcaaccactaaccttcgccgaactctcccacctctctttccccaacgccacaatgcttgagttcgaagaggactgggacaacctctcgaatatcgggattgaattcgctggcgcgctctccccctccctggaagcctgccgtgacgcctgcaagggcttaaagcagtgctttcaatggcggtatgatacagaggggaaatgcgaggtgtcgacgcaggcgttccgcatcggcgggaagagatggccgaccaaggacgggaaacgggttttctcggggtggaacgttgatgtgataaggcaatggagagaggagaatccttgccatggggttaagtgggttgatccgaacccccctaattcatgatcgtaatttattggagttggtgtggttgatgctggctgattgggttttttttggcactctttgctgctcttatgggactggctctttggagaggagcgcattttcttggtttgcggcgcaggcgggacgatttgatatcaatttctgtttattatccctgggatatcggatctgtaacgacgtctttatggttgtctagatcagcgctgcgtcttcatgagcttatcttgtttgtttgagacagattagatattctcatgccggtatatagatagctatcttatgtacaacctgtaaatacatgcgtccaatcattcatgttcaacgcgtaatcgcggaccgacgagtatgaaataagtaaaagctaaaggaccgatagtagaagaagaagaaggagggaaaaaaaaaaatggaaatcgttatgaagaggctgctgtttccttcggcgcaggcggattttggccttcttccccaccaacgtcgttcttccacgacccggcatactgatgtgatactaggtatgggccctgatccgtcggattgccaccttgcagcgctgcaaaggcggcttgtggtaggaccaagatatcaccgaggagcttcggctctttcagctggcggatgtgttgtttcgtgatatcctgaccggtctcctcagagacgctttgaagcaacgccatcgtaatagcctgcgggccggtgacagccactacctccccgaccatggctttcgtgacttgtgacagactgacatggttttcaattgccgttgtcttgagctgtttcacgacatactcgatgacattcttgaagtgtaggagatgcggcttggccataatggtccagctggtgaactgccatccgtcgaactttatgccgccccccacgtttacggggtcctccgtatcctcggtagacgttgcaggaatacactccgacacaggaacttcgtcttggacatcgagatcgctccagataccgccgtcggcgtatagaatgaggacgcgaagaaaatcggctttgagaatgggcacttgcagggccatatatgtttcgagcacgtccggccaatccgcatagttctctcggacgtattggtcggcgctctcgtcggtgaggagctcatggcgcaaatgggggttcttctcgagccataggtccatcaacttctgagcatgctcgttgacacccttcggaccgcatttatgccatatcttcgcggggaatgtaggagaagcttcgtgtgcgagaagggccttgatgcctgtagtggtgtcctcgtcgggttgagatttgagtccgttcgcgggtgcgggtgcgtttgcggtcttctcggcgttgatggttttcgtagccgtcactgtggcagtgacagttacagtagcggaatctattttggaggtgatcgcggcaggtagagaggtttgtagtgacatttcaagggattcatttttcgtgttgagacggatcactcggtgaaaaaggtacatgttgaagatgagcagaaagacgacaatggccgccacatagcgacttgagctcaccatgaggctcgccatgctgaaacgaagatatagaatgagaaaccagaacgaaaagaattataagagacccagatgaaaagagagtgcggaagtagtgattatatacagagaggacgt

SEQ ID NO: 4994 - DNA, 1174 bp, Emericella nidulans
tactaaagggagcatctttaccaagcctaagtaattagccaacttcctggatacctgcaaccattatattgttgtttaatatattattagtagtaactaagagaactttcttcatgatattatactgctaaaggaccttgatcacagttttactgagataagtaccagaatatgagctatctagtagttcaaatccaagaagcacctcacagtaattctaatcttgatctaagaagtagccagtaactgctataaatacttgggagaagaggaatatccagcagtctagtacaattaatagattactcccagctagaagtctattaagcatatttagctggcttgtagtaatattattatcaagaaggtattaaatactgtatatagataggatattaagctgtaatttagtataccaggtaatttaaaggaggttataaaaggctaggtatttaataacttggaatagaagataggtagttgttattaaattaagtatcttttagttaaaaagatacttattaaaatatatcagggactattaggactataaataagattagtaataatatattatttccttttattaaaaatataccatttcttgtaatatctgatcaactcccttcttagctaccttctatacccgacaacctcctttagcaaaataataatagagagaagatattccagtatactttgcagctagatatgcaagtattgctttatactccttatacataacctttagttgcctgctttacttatatacaacttgctcaaatccttgccagactatagcttttttcttactatcccaatatatatttgactgcccttcacattgcttgctatatccagttataagctactacttaacaaattacttccaggagtcctctatatcagggtatgtgttatataaaacctatacttgctggagtagaggcctgatatatactagattttttggggcacaggctggtaaaggtggtggaggaaggaagctagaatttgccttatagagacttggctggctgcttgggagctctgatatatctggaagactatctagtagtatattctcagcatcaaagagagagtctgaatagaaagaggtatataattaagatattataaagtttgccagtagaaaagcatctctattaggggt

SEQ ID NO: 4995 - DNA, 2191 bp, Emericella nidulans
aaagtaaataatagtagataaataacaaagaaaggaaaggaagaaataatatggttatataaaaggaataatgaatgaaagaaataaagagagtaaaatgaaaaatgagcagagatgtaacaataaaggttataaagatagagaaagataaaaaagtagtagttaaaagaaataaaataatatataggaaacaagatagtgagataaaaggagaaagttaaagtagtgaatgatgaaatttgtaaaaaaataatataatgaagaaaaattaatgtatagatatagaagagaaataggatatttcagatagaagaatgtggttatatgaaataataaaagcacctaaagatgcaatcagagtgcaagattgtgcgaaataatgaaagagagacataggaagcccttccattaaatatcactgaaacaaaccaatgcaatggtatgggaaaataacaatcagaacaagtaatcataacaatgcacaacacacaaacaccaatgccctcacatttgacgacggccagtctgagtacacgccacagctgctcgacctgctcagcagatactccgctcgcgctaccttttttgtcctcggcgatgcagcggcgcagaacccaggccttctgcaacgcatgcgcgacgaaggacatcaagtcggcgcacatacgtacgcccacccaccaagcttatccagttaaccgtctttgttacacgtccgcttatcaatcttgtctctagatacgaccacgtctccctcccctcgctgggttacgacggaatcgcctcccagatgacccgcctggaggaggtcatccgtccagcgctcggggtagcgcccgcgtacatgcggccgccgtacctcgagactaatgagcttgtgctccaggtgatgcgcgacctcgattaccgtgtcatctcggcaagcgtcgacacaaaggactatgagaaccaggatgcagacgcaatcatcaatacgagctttcagctgtttttagaccaactggatgctggtggaaacattgtgctggctcatgatattcattattggactgttgcgagtcttgcagagaggatgttgcaggaggttaatgctcgagggttgataggtaagttgtgtctgtcttcgaaatgaacgggtagtgtttgctgatacgaaactcgcagctacgactgttggtgattgtctcggtgatggagagattgcgtggtatcattgagctggctgcatcttcatagtgtatagcatggtttttcacctaactgtgaatagttagggttggtccgggtaggactcacttaatgagcttagcatatatcatgggactagtatagcagtcaaaaggggtatatgtcccttaatacaataatctgaaatataataaaaggacaatcgataaatccttggtgacccttcccaccgtgagatctcctgatatcatcttcttcgtcattctcgccagtaactggccctccgccgttgaaaccttgattgttcttcgacgaggcctcgccatttctagggaagcaagggaagctagtcgaaggtagcatatcatgcctcttccggttcattaatgtatgcagcgcaagtcgagagctgtactgacatggaacaatcttgaaggtagcctagtcgcattatactaatcgcggtagcagacaacctggcctggatggtgatctgtcgacgatagggcttggactgtcaaaatctagcgtgatttacaatgtcatataggtaaacatcaggaagagcatgccaataatccctgaaagcacaactctgaacaaaactatgagttcgttgggcattaagctttatgaaatggcgactctaccgtagtacgaccgcgataaggtctatagaactttgaaatggttgcatccgcttatagtatgtgaatggcttgatattcattctacttcttattgaaaagctaaaagaagacacgtttttctaaggattggtactcgaaagtaggtaataggtgctaacttagtacttatattggaatatagaaaaaaataggcaaaaatatctaagattgagctctagcaagctggtctgcgacaacatttcgccttctacgcagttgcagtagaagacactatatttccactaatagttgtaatgtgcctatttcattgggacagaatccctaatccatatatatcatatgagtacgaacct

SEQ ID NO: 4996 - DNA, 2857 bp, Emericella nidulans
gggatcacatcgcaaaagcctacagttacagcagaaatcaccttcgccgaaacatcatcagctgaaaaggctgtggccaacttccacaatcaaagggtaggtagacttctgctatagttgatttctcagctaactctgggaaggccgatggtcggatcctttcattccagctttcccaccgcgatgcgttcggccgtctgataacaacgggttcgcccttcgatgaccaacgggaacaagcagaccggaatcggcgagcgcaacggacggcggatccagcagttcaggatggtagatacgggttcaacgagcaggctcaacagcccctcgattccagagactctagatacaatggccgtggtaacaatcggaggggcaacaggggtaggaggaacttttacggaggtgaccaaggcgagaaccagggagcccaaaagactggccaatacagtgatgagattatgacggatgctcctccacagggtccaaggaacaaaagtaaccggcggcagtgatatatgcctatctgcacatatcctttcatcacatggtttggtgcccgcgctgtgggaagcctatcgcagcagcatactgcagaggggtcggattaaacgcgactgcggatggccagttaccgtgcgtatctgctcgtgtacattgctagggcggttgttgtgactttcccgtcttatcaggtgcggaattattatctagtcctatgttgtgatatgtacgatttctgtctcctcgattagccgagttaccggtgctagatctgcacgagctttaccatattggtgccagatggccactgatacttttggagtcatagaacgggatgacagtttgggaaggccgtgatagctggttgatcactccgtgcttcgtactatttatgattgaagctattcacaacttttaagcttcttatcgataagagcgagatcacgtgtgtgtggggattgatgatcccggagacatcaatatttcatcgcatgcctttacagcttgcaaagggttcgcataatattatcagatacggaacgcttctgagtgttacagaaagttgtcggctctattaaatcacaagcactcgtgagcgcgaaagcgcgcaccgccaaaaatgaattgtagcacacagcgcattgtcaaccagttctcgaggcagactgcgcgacgaagattcaatatacgatcgcgacgatggaactctacgtttgagactagggaatggtctacgccccttgcacgaaccctggcaaatgttatcaagacgacagggccggtgcccattgcggcatttatgcgccaagtactcacttctccagaggggggttattacaccaccaaaccaggagggggcggagaggtattcggaaagaagggcgactttgtcacatcgccggaaatatcgcaagtatttggggagttagttggtatatggacaattgcggaatggatggcacagggggggaaaaagagtggagtgcagctcatggagattgggccagggaaggggacattgatggatgatatgttgcgagtacgtgcatgcgtttccatctcttccgaggtactttaacacagtgtatgctcactatggtagacttttcgaaacttcaaacctttcacgtcgagtctcgaggcaatatatctggtggaggctagccctactttgagagaggtccagaagcagctactctgtggtaatgccgttatggaggaaacagatatcggccatcggtgtacgagcaagtactttaacgtgcccgtgatctgggtggaagatatccggctgttgcctcatggtgagtcttgcccggtgcccaataaagtccttcggctgagccccatctgcagaggaagataagacgccgttcatcttcgctcatgaattcttcgatgccctcccaatccacgcttttgagtcggttcctcctcaccggaaaatgaacagcaggaacaggagattatgacacccacaggccggacgaaactccagagaccaccaaaagcagcaaacacacctcaatggcgcgagctaatggtcactctgaacccgaaagcagttgacgagaacattaaagatgagccggagttcaaattaactctagcgaaagcatctactccgtcctcccttgtcattcctgaaatctctgaacggtaccgggcccttaaatcccagcctgggtccaccatcgaagtcagcccagaaagccgcatctacgcatcagatattgcgcgacgtatcggcgctcatcgcagccccctcggaccgcagcggggcgcaacgcatctgcaccctctgcaatcgcgaagcgcattccttcaggagctgccctgatcatggattacgggacaatgtcgactgttccaatcaactcgctccgcggcatccagaaccacaaaattgtccctgcactctcttcccctggtcgagttgatgtcagtgccgacgtggactttacgtcgcttgctgaggcagccctggaagctagcgagggcgtggaagttcacggacccgtagagcaaggacacttcttacaggctatgggtatcgcggagcgaatgcagcaattgctgagcactgtcaaggatgagaagaagcgcaagatcctggaaactggatggcaacgccttgttgaaagaggcggtggtggcatgggtaagctgtataaagtcatgactatcatcccagagaatggcggcagacgccggccagtggggtttggaggaggagtcccactctaaggctctcgaagttagcaatctcgatgtaatataatgtgcatatagtatctttttatgacgacgatttgaaatttatactttgcattgattcagtacaattggcccg

SEQ ID NO: 4997 - DNA, 2353 bp, Emericella nidulans
ctggccgcaattacaccctcactaaagggatcctacacctgcgcgacgaggaaaagcagccatggacgcagatcaacaggctcttcactgagaaaacggggatcaaggtcggtagtacgacacttagattacgctggagtactatgaaggcgaattttgtggggatcacgatcgaagatgtatgtctggctaccctgaatcacaccacaccccggatagcaatagcctgattgctgacatcaacactaactggccgcaggaagcacgtcttctccggttgaaaaaggagattgaggacaaattcgagcaggaaaagtggcatcgtatcatggaggcgattcagagcgacggcggggagaagtatcctattgccgtgctccagaagaagttcaaggaattgagcaagaacgctgctacatctgctcatgaagcagcttttgggactgatgatactaaggagtagatcggagcgaagagattctacctgcatgcagtttatctaggagtttgtcttcgttcctatcgtgtatttcatttcgcttatttggatgccctgaaagattggctgaagtctttggcgttatcatgatcccggaacccggatgacattaacatcttagggggtaagaatcagttatgtcatgatctgtggatgggttcagacacagagtaggttgggcttagaactcccgtcgaggtggtttctggtccttgtcgctagctcgaacagggatagcagatattaatggtttgacgcgcggttcacttattttttgtagtattcgctcctatgtagccctattgaacgccagcagaactcaatccaaaacccacgaacccactgcaccaacccagaacaataaatggagataagaggatagataaaagtccgcgctgagacacataatccttgctttgtaccagacaaacaacgaagtgctatagagtgaaccaatctacgaagagaagatatcgatatcttcacatcacaaaacactcaactcctgctgcaacctcttggaactcaactcgtccatattagaatcagtagagttatcgctcgcctgtgcaacgatcggcgggcgaatcttcgtccccacaaaaccacgcctatctcttcctgtccggccgcgtcccaaccagttatgcttgagatctttgctgagtgtctcaattcgttcctgcgcagtatcgttggtctgcacacttgcgaggacactcatgcactggagcatgcggccgactgtctcggtgatgacgtgagatgtatctgatgcgttgtttgcgcggtggataatcgtgggccgttgagaaggggaagagaaggattggaagatgagttggtcggggtttgaggaggtgttggaggtagcacgactgcggttgtatcctggggattccgaagaaaagctgccggctgtatttaggaaggtggatgattgggaactgtaactgccaaacccgccgtcgaaggatgcggaggtcgtagggcggccgttattgctattattactgcttttcgttgttacgctaagggcggagttgccgagcttgatgctgtcaaggctcaagcgggagaaggtggctttgaggttatcgtagcggttgatgatgaccatgtcgcggaaggcgataagaacgaggttgcggacttcgagctcgcaaccgggatattccccatctagcgcgaggctccagaagttctttgcttctcgtatgttcatgacggagccacagcctttgaattcaagatctaggggtaggaagacggcttgaatgaaagggagaatggtgccaaatactagcatccagatctgcacgagatggggcaccagcttatcatccggtacgccgttgagggtatggttcaaggtggcaaagccagcttccagcagcccgcgtagatcgtcgactatagctgtcggcgtacgcctctgcacgcagcgctgaatatggatgatcactagtttgttcagatcctcaattgcaatgcgaacatcttcgccgtcgaaaatcaccaacagttttgcttttaagaagtcccatgcatcttcaggactcatattatgaagaccaaagccttgtaacgtttcccgtacaacagcctcagtgaggaagcccccagtacttcctaacgatgacggcccagcaaaccctgcagtagctgccccagcgactgtcgaattcgccaaccattccggctgttcttctgcaagcgtcttctcttccttcttcttgtcgcggaggtcgcccaccatgtaatagatccaaccgcctacagacttgctgaaagaagtagtagtagcactcggggaagccggagtgaaagagtatagtgactgcggcgattagg

SEQ ID NO: 4998 - DNA, 2198 bp, Emericella nidulans
ctcgtccttgacttgcgatagcttaggcccgccctgagttcgttagccatccgcgtgcgcctcgatcgagctcactagacccagcgttgtttctgggggttccgatcatagacatcttcaaatagtgacctcgagagactgggccgaaaacacccttagaccccaaaattgctgaacggttgctacgcgtgccattgcagggcgaccactagctttttggccctaagccggcagtttgcgtacatcagccaaaggctttgcgcggtgcagtaccttaacgggtctcattagctttgtgaagtgtccggatcgaacgcgacaaggaggaactggctctttcaaaataccgaatacgcaggtgttcgaggaattgtggctggccctagattgagccaacatgagttctcaaactcctaggacatccttacgacgtaagcgagatctatctagtccctctcttttctgctcatagctaataacctgatgcctctcccagagggactgcggcaagctcctaaagttaaccagcccttcattcccgacacagcaccagtacgccgctcacacatgcatggaaatcaatccccgcagccaacagtcagcagccagacacattcaatgtctcctgcaaatccggggagtccccacatttcgtccgaaaactgggagaataaggaacatcgagttcccatgtctacgcgcgatgtttggacgcccggaaaccgaccgagcctcttcagcagtatcttcgacaggggcaagacagtcaaaacggcagacttctatgatccttactttcccttgaagtttattgacgttcccaaatgtacgtggactgcttcctattgtgtccctcgtcttctacacatctgtaggggcaaatggctaacttgcaatccagcggatcatatctataaacgcgcccattatgggttacagtcaggaattccagatgaggtagactttgcgctatatcaccttgtccaaatatcaaatcagcgaggagacaaattcaagtttgagggttttcctttgctcgcggacaaccttatggaaaaggccatggagatcacagagctatgcactggtgtcaaatgggagctccagtacgatttcaggcaagccacagatcgtgtcaatactctcaatgcgctacatggtacccgagatatattggacaagatcaagcagatcccggttattttacctgatgatacgctggagacgtacgaattcaaccatcgcctccgaaacatcaaggaagccactttgattatcagaaacatggtccttctaccggacaatgcattctacatcgcaagctgcgccagtgggttgttaagagacttcttggtaatcatgctcaacattccggatcaaccgcggctgaatgaactcaaaaacgacgctcttgatatcgcagaggaagtaacgaggctgatgaggactgaccctgaggatccgctgtggatctcgcttctgaactgcctttactctccggatcgtgctcatgtagttcgtgccctctgggctctcacgcatttctcaaccgagctagacgagccggaggctaaccgggcaatggaaagcatatcgaaagagacgttgcagcagctataccttctcacattaatcgacctggacaaagacatcttgagtggtgcactcgacttctggtatcagtacacacttttccgcgagaatattgagaccatgatggatgtgtttaacttctcaactgttttcattccccgcatgcttgcacttttaacatacgagggtcgaccaagcaagagagaaactgtcttgcaggaggagaaggtagcgccggctccaaccgaaatcccacgggtgcctccagagctactgaaagacctgatggatatttctgagccggaacgtagctctcgctggcttcgttgctgcttcgtcgaggatgccgagtgtgaaattacacagattgcgctctggcaagcatatcagagtcggtttgccgatcctcgagttcctggcggcggtgttctccctgctgcggagtttatcaagaacgtcagcacgacgtttacgaatgcgcaggcgcaggtaatcaacggacctggttcatcaacgaggttcatcatcaagggcattcggcccctggaaaccgcatacacgttccagggatttccttacatctattgcaaatggcaagataacac

SEQ ID NO: 4999 - DNA, 6733 bp, Emericella nidulans
ttggtgctgtcctctattgcaaggtcagcagcaacatgaacctgaacctgaacgaatgcgcctactgacaagaatgcgtgccagaccagccttcctcaaactctgctggtgagccaatttctcctctagacgtcatggatgcctcgtgagaacccaaccaacttctctcgcagttcggcgaaactgtgaacaacataatcggccgcacgttgaaccccatcaaccagaatctctcatgtggaggctcatctggaggtgagtttgaatgattttccctgacacccactattcttacatgcgtccaggcgaaggggcgttatcagccttgcacggtagctctgtcggcctaggcacagacataggtaacttttcactgtcaagcagcctagtaccttatcatgagagttagagaactaataactacaggtggttctgtgcgcattccggccggtttctgtgggatattctcgctcaaaccaacccacaaccgcctttcctaccgggacgtggccaacgttgtaagttaacctcttgcctagtcaaaggagagcaagcaagcagaagagccatattgatcaaaccactagattcccgggcaaacgacctatgcgtcttctgtcggggtactgggtaacacgattgaagccatacatctagtcctcagctcgctcatctcgactgagccctggctccgagacccgaatgttgcctctctcccgtggcgccagaacatagcagatgagaccctctcccgagcaggcaaaggaggccaatgcacttctgctggagacaagcaacctctaaaacttggggttctctggacagatggagtcgtgacccctcacccgcctgtggcacgaggcctgcgtttgactgtcgacgcggtgaaaaaagcgggccacagggtacgcattcaactcgtctcagggggttctcgaagagagccagtctacatctatattccggattactgacaaagtcctttctcaggtcgtagactggacgcccccctcccaggcaacggccaaaagagtccatgtgagcccgcgctcttatctcccattcactgtcccggacagcctgaagcacaaaaacagctaacccgagcataaggtctcctttctgaaagccgatggcggccacgacatcaaccgccagctcgatctatccggggagccattgatcccccaactcagggattcattcactcttcgagatccaatgtctctcctcaaataccaggccctcacaatcgagggacgggattacgaagcggcttattcggattattggaacgagacggccaatgccgaagacggtatgctcctttatccatgccgaccttccaaagacttctgtagatggagacccaccaacatatccgatacgattctcactagccggttgcaggacagatagttgacgccgtgatcatgcccgtcgcaccacatgcagcagtcataccagggaaattttatcatacaggtagactacccactagacgtccccttcctcccgtcttccttgccttgaaccccccaagcgggatgcgcgcgtgagcaattggagtgctgtacaattattgacgaaccatatggtcctcgagtagcgtataccgaggccattaacttgctcgattatagcactgttgtcatacccgtcacgagagcagacaagaaccaggatctagcggacccggactatgcgccgttgaatgaacttgacgcgaagaattgggaggcttgtaagtgttcgctatcgcgcgagagattcgcaagccaccgctgacacctggtacctagatgatgcggatatctacgatggcgcccctgtcggtgtgcagattgtcgcgagaaagtacgaagaggagaagatctgggcgatggggaagctggtttacgactgccttcttaacaggaggctcagtgaaaacacatacacttctatggacggtcaactttgttctacgtcttgtttaagagatagggtaatcatagcaaaatactacgagtggcatgccttacctcatatgatagactaagcgcgagccacaccagcaccaccaccatgtccctctagaatgccaacaatatccacccaaccatgctccctagcaatctccagtgccgttttctccatcggactgcgcagctccaaattcgccccagccataacgagcagtttcacaacctcagcatgcccgccttgacaggccaccatcaacggcgtccacccgagtggatacgccctctcaacctcggcaccggcaccagcaccagcaccaggatcccgcaggtctcggtcctccccttcacgctctataatcttccgcgcccattccccctccgcaggcgccctcgcatcaaccagcagaatccgcacaatctccacatgccccgccgcagccgcaagtaacagcggcgtctcatcatgctgcgacccaaccacgacatcagcgccatagcccagcaggagcctcacgcccatctcatcgcccttatagcagcaatgcataagcggcgtccaatcatgggatgaccgcgactccgggtccgcgccgcagcgcaaaagcgacgccatgatctccgtctggccgtgctgggccgcctcagcgagggcggcccagtggtccggcgagacatggttggcgtctgccccgcgcgagagcaggagatccacgattggctggttgttgtccgtcacggcgtgcatgagcgtggtccagcctttgttgtcgacggcgtcgatgttggcgcccatttcgagcaaatgggttatgatggcttggtttgaccgcgaggcggcgagcatgagcggagtgcgcccgtcgtgtgcttggctttcgatgtcggtgccgttgtggagggtttgctttacgcccgcgagatcgttggcgaagactgcggacattaggtggttccaggtggctgtgttcgggggctgggatttcttcacggaggaaggaaacggagtggatcgtgctcctgcggtctccttttgcgtctggtcgtctggaaggtcctgtttcctggacgcggcggcctgctgccgttcctgatacttggaatatatctcctggaagtctctcgctttgcgcatgtcggctccgtgctggatgaggtagtgcgcaatgccgtcatacccggcatgagcggctatgtcaagagcggttctgtagtcattgtcaactagattgacgttggctttccgctccacgagaatctccactatatcctggctcccctggccgactgccagcatcaacgcggttgcgcccagtgcagagcggatatcaatgacctcctgtgtggacgccaacctgtcgatggctgttaacagcatgttaagggcgtcgacatgtccggactctgcggcgtagtggagaagcgtcttgttggcgccgtcggaaatttgccggactatcgttggatgctgctcaagggtctccagcaggtagctggcgtcgcctttctgtataccccttcgagccctctgaaatggcgtatcggcgcgttgaattgtatgccctgtggctgtggtatcatgttcctgtattgcgttataagtcgtcgaaaacccccggtacttcattcccctctcttgcttccagttcaaactcggttcggtcacggggcaaataggttagcataggtagacgtaccgttaagcaatgcctaaaccagttccagccccgcctcgacttgcgtaacagcctccatgcctggcacgagtcgcagaaggcctcccatgagcctggcatgccaaccaccttccgcaccgtcgacggccgcggcaatggcaggccattggacgctagcccatgcatgtacgttaaatggatctcatacgttccgtccgggatattgacccagtggccgacatcgcaacggccgcagtagccctccttcgcgcccccgtagccacgtacccagccgggcgtaaaaaggtctcccccgaacatcgactcttcacgccggggcacaaggtccggatcttcactgtcaaagtccgccgccgctggggtaaagtcgtgcggaggttgccagcccagtgctagagccggcgcagagtccaggatgtggggtggtgaggcctcctcttccagcgaaagcgccgcgagggccttccccatcgagtcgatcgtcgccgcttctaacagtttttgagccttttcgtcgcccttgccttctatgccacctgcatcggggggctcgacctcgtcgtcgtcttcttcgatccgaggctcatcgtatagccgaggatagtccttaggtaaagcaaacagcgcgaggtgctccatgtgtcgcgcgatatggtttctcaacttgttcggctggaggaggacttccctctgggctcgtagtttgacgttcaactttgtctggtagttgcacaggggacatgcagcggccgagatccgctgcagtggctggtttgcgagcgccaccagtgcctcttttccgacacagctgctatggaattcgttggcgtgcccttcaaaatcccgcaacgtcggcagggaagtatcgtcgcatagggggcagagccattgccgtcggtggacttccatctcgtggttgaaccactggtgccgagactcgaacagcggctcggggcagttagggaatgtgcatacgtacgatgcgaggtccgaatggacgtgtttccttgtgatatcagttccgttttagtccatagtgacatcggattgattagggtctttgctcctgacttacacccatgacctgagactctcgatagtgatgattgtgaaacagaacgggcactcgaagggattgccgtccgctgaacccgctggtggccggggcagcaacatgtgctcgttgtctagttccgacgaggatgacgctgaataggatgtttcggatccctcatctcggccacgatcttcaccacgggtggcatgcgattcctggtagaaagtcgttgcctcggtctcttcccagtcccctggtgcagatggtgtgggacggtgagaggagatagggatagagaagccaggcacgctagaatcaacctcggtctgtgctagttcgtgttgatccctcaatatcccgccgccgggctcggcagcagcagcagtggcaaggcgctgatgatgtcgctttcgatacgcaagccactgtcgcctctgggcgttcgctctgcccagccgctcaatcaggggtctgttctgggctgcgtacgggaacacggcttccacatgtgcaatgtcgaaactcgtatcgtactgtttttcctttgaggatcgtgcgaatttggcccgccgcgtggatcggtggatcacgatagatagcttcaggagactcgcgacggtgtcttggataatcagaacaagctgggcagactctgttactaggatgcgaggctgttcgctctttcgtgttctgctctgtgatgcggactcgggttcagatcccgagctgtcgctttcgaagtcttccccaggattatcgtcgtcttcgtagtaccatgtttcttgcactttttctccggcgacgagcgggtacactataaattccagaaagtcagttctgtggtctcgaaggcgcacctcgctggatgcaagagactcacggtccgtcaacgcggcgagaagctcggtgagaagcctcaaaacctccatacgcagctcgctgttccgcaggcggtggtccagagacgacttctctcgctgcagtgcgcccaaattggccgcccacatgcgaaatcgtgcgaacagatcgaggaagtcatgagcctcgaagccttctgggagaggcgcccccgagagagtgaacttgctccgggtgcatgagaacctgctccagcattgcgaggagagctctgctatgattggggaatcctgtagagtcgccatctactcgccgcagcagaacgtagactttgacgcctaggaatttaggcataggcgccgggtcttctcagcggtgggagcctcaacccctcgtcctctacccctcttcttcggacctggtctcagccttgcggccaatttcttgtgcatgcagatgggcagccgaggccagccgaatccgtcttattggttagaatggattattcagtgtccttggtgattacctgatcctgtctccgtagagcagcgccattctgatggcggttggggtggaatatggcatccaggtgggtgaaattacctaggtgttgatggtatatactaaggtacgcttcaaccttccaagcacagaaggagaaataaacgatcataaccctgttctgcaaagtgtcaaagttactcgtataaatcgtctcatagaatgcctaatctgattcgcggtgcattttgcaagtatacctattagctgttgtaagctctttaccaacttttggtattactcttttcctgaacattaccactgataaaatattcaaattagggtacttattctaataaaccacggaactatagaatagacagaaaagagcctagataatatatcaaagttaagtaagaaaagatcagcttaccaaactacacctctcggcaacccagcgggctgcgccgccggtctctgggtcggtccataatatccaggacccaatggattatttagaggtccaaccaaccgagttcttgggtttcagggcgggttggggcgtgtttcgtgggccgcgtttaacaagtctatgaaatatagaggtgacctagcgtgtttggccaccgcccagaaacaggatcgtagtgtattcc

SEQ ID NO: 5000 - DNA, 4898 bp, Emericella nidulans
ctctgcacggatgtatgtcattcctaccgccgtcagtcaacccagacactctacaagtaagagttgtatggcaaagaagaacaaaccattaatcgtgcttgttccaccccatgccttcccagcatgatactcgagtactctcccacccgcatacatttgctccgttgtcgcataaagctagtaaatggccgtgttcagccccgtactaccaccgaacccctcgacgctggtgacattggggttttgccctcacctctaccggcttcaactactacaacgctgatatcggatatttcagaaaggcggtttgcgacggccaattctgtcgttccgccgccagttatgatgaagtcgaggtgatcttagctggagggggatatggtcgccgcagttaaggcgattgagaacggtgcgtgggaagcagggactttaggtaaggaaaccattatgcctctcggtcaatggaagtttggcgtcaggggcgggttgaatattggcgctggggatttgagtagctgagatcggcatacgcacgttgttataaatggccaccagccacaatcctggcggcgaagtaaatgttacattccccgcatcggaataacagtgatctgtggtcctgttattgtcatcttgatatcaagctttacgcggatagtaacattccgttcggttttatgcgttaagtacatcttcgaaacccctacataatgaaagttattctatcttacgaaatcctgtagactatactacgataaccgtcccgagattcaggcagcaagagctagccccttgaagagctaagttgttacgatttgctggcgatcatttgtaagaaagaagctgcggcaacggagttcagctcatagatggaacttcatggatagctcgcaaagtctgaaacagcagactaccagcaagcaacgacgggaagggcttaggtagaattgcaaaatacaagaccccacactcaggagaccacaagcgccagagctaaggtgagttttgtgctttgactccgggagtaatgatacatattgcacttcgctgcgagattagttcgttaacttctcatcctaaaacttacggaacacgacaaatttgttctagaagtactggaaaggatattttaaaggaattacgcgaatccatagtttgcctagaggcggagacatacatagtgcaaacatcgcgtcgtctgcaggctccacagccgcatcctcatctctgagtttgatgtcgatcctccaactagagtggataatgcctcggcgactaggggtgttccctatttctccacttagaagggcaaagtatggcaatatggtggccgcaaatcccgcaacatgtccgggcgtagtcgatccaaggttgcgaggacacgggtcatcgggctacatataaggcaagttttgccatggtgattttagagctgatttattgtgggtttggagctatcctgctagttgccgctgctctattagaaagcctgctcggcaatttctctacctaacttagttaaacgggtcagcattaatactggggcagtgctggaaggggcgcaacctaagcatgccaagtaactctcgatatctcgagtatctctccatatctcgggatttgatgcgcttttggcgctgttactggcccgctcgcttgcttgatcgacattggggctgaggatgtcctacgcgaaccttccacagccccagcaagtatcaaagttgttggggcacgaaacgagactctgcctagatgtattgaagcaggttatgggacgataggggttgcggctctgcctataaaaggagccagtagagcatgtctcttcggaatcaattctatagatacagcatcacctgatcgaagacagagaaattgcgtattaaacatattcacagtaacgtcgatatcgatcgccagccttcaaaaacttccatttacagacatctttctgcgattgtcattccggctcattctttatcctcataaatataatgtcccgtgcgcttctccttgtggttgcaaccatgtttgtatccaggactctggcacaggaagttagatgtgatcagaaccccatcggtcctacctttgacgaagcaaagttcaataagctggtcgagacatggcatggggcatttggcggcggtggcgggtctctaggccagcctgatggttttcatgtcactcaccaggctgtctgttgcgacggatggtgcttggcggccagtaattcggcagggtctggatggagttggaacgacgacgatttcacgggtgccgccgacagattgagagaagatggcggcggccacagccaatgtgagacccaactctgttctggtattggtctcgatatatactgcaaccttgagttcctgaacagcgagtaccaaactacggatgctacttgcgatggagagtatcacggtgttgtggaagctttcggagatacttgtgcaggggctcctggatacaacggacctgagtgttagatttatggcctttctgcattgacgatgatatctgtttctcgcttgttgcataattgttgcttacatctgctcatcagtttacacctgaaatgtcaaatatagtaaatctactttgtactccaaatcctatctctgtgttataggaattgatagaggtcgagctaggatgattgaacctactatcattacctggaagtcgcatggattcaaggcacctgaatcaactaggatgccaagaataatagactaagaaggcagaaagacccttgcctgccgaaaaggaatcgttgaagtgtcttaggtggtctgcattatcagttgcggtcaatcttacctttaagcatttaagcctcctacatacaaaattcctttcagcctgaagagtgtctccgttaccatctcactgattctcctcttgcccaagcacatggggtaaacagctccgcgtggtcagcctgccatgacatcgcaatttcactaaagtcactaaaatgttttcgcgactactgtcactgtgaatactgtttgacatcaatatcaagctgcatcatctcccgacaaaattttgattgcttccagcgatactttatctgttgacggcacagtgcgatctttacaatccgatggtcggttcggcacgggacactcccgcttcctctgtgggacttagggttttacttgttggagtcctacaaaaccatacttacagagcctcttctgcgttgcttgaagataccgcgaacacaaggagaacgtagaaaggcgttggcgttggacaaagcatctttgccaatatctgtccttgtagctgatcttagatccattgaagatatccctattatgtttggatgtgcaatgtaaggagtattagccgggtgtttggtcaccgcacctatctcaagcaaaaatccaaacttcatgtggtctcctttgcactgcatgttaaaatgatggcctgttacttatgatcccggcggttggggttcaggacatgggacaaactggctattgcaaagacgtttggttaatgccgcgaccaggatttgtattgccgactctcgcggattttgactttacgctgtaggatccccttcagaactatacaaaagaaatgtcaatttgaccagcctcatgagctactgacagattttgacccatggtcgaggcacacgcgccttcagtgcagcactggttggaacttcacgcacttctattagattagtaccaataccccacgtcagcccatcaccgccccccctctttctcttatatcttccacttgccattcttcaccactaacataagatcttctcccaaacaaggtcaggaaactgttgtgaatgctcaaaggggaaagggcagaaggaagctgtatcaactacacggacgtagcctactaaggatcggatgccatatgacgattgattctctatcttgttgactatatatatctcttctctcttgtatgtactccgatatgaagaggggtcagttattaggccgcttatatcacgtggcgtaagtcaggcctcatcgtgtacacctggtgtacataatggtcacatgatatgttcataacagaaacaaagttgatcacaagaatgacaaacaatatggagaaaatggaagggtccgagaatcctcgaagcagaagaatgcgttccccttccctttcaaaaggcatcgtacaagttcgaagaggtggaggtcatactgacaactctttcacgggcaggggcgaacttaaaaaggcgatgagtcaacatatgctgactctgaattcaatggatttgacgactccgagaaaggagaatggtaaagggaggatgagagcgaagatttagaccgtgaacaagattttgaagagcatgaatataccatccccggttgcccggcacgaacggtgaaaacgcggctcgtcctgactgatgaatgaatggacgaatccaggtggataaaaaaattcctcgctaaatgcacctgtgatggtgtaactgtcgccactgctctagccaagtatattgatcgagagggcatgcgtctgaattctgggagaagatggaagctattagttcgcaaatgtgcgctgtggctttccaagtcttcgatcgatacgggtcagtcaaggccaagtacagatcatccggtgcaaagaggaaccggtgtgtgggaaacgagcttgatcatggttcccttttcctcattgaggagcttcatattgcagcgcttgaactacgtcggaaagggctggcgagaaatcgtgtctctacttctgaacaaagccagacagttctcccaagatgaaaagggagatggcggaagccaaaatcttaggtacggttccaatgaggcatttgagcgatcctggactctacatgccttggtaagtcctggaatagt

SEQ ID NO: 5001 - DNA, 11843 bp, Emericella nidulans
gtagctttccagttcatgcacaaagtagggctagcaattccatacaaccttcgaagccatcgccccaatcctcctttagcctgtaatgcgccagcatatactagttcagaataatcagataaattcctccaggcggaagcatgttgaaacattaggagtagcatacagccgatctctacacgatatgctgataaaacaaatacctttgttaaggtttaattgaacacataattctttatctctcttgtctatctgcaatactgctgaattaagaagaataagtatctctctaagcccgtctatcttcattctctcaatttcttctcctccaagaaagcctcctgctcctttctactcttccctatatccaaccaaacgcccaggacccccgccgcgagcacgctaatgcccaccaggaagtaaaacggcaaacccgcattcccactctcgctcgcatcgataattgcacttgataccaagggcccaatgaaactgctcgtctttccaacaatgctaaagagggagaaaaataagaactcatgtccgcgcggtgtcacttccgaaatcataatctgagaatagctgtaccagggacacacaaggaggccgtagtatgcttgatatgcccagacctcccaagtgttatggaagccgaatcggttagtgaagatgccaatcatgccccagatgtcgagaactattatggctgctacaatgaggtggaagagcgttaagggggaaaggttgaaacgggtctggatacgccagaaggcgtatatgccgagcgcctgttggtttgggagattaggttctagggttaagagagtggaaagatgggatggaaaggaggtacctgtgctgtaataccgacgatcagaaggtatgcgagctgaagggtgttgtaagcaacgatgttgttttggagtgttgatatcactgtcacggtggtgttaagagagtccccgagtaggaagtatcctgttctactgtcagcctcgaagcccggggaggttctggaaaaaccatagacgacaaaactgaccaacaagataaagcaggctctgcttcaacctccatatttgccttgtagctacatagatctgcttgaggccagcaacaactatgctccgccccccagtaccttgtcccggtcgtcttttctcaaggacaaaccaaggcagcgaaacaagcagccaaacaccactcgcaaacgcaatcagcacactcagtccccagttattatttgcttggctatcatcaactctcaacccaaacataatccccacaataactgcaaggataaagatctcacccacagattgtacgtagaacgccatgttcgccagttgactgcgcttcattgtatccgcgaaatcatactcatcacgagatatagaaccggattgatactcgtccgccttggatttcatttcgactgtattacgtgcaaggcccgggaatgcagctgtccagaatgttagggttgtctggtaggcgatcaagccgacaatatataaccccactgcgacatgccatttctctgcatcatggacacctagccagccaaagccaattgcgtacgcgacaattgatagaccgatgaggatatttggtctccaggtgccgaagtctgcgaagctgccgatgactagaaagacgagaacctggatggcaaaagagatgccgttgcagagaaggacgatgctttcaatagagcgcaatctgccggcgaaaaataactgtccattctcgtcggtcgcttgcgacagcagattctggaacgctgtaggtgcgaaatctggtcgttgatgatatgcgtcagtatgctaagctttgccaaggtggtggcttgaggcggcacccactgaacagggacaggccattatttcctatgtagtaactggtatggttcagcgaggcaacggtcccgttggactgcatgaaatatcacgcacgcataataagcccatatctccagtcgcgctgtccggtagctctcgtcaaactggtcgggagccgtgggccgttttgctgctgcatgtgctttggcatcgagttcttggacggcgggatactggaccttctccatatctagagatgcgacgacagccatgttgagcttgttaaacgaactggtgacttcttcgcgaggttcccgaaataaataaagaatgaggttctggagtcccccacagaagattcaacccttcccggcacaagcgataggctaaatacgttggcgctagaagttctagactgggtgaaaacttggaatgtgacgcttgagtcaatattggtggggtggaaagtgcgtatggaatagatagaaaatttatttcgatttacaaaatcatacaaagtcaagtatgttgtacggagtatatatcctttatgtatacattgaccgggtatccaagtctatacaacagaatcgcaatcataacttggcctgcccactctcaattgacgaccaactcgattgcgtaagcttttcatatctggtcccattcaaccagtatagtttatcgccattccagtcgacgagagggctccagcctttcttcgtcaactcgcctttagcctgtttgaatgtgactcccgtggcaaccctagtgcgaattagttagacactcttgctatgttcttattcagacagggacatacttctctgtcagtcgaacaagccgtggaatagcgtaggatggaacacccttcttcttcagctccgcacggagcttacccataaactcattggcagcagcctcggtgtgctcctcgagcgtgatacccgcggcgccagcctgtccatcataagctccgagtctgacgccgtacacaacggcgtcgtaaactccaggaatggcagaaatgtggtctcgaatttcacccgcactgacgttctcgcccttccagcggaatgtgtctcccacccggtcttggaatttaatccacccatccgagtcttgtacaaacaaatcacccgtacgttgaaagaggtcccccttctcaaatacgtcccggaggagcttcttctcagtcgcttcttcattcttcaagtactctgtgagtaagccgcggtttctgacacggccaatcgcctctccttcctcgccgactctcaccctaacgcagaaccccgttttaggatcccgatagggcatctctgtatccggatcatatttcacgatgacggtatcatcctcgaaaaaccgcttaattgggcctgagaacccgaccttgccggctccccacgatccaaacccgaagttgtcgtatttcgcaacaccctcggttgagcggtagaactcgcgaatctcaggaacattgaaccgctcgcggaagcgttcccaaatatcccctcgcaggccattgccagaagcgacaatgcaggcatggttctgatcatagggagaagcaggcgtagccataaggtatctgcacagctctccaatataaagaatccgagtagctcttgagtcgtggacgtccttccagaatttggaagcagagaatttgcggcggatgcagagtgtgcctgcatagcccacggaagcacacagtccggtgaagtaggctgtaccatggaaaagcgggagcgagcagtagattcgtagagggaagtatctcgacgggtgcttgacatcttgagaatgaggggtggatgttatcagagtcatcatattgcggatggcgcatgccttcggttttccggtagttcctgacgtatatataagagctgatagatccgcgggggttctctttgcagctgttagattggaagaggagtactgctgcaagtccgcgggtgtgatcagatctgacgccgtagagataccgtcaaaagaagagatgttaaatgacaggtgaggcatgtctgagcacacaaattgtgcgagatccggcgtagagataatgagcttagagccggagacattaagacagtgggcgaatgtatcatctgcattcagatctgtgagcctcgatcatataagaaactagtaagttcatacctcgcaggttaatatttataagagcagcaacggctccaagttttgaaagagcataaataatcgcgaccatctctggtgagttggtagtaaagacagcgacaaagtcgccagtgctgacgccccgctcgctgagtagagcagccagtcggtccgcaactacatgcgacgattagtacgtacattccatcagaacaaacagagggcaaaaaaagacatacgatctttcaactcagaatatgtccatgatttcccttcaaaccagatagcttcggttgagccatgcttttccacttctaccactcgttgaagcatcccatagaccgtaggcgtctctcctaagtgagccatacgctcagccagacgtttcccaaattcccggtcactgcgcatggcagataaatctgtagaaatggagaatttggcatccagataagcaccagctgcgactgagagggcggatgctgctgccacgacgggcacactgatttcggacaggagatccatagtgagcactaccagcgcgcaaagtgaacaatattagtcgtgcaatcattcggcggacgcgccgcttttatctgccttgggcctgaagcactggatctacttcgaagcagcaagctggcgagactagcgtaggcacggaatctggggacgggaactgggaccggggcaatccccgacgcgtcgtcctgggggcgagacggcagtgcagcaacagtgcagacccgattgaccaaggccgatatgtcagaacgaaccactgaccgagagccagaatgttttaaatttttgtgttagtgccgactatactccaagaaacaatgagcgtttttttttgaacagggggctgtattatcccctgctccccacatctcaaccatacccatactggtccccgcatgttgtacggcagtaacaccaccacatggtcattcaggcacctggtaccagctttatatgcaccacagcaaatgcagactcaactttcggggttatatcttccagacttgagaaagcccgtccttttagccctggaagagtttatgtaaggtgtagatcagtttcccagcgagtcaagacctccactgtcatcgtcgagtcccacgccgaggcagccgaggccacgagtaatacggtatcttacaccgtcgttacactcggcaccttcatcggctgggcccgatgaagggacggtcccttcaaatttccatgtttacggctcgagtatcgtatctgcaaaatcagagaggaagaaatcatctacgaggaatcattagcaccgcttaccaacgacaaggcctgaacaagaagcaatgagcaggagctgcaggttgctcgagccgaccgactctcggctgctgtgtttctggcccacctccggtcgtcttagtctcgttctcggctgattactcttgatcttctcaagagccgcggctgatgcactttcaaaggggccccactgcttcctatatcataccgtggggagcttctccgctcgactttttttccccccaaacatacactgcactctgacaatgtcatcaccccagcagcgactctcttctatttcaaaccagctctcgggctcgagtgctgccgcctccagggagaaactgttggccaagaaccctgacgatgtggtatgtttacttcgtattatgggagaattctatgtctcacgctttgggggcaggtaatcacgctcgctgttcgaacgccgctcaccaaggcgagaaagggtggtctcaaggacactcgtcttgatgacctgcttatctcgttactgacggtatgttgggaaatctcgcacccgccaggtctgcttgtatagtctaatgggtggaatagagtgtgcgtgaaaggtccaagctggatccgaatctcgtcgaagatgtctgcgtcggcaacactctctgccctggccaggcatatgttgcgcgctctgccgtgctcgcagcaggattccctataacaaccgctgcatcagttgccaaccgtttctgctcttctggattgctggcgattcagaacatcgcaaaccagatcattgccggctcaattgatatcggaattgcagtaggtgctgagagcatgagcaccaatgccgacggtggcgcaccggacctgtccgaggcgatcttgtcgcaccccatcgcgtcgcaaaacacgcaacccatgggccagacatccgagaatgtggccggtcagttcggtatcgcccgcgagcagcacgatcaattcgctgccaaaagctatcagaaggcggagcgtgcccagaaggcgggatggttcgaggacgagatcgtccccgtcaagacgcagatcaaggaccccaagactggcgaaatcaaatccatcatcgttgatagggatgacggtatccgctatggcacaacagctgagtctctggggaagattcgctctgcgttccctcagtggaagccaagcaacactactggtggaaatgccagtcaaatcactgatggtgcagcggcgcttgtgctcatgaagcgatctcgtgcacaggagcttggccagcctattctaggcaagtttgccggagcaaccgttgttggtttggaacccaggatcatgggaattggccctacctatgccattcccaagattctctcgaagttcggtttgaccaacaatgaagtcgacatttttgaaatcaatgaggcgtttgcatcaatggtacatagtccccttgttgttgtgtgcgggggaaaccactaatactcgacagggcgtttactgcgttcagaaacttggtttggatgaggctaaggttaaccctcgtggtggtgctatgtaaggcgtcagctccctgtaagaagattgttggctgactattatagtgccttcggtcatcccctcggtgccacaggcgctcgacaggttgtgactgccctatccgagttgcgacgaacgaacaaaagggtagccgtcacctccatgtgtgttggaacagtaagcactatcttctcagaaatgcatcaaccattcactaacggtctcgttgtagggcatgggtatggctggtatctttgtttccgaacattagctgcatgatatgatgtgtataatttgtatataccataccacaataaagtcgattattctagacaagtaacaaatcacttttagccccagatattgtggaggtggatggagatgagtgggggcggatccgtccgatcaagatagaactattggaagacagatatgcaactattcaagacatcaaaagtccaagcacagggcgatgcccagttcatgcaagcatgtcccgtaatgtcatcaatagacagcagcttatcaagatgagcttggtcagctacgtgcgccaagaggtggcttcgattaaagatagctggtccaatcacgtgcgccaagccattcgtcaactcctccatgcgtcccatgacaccatctccatcttcattctccgacgcctctcatcccctcacggctgtgttcactcatcaaagtggaagcacgcttgattcaacacttacagtctgcaaagtactactggagcatactgtcaacctttcgaatttttttccttctccaacctgaaatcatgaagctcttatcgcccgccaccgctttgctcttcctggccccgctggctgtcactgctacgcctgcttcgttctttggatacacccaggacgttattgcggagggagcacccgtccggggtgataacccattggagtactgttcagaaccctctggcgacattttagaaatcaattcggtggacttggcaccgaaccctcccaaggcgtgagtcactgatttctgattattgcagcgtctttacgctaactcccccaccatagtggtacaactctcaagatcagggcggcaggcaatctgcatgagcgaattgaagcgggcgcctatgtcgtcctggaagtcaaatacggattgatcaccctccttagggatacggccgacctgtgtgcgcagctcacaaatgttgacttgcaatgccctctcgaagaggggccaatggttttgaccaaggaggtcgacttgccgtcacaaattcctcgggtacgctcattatattctcaaagctttaagaatggctggctaactagcaatcgcgatatagggtcgttacactgtccatgccgatgtttacaccaaagacaacaagcgaatcacttgcttggatgctaaaaatatccagttctaagggatctgatctcttctctattacgctcacgactactcgtctcagtaatgcctacacgataagcaatttgctttcaactccatgatttgctcacgttctctcagcatcttacccctcttttcgttcttcaagccatattctcttcgttcttcggctgctacaggtctctggtcacatccattacacggtgcctgccatatgtatgagggctatattgttcgcggcgtttgggacatgctttatttgtttctacatggcctttgctagcatagtacgcaacagcatctttacagttatggtactcagcatttcgatgagtttttattcccgtttttcacttggaactacgcttaagactctccttgcgatccagcttagctcccttaatacagccttccgattgctttatttactggttgccgcatgaattgtattataattactagtatcagcaatcactatgggacgtagccatgatcttgcctcaacagacgtgctgagcgctcggagggatagaaactcgatgttaccttggatacaatacgattactcaggctgtccgacgaactgagcgcatcttcccgcctacagtttccacaaggtcgaaaccgagtgtcttgccaggatgtaaatatgctgaataatatataacagacgaacacattaacccaaatcaatctattcaccgaataatcgacgaactcgcttcaatacgctgtctttctcaggatcatatgggtggtctttgcttggaatctcaaggacggcagggaaggcttcggagtaagaatcgatgacgtgtcggatgcgctctgcgatctgtgctggtagttagtatattgcaagccgtgtgggaaatacttgaggacaagcaatcgactaataagcatacatgttgattgatcaggaggacagcgatatcgtttcgttcctgtgtgaagttctggaatgcgttttcgatagttgagttctctgtctttgcgtcaacgacgaggaaattccgctgggaatccggagggcctgtgacgtgctatgcatggtgattagtttatcgttcctaattttgacgagtaggacactcaccccgatcccggcgagaagaaggccagttacggagctaagacgagggtttggttagcgtttaatctcgtctttggagttcctggtgagaggttgagttactcttcgtcgccgatgacggcaaggaactgtcggtcctgtaagttggacagcgcagttagtcaagagttccctgcagctggagtgaggggataataccttgtaagccacggcacctgccgccatagtgattgagctgagaggcgggggatgaaaggctcagccactgtttcgagaagaagtcgagtctcgtataccgcgcaagcagagcccgacagtgtgcaatctgcagcgttgctaccagtggagcttgaccttgatgtaagcgtcgaatctatgccacggtccgccattgccatccagaacggttttagttccacctggttcagctcattcaccactgctagcgcggcttatataagccgagctcccccatcttttttcgccgtgctgttgttttgtttagtctactcccccaagctggttcaagctcagaaggtcgttcttggccagttctcacttaatctgagctttatactgcgtcacgctgtctaatatactggaatattgctttatttttccttcctagggcttcccgttatctgacatcaccatgccgcgacttgtacgccgccagccgttggccgagcgtatcaagtcctacttgaacccgctggatttcctgctttggctatgggaggagattgatgcgaatgattgggatcagtttgaaaagaattgggcgacgacgttgggtgtcattttgaacctcgtgtttatggtcgcgagggccaacacccgcacaagtggcagtcaagcttttgacgatgtgtttggcgaggaagtcggagtttcgtacctcagctggcttgtacgtcgctgctttcaatcctgatttaagagcgtagagactaattgccagctactaggcggcgttcattgtccacttcctgatctgcgcctccgccctaaacaccttctacaccttccagcgcaaacggcattatcgcatgtttgaagcctcgatcgacaaagcccccgctacgccgtctgctcaccgtgttcgagttgattctacacccgtgacggcctcgccgcttcgataccttgccaatgcgctttccgggtctgccgagtcgcgggctcaccctgatgccgagcgtgatgtttgggagattgcggtttgggatcccctgccgatttgcctccgtctcttctgtctcttcagtcctgggcatgtccttatctattggctctttctccctacacagctctcggaccctcgccctagtgtcacgatcgttctggctcttgtggtgacgactcttctgtcgattcagatgtcattcctttcgtcgttcttccagaggcaagccaaggattctcagatagttcacaaggaagtgttgagggagtacgacacaaaattcgtgcatcccagaacccagccattgatgagagaggtcggaacccaattctccggtcctaactcggcctttgagaagtacaacaaggtcgagacgtacacaccagccgtcgtcattaacagaggattcaagacgagccctaacccgaattacttaaggcatatcgatcctgatgggaatacctctcggaatagctccttcgcttctacgccatcgagaccacctcacctagtgcaaactccaaatcatttgcgggacgcttctccagccatcaaagctccgctagcttctattcgccagccccaattccgaccgaccccatctcgcacaggtgatggtggtagtctcggagtatactcacacgccaattcgcctttgcggaaatctacgcccggcaactttgatcgccgtctgcataacagtggggatttcttttatcgagaaagaagtgtacggccttctagtcctctcaaaaagagcaacatatccgctgctccaagtccagttactccagggaccagcaggagtagcctgcgtcgtgagactgggcacttctagttgaagaaaacggaaaggggaaatcgatattgcaccttaagctctcttctttgaagtgataatggcccttgcatgcacggagtactacgtgatctggctctggccctcgtttacgtataccgctctcatgtgacggcgatgccatcgtcaaaacgaggaatgtgacttggaaagctcgctctagccatcgtaatatgcagtttatgtttggcgccattacttgcaaggctaaaaccagcgttgacgcctgggattggacagtcacctgttttaaaagtggttagagcaccatgcctctggaagacatggatcggcgccgccatgatgcaccttccatttgagccaatatggtcccatgatgtagcttccatttcaggcacgcatcaaatcttaagatgggcattacacccctgtttggcggcacattctcaaccaggaaagcaaaccggagtgcattccaaacaccccaccagcctcttgacgtgacccggcacaagaatgttaggtttgcta

SEQ ID NO: 5002 - DNA, 3181 bp, Emericella nidulans
cgcaacgccactggaatcaaacgtacacctaaagcttgtcgtctctgagtggccagttgtagttgttgcggggttcacagttggctgcaagcctccgtcggcgatattctgaacacttgccatgtctgaggagttgttttggttgagtgacgggtcaattgacgagttgtactcgtagcgatcagtggaggtagacggagattgcgaaggggcgaagggctgagacgaggccggtacgtagccaggaggggcagcaggatacgacgattgttgaggagaaggatcctgcgggttaactaccagcgacggctgcggatttggggcaggctgtatcgcagagggtgttggttgcttgaagactgggtcgtagcctaaacattcacgcttgctcttaacgcagttgcggcagacagggtgtccttcgtcacactaacgggagtgttgtcaatggcgaattcaagatgaagcgcaagtgaaataaagcgtaatgaaaaagggaagccgaataagtacggcaacaagaaggggtattagaaaggtgggcatgggaagtcggggagcgtcaacaagcgacaataaatggcggggtttccggtggtgggctggacgcgagccgaagattttggcgacgcaagcgaagcaacacaacgcaacctccaacctcgcgcatttcacacacaccaactgcccttgctttgcattgcaaatagtctatgcaatatgtttttctataaattgtttacgtaccttgatgcgtcgcttgcgacatgtcaaacacccagttttcgtccgccgcttcacttctttcttgtgcctgctcgacaacattttgttcgcatcgccctgcagctgataatgcatctgaccgcctgagttcattgacggatatcccgccatgtactgactgaccgaagacatcggaggcattggcgatccaatgggagcttgcggaatttgcgaaggctggccttgcataggaggattcgtatgaggcggcgaggcactatgatggttgttatacatgtccaggggctgttgggactgctgatgcggttgctggtgctgctgttggggcaatggtgcctgtgactgtggcgtcggcgtatgctgttgtggtgaatagtggtgttgtgccggctgctgttgctcataatgttggtgttgctgagctggcgcgtccgaatgcactccgttcgaagatgcggggttttgaggaacatgggtggaagaagacccatgctgttctgtagtctgatcgtgtgttatcgacccattttcacctaagccatgcccagccgtctcctcgtcgaacctgtcaaatgaaaagtgagtatcggtgccgtgtagatcatccatagcgggcatagtcgtgtctagcggtggtaaggaggtgtcaataggcggtaatgctggtatcgtcgagtctattggcggcagcgacatatctatagctggaagggcagtatcatcggtcggtaagcttttgtcaatcggcggaagagaatcgtcaatggccgaacttgaaggctcatccgtatgcgtcttggaaggcattgtggtagcatcagcggccagctcagaggccggctcagctgccaactgcggctctcgcggaggctgagcctgctgtgttgtatctgccatcaagcttgccaatgctcttccagactatcccaaggcaagccgtggattttttgactcaatcggtattcagagcgcagccccactcaacaacagaaacgttcgataatcgagaccaggccgttgtccaacgaggtttcacgcgacagtgactatgccgcctagtcctgcactctcagtaaagcagttagtggtaagatctcagtaacaaatatgtgtagtctatgtttctcgagaaaatcgcgtaagccggcgtgcgaaaaggcatggaaataatccatgtacgttgggatcggagaattgttcgagaagtgagacgaccgcggtcaagtccatctgcacatgattatgggcgcagcaaccagagcccgcccgaccgtcgaataaagaatccttatgaccagagcacattgaacagtccataagctcgataattcttccctcatatctggattgactttgatcgcgaccgcgagaaggccgacgttagattttctttgcgcagaaaaccctccctccttctgcggtatgatggaaccggacggcgaaagaactgacatttttgggtacccagaaagccaccaaattgatatggaacaatgcgtggacgggggaatgtatctcgaatctcaacctcgaagtcggggaaaggtcgggggaaaagaggaaacaggccgttcgaggctcttttactcaccttgtactggtcagataagcgaaaagaagcgagccgaataactattccaccaggattcagtcttcggcatcaagcaggcaccgcaactggcgagtgaagaggacgggggggtgttgcgacgaaggattgttgcgcgatgaaaagaggagagaacctgaagattaaaagattggagcttgtccgggtccgccgatgaagagatcaaccaccaaattcctactgtggcaacatcaacatacatatatactactctctacagccgcgactagaaattatcctatttgactttcaactcaaatcatccccgtttattttcttcgtcagtgagttgcggcttaatgaatactcgactatttttattttttcattgcttttggcttgcgctttttgaataccacgccggggccggcagctgatgattccttctccttcactggcacttcatcactcgggttatcctaccttttggctttgtactccttctgcgctcgtagacttctctgacccgaccaccgggggtttcttacttttttggaaaaacccacaggcattatataattttcttattttcggccaggtaccgccggttgccaccccatcctaatacaaaccgtagctccctttggtttttttttctggtaatctggcgggttcgttccgcccagggaggcttttctcttttccccccgggtttatttttagacgttgtgcccgcaggcatattcgacttcgagtgaatccattcggtgctctgttggttaacaacgcctgggggggtgtagaatttttatttatattccccccgcaaacgtacatttattgtgttttaatcttacacatttg

SEQ ID NO: 5003 - DNA, 2254 bp, Emericella nidulans
actcagcgtaggctttacccagaccgtacatcggcttggattgtgagacatgcctttgcaccaccgcaactgagagtcgatggcatgctcgggactgtcttccggcttgcagcgcttacaggcctttaaccctgcctcttcggcctgggacggcgtatcgtagaacacaacattagcgcgccgtgctagccgagcggcacatgagggccgacagtagattcttgttgttatgacggcgtagacgaatgaggcgattgggtcgcggttgactactgcttgccagcggctagctgtggaggttgcaggggagccaagtttggggaggcgtgagattatctggggtgcaggtgtttgtgacatcgctaatgcggtgaaagtgtgataagcggtatgtagagttatcattaggagtatttgagcagtgaggtttcaacaccttaataagtgatgagactcatgagactcgtattcctgaaatcggaaccaccacgctgattggttactttgagagcaacttccaatgttcgaaaatccgacgtatcaatgccatttcaaagacacataggcgccagcaagctttgtgttaaaatcacgaggaaggagcagggtattcttgtagtgagatttagtccaactcttaagtagggtcggccttatctagcgggagttatgcggagtgcctagtataacaattccccggatacactacaatgtaaatcatcagccctggtcgaaaaagaaaaaaaagaaaaccttatagcggtattgttttatctcgagattatctcgaaaatgcgtggagttagctgaccatacgagaccaacgatatcagaaggctaggggcatcctcgccaatattattgctagaacagttgtatgtttgagtggtaagcatgaactctgtacagcctggcgcagatttttccgcagaggttgtccatgatatagaatggaaaaactttatttaattttgattaccgccgtgctacccatatcttagactgtgataccctataccgtgaaatgtacccaggacatgaggtttggtatcctgattattcaacccaatcgcttttgatcgtcaatgaaattgtttgtgggccacaaccttgattggctaaggacgcgtccgcagtcgcctaggtacatgtctcatagcaaaaagccttttcaacccgtcacaaagaaaaaaactccatatgatatcacgtttaatccttggtcttctgggtaccacggagcagaccagttctccgggcggcaatgagacccgctttttgaccgtgggcggcgtagcgggagatggtcgaggccttaccgatgtgctggtggttaccaccaccgtgaggctgtaaagaattcatgtcagatataatccagattccagcttaagactgggaaaaagagccttacgtgatcaacggggttcatggcaacaccacgagtcttgggccagctgttgcgcttgacagcaaacttgtgcttggcacgagaagcctctgttcacagatcattagcggttgttctccaacaattgccccagcctgcgtcagctaatgggcacaaatccgaataacatactcaggagaggcttgtcggtacgaccaccaccagcaacgataccgatcatgccacgagcagtgttcttgatgaccttcttagcgccggaggggagcttgacacgagtcttgccctcatcggggttgtggccgatgacggtaacatagtttccagaggtacgaccaagagccccacggtcaccagccttctcctcgacgttggagatgacggtaccttcggggacggaggcgaggggaaggatgtttccgatggtcagagcggcgttctttccagcgtagatgaattggccggtgtacatgccctcgttggcgatcaaggtctcggtgatgtgcttgaacttgtaagggtggcggaactggaccttagcgagaggagcaccacgaccagcgtcgtgaattaatttctttaacaacaccggagtgtatccatgtcgctcagcgtagtcgaggtcgcgtatctgggcgggggccatgttcaaaagggtgtgagccgatgaataaagtttttttatcagcaatcttgttccctatcaatattattcacgtcaagcggtaccctggtcgcactcactagaaatggagcctcggccctacctctggaaacaaaacacgccagccatgacggctctatgtaacgaaccgggcgggtaggatttaagcaaaactgcccgcc

SEQ ID NO: 5004 - DNA, 3176 bp, Emericella nidulans
cttttgttcggcagtggtacgagacttgaatgttttgacgaccctctaagaacagtctcttgatggtcaataagccgtagccaagcatcgacatcggtagggcgttctccaacaacccgtgaaagttctacatttcgctgtttgatatcccaatccgggtcttgtcgaacagtctcctcgccactcaactcggaatctgtcaacggctctaggtcgttaggcaggccctcctcaggctttagtttgccatgaatcgaccggtacccatatttctcatcctccgcatctgacccgctagcgaatccatcgtgttgcctccgctgagagtcagacaacggtacaaagtccttcgaggctgcgattgggtcagtcgcaaacgaggtcggtcggactcgcagtaatctcggccgtgatttctccgatttcgataataatttcttcgacctcgttttcgaggagtcggtgcgtatttgttcagatctcacgactatctcattctcgcaatggtttcgcggtcgattcgatagtttggaggaagttcaagtacacgaccttggccaatgcggttatagtgggggacgctttaacgatgtatcgtcccgtaccccaggtatatttgtccccttggggtcgatcacatagatgtctattaaatcccttgtcaggtcccctgtcggatccctcaaaacatcactcaacgtaggcgtaggtttgcgcacgtgctccttatcgcgacgtctgatctccttccacagatggcgggagtccctgcaatcaccccttcggtcgctggaccgcgagcggcccctatgttcgctggtacgctttgagcggtgttttgacagatgcctagatttctcctcagactcaactcgctcgcgactggagggctcggaagaccgatcggtatcgggcggagctggtcgaggcttgaagctggcgaatcgcggaatgcttttcttttcctggaacggcgtcaataaaaaaaaataataataagtccgcttctgaacgtacctgcgagccagatgtagccatgctcctggacgtgaggcattgttgggcgtagactatcttaagagttgtagataggcagctggagggtagcctggaaaaactccgctcccgcgttccgcctttcccttctggactaaaaaaaaagttgcggactttaaagatttccgctcgagcattcctttcaacccgcatcagtcgctatactgcctttgaattcttatcgagggatggacacattgctcgaattttaaaaaggatttgcccctcgaaaatggcgtcttccctcgccgcgcagttgtagaaattgcgccaactccccaaccagttgaacctcaaggcacagagacctgcgctttcaaagtttttgatatttgacaagcgggtcgccgggtccaaggattttaatacgatatccaatatttgctatgacggtttccgagaattatgtcagttggatttccggttcgcgcagtttaagcgctcgatcttcagcgagcaaagcaaggtccaagaccggacggagatgaatgtggagcagaacagaaagctggattctgtattagaggcttttttggcgcttgtcggtgggagactgcttttgagcccggccgtaaaggctgttgagtggctcattaggcgctttcggtacgctgacccgggtagaattgaacttttctgatggctaatggacatacagggtacacgagtacaacacccgctttactatcctcacatttttaccatactattccacacccgtattcctgaacctactcgctattctcccggacgaccttccgtcagcgctcaaggtgctgattccctataaacgaagcgcgatcaatcctgttcgccaggccctcgtgcagaacgccatctctaatcgagacctcataactactctcaacaactatgtccttcaagtttgccgtcaacgggcccaccatcatgcgctgttagctttctgggcgggtataattacggagggcgttgcagggatgttggattcctcccggtctggtcgtcgaaatgttgaaaagcaaaagcacgacgatattatcctccagatcctcccagtccttaatgacggattcgccatgaaggacgtttccgaacttgtgattgggtgctacatggtttgcgttgtgctcgcacagaaggctgaactccaagaccgggttttggacgggttgatggaggctgtcacaggatcttggacggaggagactatgagttccggacttatctgcgatacagttctagcacaacagaagcctgaccctatattgccgaagcgggtgttcaaggcgatcgtcgcatgaaggaccccttgaagcagttggccgatatctcaacagagtacaaaacctcccaactgcttcttggtctagttgctggctgcgttgacagcttgtcaacccaaaaagattccgcacggctggaactgctgtcttcgatgttcaagagccagctcttaaatgacgccgacacggcaaaggccatgaccttcgttctccaggccgcaagcgctgttggtggcacgatttctctggatactcaaacccaaattgcagaaattgttcaacatttcagccggtctagctcattgcagccggtcttccagaaggtgatcgacgagtcatccatcgatctcagcgtgatagagtacaacttgcagactgttattgagtctgtgcccgtcaacaaggccatcgaagacgtcgaaatggaggatgcagacaaaacggaaacagcaacggatggttacgactcagccctcgagtccttagcaaaagagagctcattcagcacctcgtttctcactgcgcagtccattccagtcttcgataagcttgttcagactttcgcattgtctgctggctccccggagagggtcagcgctttcggcgagctgccagttctatgcaaagctaatgccacaacatcaccccagtttctttccttttttgtccgagttttcaccgggatgtaccccgctggtgtcaaagcagctgcattgaagacaatctcttcgattgtcagctccgacgcgtggtccgatgttgacgttcaagcgctgctccctttcatgctcattgccttagctgatccctcagaaagaatgcgctccggagcaattgacgccttggcgaacattg

SEQ ID NO: 5005 - DNA, 4948 bp, Emericella nidulans
agcttggatccagtctgcggccgaagtacaggattgatgctgcccagctgtctcagagcaggtagcacccgcttagcagctatcggagcaacctcaatgggaatgtacttccagttagacaggaggcgggactgcaactttcttgaatctgtaatatcacacaagattagtcaatcattcgattatagatgcgccgcatgagttacgaaccggcaacgcaaatgaactccttggcttggagagcaacaattttttcctggaaaagacaagcaccaccgccctttataaggttaagctcatcatccacctcgtctgcaccgtcgaacgcaatatcaagcactgttccttcgggaatggcatcgaaatccactgctgtcaggccggccgagacgatcagctgcttggactggaagcccgttggcacataacacgtgccagaggtatcgattcccagctccttgatggcctcaacaacatacacaatagtagaaccactgccaataccgacaaatttggcatctttggggtagtggttttcgacagcggcctttccagcggcgcgtttagccttctcgataagctcggccattgtggctttgaagcggacggaaatcggggttattcttgtactagcacgaggactaagataggacggaagagaaagacaggagttggaccgaagccggagactgcgcatctattaatatgcttgtggattctgcgaacagtccgggggagaggtgcccggtgggggtaagaaggtacccctccgaagcgacttttccatggccactcaccagctatcgaagggcaatccggggacaattctcaccatgtggtcgaaacacagatccacccgcgtatactctagactgcaagatctgcccttatggcatagcagccatccagtagtagcagtcgttacaatctcggcgttgacctcgattcgaggccaaaacattgatggtggggtgctttgccgccatagatagccttgtagccttaggccaatatattgtgtgattacttcacgtgcattgacccggatcatcaatgatgcttgtccgaggagagtgcatttacgtctacatgaccaagatcgctgctgattttactgcccgtttctttcattctgtcttacattacaccctgggttgaaatgacatcggagtttccccacgccttaacagggccctcgtctaaggagagaaaatacgatcgccagttgcggctttgggctgccagcggacagcaagctttagaggagtcgcgggtgctcttggtcaattcggacggaccgtggggcaacagaagcacgggggtgtccggcgtagtgggtgtcgaaacgctcaagaatcttgtcctcccaggcgttggaggcttcacgatcgttgaccctgctgtggtaactgagccagacctcggggtaaacttcttccttgagaatgaaagcctgggcaggtcaagagctgaagagacgtgtcgactactgaaagagctgaatcctgatgtagaagggagctttcgaaccaaggtatatctgccatgtagggacatgtccgcaagccaaactcctcatgctaacccgtttactatcagcctattgcggagatacttcaagaagagcccgggattctggcacaacataaactcattctaatatctggccctatagagcattcatcactgcgggccctctgcgatggtgccaaaaagctagcaatcccggtcctctacacgcggtctgttggattctactccacgttctctctccagcttcctgctgtgtttcctatagtagaaacgcatccagacccggagtcaacccaggaccttcgtcttctcaatccctggccggaattgactgcggctggtgctagtatcaggaacttggacagttttgatgatcatcaacatggccacgttccatacgtattattacttcttcattatttggaaaaatggaaggaaactcataacggcagcgtaccctcaaactataaggagaagacggcatttagggacttcgtgcggtcttgcgcaaggacaaataattcacaaggcggggaagaaaattatgatgaagccgttgcagctgtgctaaaatcgcttaacccattcagtttgcggagttctacccgggagatttttgagatggaagaatgcagacaattaagcgccgcttcggccgatttctgggtcattgcatcagctgttcgcgaattctacgaaacacaccaacttctccctcttcctgggtcacttcctgacatgaaagcccagtcagccgactatgtctcattgcaaaatatctataaaacgaaagcaagggaagatatcgcagaagtcacggatattatcagaaggttagagtctcagttgggccgagccgccagagttgatgataaggatatcgaaatattttgcaaaaacgcctcccacatccaggtgattcgtgggcgtgatattccacaagtggatggtggtgaagacaccaaaaagcgtctacgactcgagcttaataacgacgaatctctaattcccgtttacctggcttttgaagtcctggatactgtcgtaaccgggattcaggagggaaagtatcaccaagacgccctggacgatgatgggatctggtcttccgaaattggtcgcattctcgctgttattgcagcggacgctgccgttgacgaggcccgaaatcgtgtccttgacgccgcacaggagctgcggaggacaaagggtggcgagctgcacaacatatcctcccttactggcggtttagtggcacaggaagctctcaaggtgctcactaggcaatatgtacctttggataatacgtgcatcttcgacggcgttcgcagcagcagcgccatgtacaagctgtgatgggtaatgctgggtaaaattgccgggaaacgcagagacaatactggctatagctagacagctttacgatacgtgtctacgaaagaaaatataccacaatgacgaatatctctaaatagaatataatcgtagcatggcggggtatacatccctttggtattacagcggagggttcgtgtctgcgctgcggcgacatcagtagttgcctctttcgggctagtgcggagtcggaagtaacgccgtggtgtggaggaatgaacatcccagacaacccccgacttcaacttcttccagaatcgcaacctctattgacgttcgatacgtcaagtatcaacactccttttcttcagaggcatatggtcttctgaatagtcatatatcatgcatactcgctgactgtgctatcatcgcgttccccggcatttcaccccggccaacgccatcaggcaccgtctgtcggcttgccttgggttataaaatcgattagacatgtcctcttctacaggtaccggaataccttcgactgccatgaatacttccgcacattcaccatctgtatcctccgtgaatctatcttcaactgaaagtgattatgtcttgcgtcttttccgcggccttcgacgcgcggaatcgtatgccttttaccttgtccccgagcgtcttttgaggataaccggatatcgtgaactgcaagcatacgtgtggaatacattcggtgttggacgggaaatgcatgcaatagcggcggcaaccgaagctgctggtgaagctgcgagagaggctgcggtagaggccgcagcccagcctgatactggcattcatttcacggatcttttacaaggtgccataaagttcagcggctttttctcctatctcaccagtcggtggtcgctcgcatgtttcacagtggtgaggattcctatgatttggttgactcgggcagaggttctaatttttgaaaggcgctcgtattgaacaggatcacgatatatgcttctacaaggagacatttacacttagactggatgagacgactggctttgcgcatcatccctattctactcttcgtttctcaaatacactcccttcttcgggcaattaaatgccaaacgtcgcctgactacccggaacttcggtatggtacgcccgggaagagtctgctcttggaccatgctggacaagggggattcctctattctctaagctctactttgctcccatgggagactgaccagcattcgtgcaatgccttgggcatgaaccgcgtgggttctgacataccaaacggcacgtttagactattatggccagtttttctgcgaatatgcttgagccatttcgtggaaactctatcaagctctctacaggggaggcctgttgtcgccgagggaggaatgtctatttttgagcattcgctctctttcgctgaagccgagtcgaccatcagccaatccttaggtttagggccctttagctcacctaaaccaagcacgggcggagacggcggtggtgagagctcacgctcatcgcttcatatgcttacaaaatcgcaaatactggaccgaatgaatgtcactccagagttgctgctgattgctctgatctcttgttgtcattgcctgtcctccaatgtgctcgatgttcttggcaagcaaagcagataccgccttgttaacaccactttctggggtctgtgttttatggcggcaatgacatggggccttgttagtggatctcccccaaacagtgacgggttatcagtgagatttccgaccgtttgcgttgtcggcttcataccgcatctcatgattctgtgcggtatcatcgtgtgtgccgggatctactcaatcgctctcgtaataactgctttctctttgccttccgatacccctcagcagttgactctccgacaaaggtttcaactggcgcatgaaaatatgcaagggtccaatcaggttggcagtgtgcgactgaatccccacgaggacttctatagtgcatcaccttaggatcggtaactctgccttaacggcagagagcgaagctgtcgcctttccag

SEQ ID NO: 5006 - DNA, 5691 bp, Emericella nidulans
tacgcttgacggtcagacctgaaactttttaaacttttcctttgttatctgcaaattgcatacccctctcctttttattgtgacatatcataccttgggtgtaccaagttgcatctatctgccatttgattcttgacatctagcattgcaagcgcgagcatctcgagttcagattgcatctaactgcctgaaatttattgttattcatttgatccccttggagtttctgaagacccgttggggtctggacaaatgacgcgaacgtccaactcctgttcttttcaaccttccccctttccccttgcattttaccatttctcgatacacgacatcatataaagattttaatgtggtttcaccttgtcacctctgcatgtgctcatctagcatgaacacagtccttggttggtgaaaggatgttccgtccaaaaaaagcatcaaaaccaggattctcacaaaactagcaaaaaaaaaatatttctgtcccggcccgaggagattgagcctgagggcgatccatcaaaagagggggatgagagggctaactgttgcccaagagtttctgcatacatacttacagagcgctagatagtacttagggacgatttagtcgatccattgaaaaggcgaattatctctttttcattctttttctgtcaaataaaacttggttgacacgtataacagctccgtagagcataccatagagaggtcagtcgacttccatgcacctcattttccgctttcaatcggtaacctgactcgagatggatatggggtacgttcgttgtgcataccttacatctgccaactcagcgagtctcgtcagtgcgcaccgtgcagcagtagctacttcgcttttgcattcgcatactagaagatgtagacgaagcaagttgaccgcgaaactggaatgtcgggaacaataatgtactgcatacctgacaaagacaatcggtgagagacgcaggttgcaggcttggacgaatgtcggagccacggacggaagcggagaatgtccggggtagccataactgcaagtctgacagaagcgcagtaagcgttgactggctcattggcagggtctttgctcaccgtctttctggagcggtagcgggacttctactaagtgccatcccgtaatttatctattcatttgaactaattatttggtcttggtgaattggagtagtacaaggattagttgccagactgtagcagttgataatatagtatccataatagctaacccgaaagtatatctctaggccggtggtaatggtagtagtagtgttctggtatagtacagtagtagccagtagtaggagtaaacagagacattcgtggacgtgacgaaaacctgatctgatccctgatccccagttcctaatccttttgcgttcgtgcgatgcagatcgatggtctttacccagctgatcaattaaagggacgcaatttggggtctgaaaggtgacttggaaatagacgggcgtcgtgaggatgtcggcgtagtgcagaatggactgatcacagatccagccgcagcctagcgatgccgaggggcgtcttatctccttccaggtgatcgagatcaggccagcgaatcaagaagcgacatgacaagaaagagacgaaaacagataaccacccacgctatgccgaacaagaaggggaaaaaaagcaaggtgaagtttagtatacaacaaggttggggaagcgacaggagaacggaacctggggtgacggactcctgagagtctgaggtaacacgtgtgctctgacccttggccttgagagaagaaagggagacaaacataaaatacaatgcaatgcaatgcgctgcagaccacaagaatgggcactttgcaacgagtaatgagggtcatgacaatcactgtacagggggaaataatgcggtcagtcgaaccagagagcgagcaccagcgacaaaagcggttagaccgacgctagtccacttcgggcgctggacccgtcgatctcgcctcacttttgtatgaagggaagccgacgaagctggaactagcaccgtactctccagaccgagcaggccgtccgcagagctgccagcagctaagcagggagggcaagagagttgagcaactctctacttccatcgctgtctatcccagtcagacggccgcgtctcatcatatgtctgaccgccgccgttgtggacgataacgggaagctgtgtttttcgcggaccggaattggaccctatacagaagtcgttaatattgttgagagtcaagcgtagtaagcatagtaagcatagtaagcgtagaatgcatacctcgtgaatcgtgtacgacgaccacctggtcactgctggtggtgcctttgctggacagggggtaatttgagtcgttgactttgatgggcattttgatgtgcagagtgaaaatagagcagattgagtggattgttctgaatgattgatggtggagctggagcttgaagggagtatatatagttgttctgccccaggatatataggtgacaggtcgtggcgcagcaaggctcagtgaggctcaacggatggtagaaggcgagcagagggtgagggtgcgaggggtgaataaagagtcaggctgacttggaatcgatctttgagatggtgattgatggtgaagtgaagggaggaagcagaggaggactgaggatccttttgtaccatattccggacgcaaggacgaagctgttcaaaagaggaatagaagcagccagtcagtcaataaacgaaattagcagcacagctcctccgtacaggccagctccagataccgatccggctggctggatgaccccagacggagtcttactgctctgcatcagtgcatcatcaacactcaatactactgctgctcgccagaaagagacaagtgtccgtctacgtcggtcggagtgtcatatcattccattccagggatggtcgagctgtcgtggatgttcaggagccttccttatcctccaaggcgaggcggcaaaccggatcatgccttgggtggtctggaatctgatctggataacgagatcgcctttgttgagactcacgaccccctgtcagtcggtctgctgggcttaaactgtcttgccacagtggcaatgacaagacgaggctggtctggtttcatctactcttcctctcttcccatctgatttgtctacttggtttctgctttgtctttgtccagccagtataataacgagcgacgagtacagtctggactcctatcgtatctaacgccttgatacacaatatcttgcttttggttggacaacactttgtaatttattctgcattttacaataaatacaacgtgtcacttgaccatcatctaattatagaccattcccaaacaagcatagtgaatggcccctgatgacataacccgcactaaccacattcggtgatccgtcaacaagccagttcactccactccactccgctccataccgcatggataactcggcttcccagctgccatcctgtgtggtgccatcacgttggcgaccaggttggctggaatgtccagcctagatgtcgggaaaatcaggctggcaaaagcaacgccctcgcctcgttcttgctctgtgatacgggaaatctcggaggtacatctcggtgctgctctcgctctctctcgctcgcgctcgtgccagtttaagctagccgtctactgaatgagatccttaggcagccgccttgccttgccttggactagctccatagtatgcaagcagtatgcttgctgacgttgactctttggtccccagtcccagcccctggggaaaatgtacggacggactgtggaggactccgtgcatgaagctttctgctgccggcctatcactataaggaatgggtaggagctgcgtctggacctggaataagctggaataaggcatggatgaacggtgtccatctctgtacgccgactctgtacagaggatactctgctcaggaactattatttaccgttccactctgtactattgccctcttgcgttcacaatgtagatctatacctcggtgtgtaggcaacggagtgctgtgctacgcatctctgtcttccgttaatcaccaccgagttcaaccaccccttagagtgatttggatgatcgcccacttacaatggggatctggagcatgatggtactcatgctatcttcctcaccgctccggatccccaaggccccaatgcacagactcttccagcgtggagttctccgtagtctagctccttcatagtccatactttgtacatacgtggatggtcgggtatgcaggttagccggtgacaatcattgattctagatcgtgggatccacacttgagtgaattgtcaaggggttctttcttgttttgtttcaggcacgctcgttccaggctactttctataattcgagtccggctgaggaccgagaactggcctgacaaagagagcggtgactgaggcgctgagctgagtaaggcagtgatcaagcaagcacatgaactactagagctttctagatacgtgtagggagtgaaccagctgatcatcattggactcgtaatattgagttgtctgcttacatacctaccgaagtggtatggcgcatactacagagtaaaaccatcactactagcagccgcggcattttctgccttcactatcgcactgcgtcatactgtgtacaaccgtgatcacagccgagaagagacaagtacgtagtaacaagggcactgctgcctgaccgccatgcccagctacgaatacccaagcaaccggcggcgccttccctcccccaagtcagtcgtagctacttgttcaccctcttcatccgctcttcccatccgttcatactgcgtcggatccccagcgtccgtctcgccggccctcctgactgagactgtaccatcgacattgtcgtagtgtggaacgtggccgctggtcgcatacccccagctccagttccgacggtcaccatacctggccgtgagcctgcacagccttgagcttcgctcgccgcagagtccttgctccctccgtttgtgtcgatgaccgtgtgcacctgactcttgagcgaatttgccttgtccgtcggcctcgaggatgcagccaaccatgtgtagcggtttgggtcagaagtttcgagagctgggcgaggtgggcggaaatgttgagttggtggtcgatgaccgatatactgcgttgggatggcgttggattgtcgggggtgcaagggtctaccagggtgatccagggcgcccgagctattcggtagaagctggacgagccccctctgctgtgttgactgggctgaggactggccaaagaaggacgcaatacttttctgaagggcggacggacgattgaatgcaaccacaggcttcgatttggccccgcgttcttcttgtaaggactgctcctgtttttggattgtcgtcgttatatactcacgggctgtcgagaacccggacatggtagtaggtaccatcaagctcgagccgttcattctatttgtcgaagacatgctcgcgatggatgtggttgtcgagtattgctccctctcgtatcggcgccgtttactgcttggttcgtcatcggtcgcccgaaaaccgtcccatcgaataatcatgcctggtgactctcgtccgtcctcagtccattgtgtaatagcaga

SEQ ID NO: 5007 - DNA, 5848 bp, Emericella nidulans
agtctggagttctgtatttcgtcgcttattctgcgaacggtttggcgttctgggaaggcagcagacaggttgcccgcacagtgaacggcgagcctggcggtgttactgtcggcgctacgttcacggtcatcttcattctagttgaaggtcagtaactctatttgtccgtttttcgagccagtactaacagctacagcgaccctgcttctgagtcaagtcgcaccattccttcacctgttcactgcaggagttgcctcgtacgagaaattgcatgcagacatcaatcgccagccgctgattgatggaactactccttcaggaagccgcctcacccaggctggtgggttcgagctaaacgaagtctcatttagctatccctcacggcctgaggtcaccgtcctcgacaaggtttccctcagcatacctcccaacaaacatactgcaattgtaggcctttcgggaagtggaaagtcgacaatcgccggcctggttacaaggctgtatgatcccacggaagggcaaatcttgttcgatggccatgatcttcgcgacgtcaatactcgtgacttgagaagttttgtcagtttggtgcagcaagagccgaaccttttggaccgttccatcctggagaacatcgcacatggtttggtcaattcgagcaatcccagccatacgcctctgagagcagcccttctcagctccgacattgcggacatcgctagcgaagttagggagggaaaagatttaatggaagcggctgagaaaaggggcccagagttcgttgagattgccaaactggtccagaaagccgcgcagctcgcggatgcagaagctttcattcttgcactgcaacatggatatggcacacttgttggatccagtgggaggttgatcagtggtggtcagaaacaacgaatctcccttgcgagagcccttgtcaaggatccagccgtacttattctggacgaagcaacggcctctctggattcgcgaagtgaacaacgtattcaaagggctatttctaacatagctagcggacgaaccatgattactattgctcatcgtctatccacaattaccaatgcggataatatcgtcgttatgcacaagggccatatcgtggaacaggggaaccatgcaacattgatggcaaaagatggggcttatgctgatctagtcaaactgcaaacgctatccactactgacaagaatgaatctacaaccagtgttgatactatcagcaaaactgatcagatctcgtcggacggcgacctcgagtcgagcagtcttactgacggtcccagatttatcgaggatgagaagaagcctgaaacaactgaaactccggttaccgactcaacagaagagcctgaagaacctgatacgccaaacaaatccttatgggctctcgttaagggttatgcgccgactctgaggccgcatttgctttttctcctccttgcgctgctgggctccagtattgttggcggtgcattttctggtgaagccgtgatttttggaaatactgttggaagtttgaatccatgcaacagtgcggattacatccgatccaagggaaactttttcggactcatgttcttcgtgttggcgatcatcgagttctttgcgaccgttggtagttggaccggatttggtgtgttgtcggagaaagtagtctacactgtccgagttctagccttccggtcactgatggagcaggatctccagtggcaccaatcgaaaggtcgctcaccacccttgctcctctcatacatcaccagagatggcaacgctttggctggactaagcggctctgtcgtcggcacactgttttcaattactgttaatctcatcgcagcgattatcttgacgcacatcattgcatggaggattgctctggtttgcctcgctctagttccactgctgcttggtgccggtcttatggaactccatatactcgggaagttcgaggagcgtcacgagaacgcttataccaagtcggtcgacattggtgttgaagccatcacctccatcaaaacgattgcatctctttcccttgaagatgagacactgaagacctaccaacggtccctgaagggtcctcgtaaggaaacgcttacagttactctacaggcaagcttttggcaggcgatgacctacttcctgggtaacctcgtgaatgcgttagcctactggtggggttccaaacaaatcttggcgggcaattatacccagactcagttcttaattgtggtgttttccctgcttgttagtgctttgctttggagtcaaatgtttgctcttgcgccagagctttcggcagcacgagctgcaatggccaggttactgggtcttattgagatagggtcagataagatgcaaggacacgtaccccctcgctcccttacggcatcgtcttcaggggaggaagaggcagctgtcgaaactaagcaacatgcatcagacagcaaagcctccagcgtccagcttcgcgacgttcactttgcgtacccagcccgaccagacattaaggttatgaacgggttgactattgacatcaagcccggaaagttcgccgccctcgtcggtcccagtggtgcaggcaagtccacaatcatttcactagttgaacgcctttacacgccgcaatctggctcgatcctcgtcgacggcgtggacattaccaagcatcgggatgtcggcttccgagactcaatcgctctggtgccccaggaaagcgtcctcttcgaagggaccatcaaattcaacattagcctcggcgccaaaccaggccacgaggtttcgcagggggacattgaaaaagcttgcaaactagcaaacatccacgataccattgccgcccttcccgacggctacgacaccctctgcggtcccaacgggagccagttttccggaggccagaaacagcgcctctctatcgccagagctcttgttcggaaaccgaagctgcttatccttgacgagtcaactagcgctcttgacgcggagtctgagaaactgctgcaggatgggctcgaaaaggctgctaagggaatcacagtcattgccattgcgcatcgtttgcatacaatcaagaaggcggatgtcatctttttgattgagggaggtcggtgtgttgaacatggcacacatgaggagttactggccaggtcagagagctacagggctaatgttatgcaccagactgtggctacatgatatttttcagcacaaaaagatcttatagagtatatagcatagatttaattgtcattagcgtttgactgactcttgccctccactttccaatctaagtcactgggtaccagactatgcctacccacttaaggacgaactgagctcgtacccacgaaggccctcatttacgtacctgctgcaactaagcaaaagaagggcaagtgtcgtggcgtttccttcgatacagtgcttcgcttgctaggagacttacatactttgctctatatacaacacttctcatactcaacagaactgcccaaatcgaaaacaacataagcatctcgagactgatcaaaagaaaaagcaagatcaatcaaccatccagtctaatgagcccgtcaggctcagcaaccaattcctccaccacaccgaccaactcagctaacgtgctctcgacaaactccctatctgattcacgtcccacgattccaaaatgcaacttctgatcctttacgagcgaaacaaccttgaccggatcaggagagtcaccatgcggattcacaatgtcgacttcacattcacagccagcaaacggcatagtgtcgaagtcctcatggtcttggtgatgaactagagagtcaaagaacaatcctccagtggatgacgacaaccaggatgtacagtgctctgcaatgcgacggaatcccaaaaagtcgtacgcggccgattccgcactctgggattgaatgaagtggcacagagaggttggcgtccatgactcgcgagcaccgaagggaacacgaataggcgtgaactggtacgttggccccactatctcctctgggttgtccaagagaatgttctcagcgtcgaggattcggccggaggttatgccgccgaaggttacgtccttttgcttaatagtgcgggagagaaggacggcccaagctgctgtgaggagagttgctgttgtgtatccaagagattcgaacggctgtgctgtggtgtttgctgggctggagaggaagatacctttttcggctttgtcagttgatttgccctgaagaacggagagtgtggaatcttggagtaggtttcgccagtaggcaattgccttcgattcggcggacttgttacccataatctgggaaacataggaagggaagggctggattgtagatagggaaattgggcgcccagagtaaagggtttcgaggtcgcggagaagacgcgggagggaaacaccgtcgtattgggcatgggagaggcggaggaccagggcgtgagacccagcggcgccttggatgtggaaaaagctgaggaagggggcgcccaaattaagaggtgtctcaatgtcagctgcgcagaggtttgtgatgtatcgtttgagatctttcttttctgtttgatgcctggtgataggcgcttcgagggtttgcaggataacctggaggaaagaggactcttgttcgatgaaaatggtgcgtaagatatcgtgagttctgaccaagtcattgcaagcgcggagcaatctctcactatctattccgctgtcaaagatgagcatggtatactgtattgaagtgcgcggtgcgtcgactgttcctttgatatcgagagcctgcgaatctgtgacggggcaaatatcctgaatagcccaagtcggatctaacattttcggacgaacattcccagacaagaagcgctccaggtcttggatggcaggcagagtcgagaaaggcatgtatgtctgcgcttgcatcttcttcgactttggcccttggcccaccttcaaccgcttagcagcatcgccaaggcgcatatgctggaaaacgtccgcgactgttaaagtatgtccctgttcacgaaggcttgaaacaagcttcattgccagaacggagtcacctcctaggcggaagaagttatcatcaatgtcgatgcgctcgccctcgattttcaaaatggcggaccacgcagcccgtagaatactttcgttagctgttaggtcggttttctggttgagattcttccaggcggactcaaagcctacacggagctgggaaattatttggcggggaatggctgaagagagctcgttgaggaggccgtggtcgatctggcctgtctttgtacttgtggggatcttgttaataacaacgtaggttgacgggaccatgtatgcgggcaaattgtcgcggatgaatttgtcgagcttctttaaagctaaggctaggttgacggagatggcggcactaatgaccggcgaattctgcgaggtagacgcactgggggttatgacatgctgctttgaaaggaggttgacgctggcttcctcggaaggctgctctacaagaacaacaagctcaggttcctcagatggtgcctgggatacggcagcagcggcgagaatcgtcggcgggagatgtttcttgagatgggcctcaagatccgcgatatcaactgcgtgtccctgaacccctacaacattctctttccgaccaacaaagatcagactgccatcctctcttaattgcaccatgtcgcctgtcgactgcactcttcccgtgcggccaggataagtagagcttccagataccaaccaggcaggggattcaacagtctcggctgcgagcacagcaccttctatcca

SEQ ID NO: 5008 - DNA, 4973 bp, Emericella nidulans
ccccgcaccatctcgttctaggtccatatcgccaatcctccaccccaagcgtcagggtcccaccacgcctcctccccctgcaactctctcacgctgggcatatttaaaccgcgtcgaggctgaagcaaaagaacggggcgggacaggcgcgaagttgaattttgaggagttttcgaggcgtatggcggctgatcgaggacgaagattggcgtttgtggcgagttggattgagatggcgagtttctaatagagtttacttcacttgtatgataaatatgtatgtacttgttgaccttgagtcaggaatcatggtgcatcggcaaaattcatgaagtaatatgagcataattgattatcaagctgtgccgtccgcatgatcgcattagagtataatgaacatgcctaatataaataccagctgaacaacctggttgacaaaacccagtagaaaccactatctaatcccaaaaccgaattaccccgtctaacccgcctgtgacaactttactcgtctcctgcggatgccaatccaaacaagtcgtggccccgccctccttcccccctgccatgatcttatgatacatcttgcccgttttccaatcccaaaagcacacgtacccggcactatcaccggacgcgataaactggccgtcaggagagatcgtcagatcaatagcataacccgcattattgtggccgcggaaactcttcttgcgattctgtcggaacttgtcgggtcgcgccgtaaacgacaatctggttatcgcccgattgaaaagcgacgtatttgccgttgggatgggccgctgcgcgcgtgagagcgaacatgtacggctctgcaatgaacttgattggcacggggataccgtattcccaggcgcgaagggacttatcgtcggatgtggagatgaagcggcggttttggtcgacgaaggtgagtgtgttgatggccgcaaggtggtggtcatattcctggacctgctcgccggtgcgggtatcgaactggacgatcttcttgtcagacataccagcgaggaactcgtgggagttttcgggattggggttgaatcggatgacatgaggggttttgccggttgaaaagcgcgagatgcactggcctgtttcggtatcccagagtttcatttgccggtcgtaggaggctgttaggaaggttttgcccgtgatatggaaatcggtgtcagtgatggcctttgagtggccggagaaagtgcggagcagttcacgcgagtgatacacatcccagatcttggccttgccgtcagcagcagaggagaggaggaggtggccggcttgagggaagaagcggagcgaggtgatggccttggtgtgcgacttccatgtgtggacgagtttcttggggacgtagttcttgatgctgcctacgggtttcttaagatcgatatccagatcctgagggacgtgcatgtacgttcggcccaggtagtcgtattgctctgagccgtggaattcggtcgtttcgacctttgatgtgtcgtcttggtaatctgttgcttccttgctcatggccggcatgggcgccgatccaacttgctcctgttcttcttcgtcttcgtccacctccacgagttcctcgtcgctaccgagttcttcgtcataaacctgatcgtcatcttggtacttcgcccaagggccgagatatgcgcccggaccctcgacaatgctcgaatcgccctttttctgtcgcttggctcgtaacgccgctgatgcttccttcgaaggcttcatctgcacgacatcacgaccgccaaactgagcagcatgatcaagattaccaacaaactgctctggggctgtaggattacgcgtataacccaagctttgatacgtgcgatgctgcgcagtgaatgtggactcgctgatggcggcggcctcagcgtagcctgtggggacatttttgcgcttgaggccgtttcctgcacctgcggatttgaaggggttggagggcccttgggaggggcgcgagaggtcatcgtatgtcgcgttgtaagtcaacgctttcgaggaagtattagcgagcatcattcgcatgtgcgattgatcctgtaggtctgttaggctgagtgtactcttgtgctggcaggattgtagggaccaaacctctgtgttcacctcaggggcggcgacgacttttggggcggacgccgctggaacagacggagtatcgtcatcgctagaatcgtaagcggctccaagtaatgcagccatttcgtgcaaattgatgtgagcggacgaagggtatgaggaacggctggaccttgacgtttgacgttttacgggtgccggtagcgccaagaacgcaaacccgccatcagccactcggccttttttaaggttgaatgttcacagctgattggagacatactgccatacaagagtttataaatgagattcagaactttagagtgttgttattcctatagagtattggacgctatcatcgcaacaccgctcgaggtatatacagtcattatttgaagacatcaaaagaaaagcaacatcaggttcaacagaggctgaaggttcatgacaagtacaaaacacagttccaaggaaataacaaaacagtaataatatgacacgtctcagcctctagtaacataagccaccatgaccgaagccgcttcaaagctcgctttcaccaaaacccaccgataaatcatagtcatgtcatacatagtgttgctccctgctctccggccgtaagttcgggcctgcccaagggcaactccgacgtcctgtcgtaccgggagaggggaagcagaaaccttctatccgacagttgctaaggcgtgcaagagcagcctagtacagctccgaataattcttcgcctccaccctccgatgagaccgggtatcgcgacgttattggggccggccatagcgcgttgcatcctgggtctcgtcgtataattagtgagactcgtcgcggatgagggccacaatcatgctgtagaggtagaagaagaacatcaagaggtggaaaccaagcttgataaaggattcctagagctcggaggtcagtgtccgtgattccccgccttatgacgtaaatggtaagtctaaccttcttgtgtacgttgagcttgcggaagatctcggtcgcatcaaggaggtgctggttgtcgtagatcctgcaaagtaagggagtcagaacccaactctaatgcgcgcagactcgtcgtcagactcgggctggaaggaacgcacttcttggcattaaatgccaacagcggcagatttagggcaatggcgagccagtagccgtttatcacgaagaggaaggtaaggaaagcgtggacaccagcttcggggatgatgtacgcgttgagacggttgcagaggtcgatagggttgatgtagtcactgcagcaccagattagcggaaaccatgaagaacttcctccagcgcccggttgcgctttgattgcttagaagagcagctggatttgaggtgtaaataaatgcttaccattcaagatcactgtacatgatagtgaagaagacctgcaagaacaggttgacggcgttaatcaacaccgccagaaggtagagccatgcttcaccggacatcttgtgtagagcgagaaagaaagagtagaataaggggaaaagacacagtcaatacagagcacaagcaccgagcggagaggtccgtaggatgaggggtggagtgggtaagggagcaggtgggagacgagcaggagggatttgggctggagactttggtgcggactttggggaaaaataggcgtgggcgggcggtgagcggcgacctagctcaacactcgaattttcaagaggaatatgaacagggataagcagtatccccttatatttaggtattattgattggaaaatgataatcaaaagtctagactagaaaccgtgagatgagaagttgttgacgttgcgtcaactgtcgagagctcatgatgcggggaacacgtgcttccatgcgagtctggcgtcttccactttctacaccggaaatgaggtactactagtttagtatgctgaattctggtacaaattgcaaagtatgtacagctccaacctatacttgtaccattagatacgagaaaacatcatcacgttgcttgtgggttcaaacaagcttcacccacggggcggaattatgccgcacgccattatcgccgctcgacaagcaggaaatgcatcgctatgtacgcaatcacaaggaatgctccggaaaagacagctagtccgatgacatccttccagtaggccagagtgtcgaatccgaatgcactaaggattgaagcccccggaacctcaatatcaagtccgtacttgtgatcgatcaatgtcaggaatgttacttcgttaacgatcaatgcttcaaacccgtaatggaagatggatagctaattgaaacagtcagtcacaatatctggaaatggggaaggagggaggcttaccgattgcaaccagagcgccgatggcgggatcgcatcatggttgagcaacagcccagcaaataggagactgaaaagcatgaccaagcttccaatcaagttggccacaccgccatcgcggaagacaatgccaatgaacaagcagatggtagcagcggctaggttgaagagaaccaataccaggatgaacttgaaaaactcgggccaggccgggattagccccgtcattggataaactatcacacccataatgatcggcggaatgagcctgaggggtacaatgtcgaacaccaccttcgcggcgtagtaggtcacaggatgataatacccgttagcacgctcccggacgaacagaaggcgttctgttgagaacacagttagactggtcaatgtgctgaacccaaacaaagccagtacgaagaagaaaagaccaagtctgttctggaaacccttgatgtcgtctgttaggccgtagaatagaaagccgcacagaac

SEQ ID NO: 5009 - DNA, 2279 bp, Emericella nidulans
agatctttttttttgcttcggctgctttggcgataagagtttgcacggtttgcacccgcccatctgtatatcacgtgattgttacgctttgaggcaacatctgggcaattgagtttatgacctcaacttctctcgttcaatatcaaccctggagaagggaaagccctagactcctgaactcctttgcctgggagtcgtcctgttttggtcagctactagtcggaacattgttcacctgctggacatcagcactattaccagaaatggataaactcatcacgaactcaacttgaatcgagcaattaggtgcctcttggaagaattcaagccccaatatctgcagcggccaatttgctgccgttgaatgtttggaatctgcgcagtgtgcacatgctgaagagatcaatcgccctctcgaggcatgggcactatgcaactgcactcgcagcaaccgaagcaaggggctctccccaggggctgcaccttttgattgcccggcgcaaccgctttattgaatcgaagcatcgtgacgctatcccagtgtttcctctaggggtctccctcttgattcgcgctctttctgcatgtctcattgcttctgtgatgacgatatgcagagaccctgagatgcacatcgcccacgtttctatgcagctctttgcccaatgggctgagatcatctgccaattactcaatcccacctttctctggaatgcaaggacagtggagagttgcccttcacggttcactcatgttccaaaattcctttggaagggggcgttgagcatgcctgatgtttggcgttctgtcagcacaaggccgtcagggactcaagggatttttgctaatatcgaccgtttcgtagtataaggtctcttcggtcgcatctacgttcgttgacccgaaatttctctacttcgggtttcgtctctatcttacgcacttactgttcgagcatttaactgaccttatatacttaatatcattgacttgcgttgaattcgccatgtcctcaatggactacgaaatagccaacccacataccaggccttattatggccatcagcgtcatcatactgtgaatgctagcccagtcccggcatatgtaaacagaagtgttccaacctatagtctcatgaaccaggagcagatgcctcagcctaatagcctagcttctccacgacactcacccaatattcagccttggaagcggcagcagccacaaagctctctttcattcatcccttcgacatctccgcgctttgaacaatccgaatatacaatgtcacagtccagacgcccattggaccgcggcaccgcttgtatctcgcccttccgttccgtgcgcaaaatgaaagagcctttccaacttcgtctgccagcatcaccatctgttgataacagttcactcgctcctggcgagtctcgagtgacttctcgccctactgaaacccggacgttgcgaccatggcggtcagagcagaatctcgttgcgtctggcctagacacattcgggcttctcccaagcccgccgctatctgactcgcaaccgtctcaagcatcacctgcatcgacctacttctcttccaaatcggcatctgaaaccgaggccgaccgagaaacggactgcagctgccttccacaagcagtatcatgcaaccactgcacccctcaaactcccgcgaccgaagtatccgttcagagccgcaagtttgaagcgactaatgtacacatggcgcactcaacatttgtcaggcaatgtgagttagtgaacgggcaaatcactgcttcagcgatggcttccggatgcatgtcaccacctacgacctgctcagatgtagactcgctagggaagaggaacttctccggttcatctgcagcaacgcaaaggagtagatctggcacagtatccagtgagggcagttgggttccaagcagcctttcatattgtgaaacatggcttcaaggcgcgcctatggattctgcagaagatgaagccggcaaatctacaatctcgaatcggagaaagtttcaaattgtccagaaaagcccgctggttccagattggaagcgtgcacataatgacgcggtatgtctatttgccgttcgttaacatcatgctgtattaaccctctataaggtccttgcggtgaaaagtaagatgaagccgaagctggttgatatatctcgacaatcctcacagcaatgagctactcgctccctactccaacgcaccccatacctgccactccagatcatagcctgccagaggtgtctgc

SEQ ID NO: 5010 - DNA, 7919 bp, Emericella nidulans
aggatgtcctttgcttcaatcatataggcatccataagtatagaatcgcgccatgccgtatagttagatcgaccattaagcagtattgatgcttgggtaccaaattttgatttggccaatttccgaatgtcttgtttttcgcgatatataaggtctcgttgttgaatgtctgtatttcgaccatagggagcattctgattgatttcctggtgtagttgctgcgtaggggattgatattgttgctctgcgcgtatctcacgcctgatcttgctgcgcaattgctgagccatctcctcacatagttcttctcatagttcatcccgtagttggcggagtaatcctgctcgcatgtcttccattgtggttggttcattaggttggtcttcgtccgtcgaatcgttcgatatctggttgtcagcagatactggtgtttccggctcgtatgtacgatgccttgttgtcatttgaaacagtacgtcgtttgacttggtgcctcgtgaggcttttggcggcatcctagcgaaaggtgccttatgatcctgattcaggggtaatccccaaaactgttgctaccccccctcgtacaggtccggggtgcctaaaattttgtatagcaagttgctcagagcatcaagaatcgattctgcgtatctatatctagcaaacaaatcgtattccttcagcgtaaagggctcatgacctatgggaagtgatggatggttgtccttttgggtggccggaaaggccagcctatctaaataactagcttactaaatgatgactaatcgaggtcgaaccctaggggcaggcggtaccggagggcagtatgccccgacagagtgatcaggtcacgtgctcgcatactgccagctaggacccccccgacattatttgttaatgtagtgaaatccacagttggtcagaggaagttggcatagaatagagagaactaagtgatcattgtctgagggagcaagctcatggacttagttacagaacaaaaagatgggagatacacgtgtcatcttatatagccccttaatattggagtatcaactactccaactccaagcaattactccaactccaagcgctaagccatattcataacagctttaaatagggcggctgtgcctgaaggcccacatctaacctacatatcccctcctttccccacctctttgaccaggtcgatatcaccttattatttctcatagtttcgccataactcaaacccatatactacaactccagagctagcttacgaagagttggctcgatatggctgatccactatcaattgcgtctggagttgccggcttgctgtctcttggtatccaggtcacccaatctctggtcaacttctactcagcgtataaggatcaggaatccgatttgattcagatcacgcaaaatcttggaaatcttttggttatatttacggcccttgatgaagcattgctaaggcgccggccgcggattgatgatcaagagctggttggcagtattgacagatcaatatgggggtgcaaagagattatcaaagagttagaagccgagtgtcataaattacaagagacatcaacagccggatttaagggtcaaatcaagtctgccgggcgtcgggtcgcgtatccctttcgaaaaagtactctccaaaagcttgaagaggacatcagtgagatacgggagaacctgtccctagcacttgacgtgctccagctcaaaagcaacaatacgctccaggaggacttgtcaaagctcaggtcacttcttgaacacataaatgcgactcatatctcgtctgaaatacgtagctggcttatggctccagatgcgaccagtgatcataatgctgcctgtgagaaacaccactcaggcaccgggacttggttcattgaaggccatcattataaaaattggctgatggagcgcaactctctcatctggataaatgggtttgctggatgcggcaagtcggtcatgtgttcaacagccattcaatctaccttccttgagagtcaatatcgacacaatgtgggcatcggattcttctacttttcttttcgtgataagtcaaagatcacagcttccggcatgcttcgagcgctattattacagctatcagcgcagcttaatgatggagagaaagacttgcagcaactgcatgcaacatacaggctaggaactccaccagtggaagcgcttctcaactcccttcagaatactttcagcaaattccaggacacctacattctgcttgatgcactggacgagagcccccgagagagtgaaagagagggggtgttaaaagcaatagagataatgcggcagtggcgcttgccgggctttcatcttttagttactagccgtgacgagctcgatatccgccagtcactaaagcccgctcatcatcaagatctcatgatgaggaatagtgaggccgagaaggatatagcaaactttgtttcttaccagctcagccatgaccccaaatttcaaagatggaaatcacgtcatagagagattgaggacaatttggccaaaaagtcacagggagtgtaggtaccgtagaatatcaaagatttaagtattttgactgatttatttacagatttcgatatgttgagtgtcaattaattgctcttaaacgtgctcggaatcagaatcggcttgatgaatgtctacgttcgttgccacgcgacctggatgagacatatgagcggattttgtgcagcatcgacaaggacgatgctggggatgtccaacgaatattgacagtgctctgcgtgtctaaacggccgctatcagtgcacgaattgattgatgctcacgcaattgaccttgcagagccgccgcaccttgatcgtgacggtcgatcatatgatccagacgatctcattgacatctgtcgtggtctgatagaattttcggtgatcgaacaagacaatgaaaagaagacaactgttgcccgcatagcacacttctccgtacaagagtaccttgagtcagaccgtgtgcaaaaagaggcgaaagcatttgcgattcacaaagaacgcgccaacattgaacttgctcagatctgccttgtctatcttctagagccaaagctctgtgacagtccactagatgagacaaggctcgctgagtttcctttagctcaatttgctgctatgcattggtacagtcactatagagatggttccggaatggagtcagcagccgaagatttaattctgaggctgttcaataataacgcaaagtctttcctgacatggctgcagctccatgacttggacagcatgcgggactgggatttgaccttgaggaaagatttggaagatataccatcgcctttgtattacgcagcccttttggggcttgaatcaaccctgaacacactcataaccacatcagccaataaatccagccacgaggacttcgttaatgttaaaggtggacgttatggcaatgctctgcaggctgcatcatatgcaggccatgacaagatagtgcagatactgctggaccatggtgctgaagtcaatgctcgaggtggatggtatggcaatgctctttatgctgcatcagctcacggccataaggagatagtgcagatactactggaccatggtgctggagtcaatgctcgaagtcgagggtataaaaatgctctttatgctgcatcagctaacggcaataaggagatagtgcagatactactggaccatggtgctgaagtcaacactcaaggtggatattacgccaatgctctttatgctgcatcatataaaggccatgaggagatagtgcaaatactgctggaccatggtgctgaagtcaacactcaaggtggacattggggcaatgctctgcaggctgcatcagctagaggccatgaggagatagtgcagatactgctggaccatggttctgaagtcaatgctcaaggcggagagtatgccaatgctctacaggctgcatcaaatactggtaatgagaagatagtacagatactgctggaccatggtgctgaagtaaatgctcaaggtggagactatgggaatgctcttcaggcagcagcagctattgaccatgaggagatagtgcagatactgctggaccatggtgctgaagtcaatgctcaaggtggatggtatggcaatgctctacaggctgcatcatatacaggctataagaggatagtgcagatactgctggactatggtgctgaagtcaatgctcaaggtggatgttatggcaatgctctgcaggctgcatcagctagaggccatgagaagatagtgcagatacttttggaccatggtgctgaagtcaatactcaaggtggatgttatggcaattctctgcaggctgcattatatgcaggctatgacaagatagtgcagatactgctggaccatggtgctgaagtcaatgctcgaggtggatattatggcaatgtcctttatattgcatcagctaaaggccatgaggagatagtgcagatactgctggaccatggtgctgaagtcaatgctcaaggtagagagtatgaaaatcctctgcaggctgcatctgctgaaggccatgagaagatagtgcagatattgctggaccgtggtgctgaagtcagcgctcaaggtggagagtatggcaatgctctttatgctgcatctaatgcgggctttgagaagatagtgcagatactgctggaccatggtgctgaagtcaatgctcaaggtggagagtatggaaatcctctgcaggctgcatctgctgaaggccatgagaagatagtgcagatactgctggaccatggtgctgaagtcaacgcccaaggtggagagtatggaagtgctctgcaggctgcatcagctagaggctatgagaagatagtgcagatattgctggaccgtggtgctgaagtcagcgctcaaggtggagagtatggcaatgctctttatgctgcatctaatgcgggctttgagaagatagtgcagatactgctggaccatggtgctgaagtcaatgctcaaggtggagagtatggaaatcctctgcaggctgcatctgctgaaggccatgagaagatagtgcagatattgctggaccatggttctgaagtcagcgctcaaggtggatgttatggcaatgctctacaggctgcatcatatgctggctatgagaagatagtgcagatactgctggaccatggtgctgaagtcagcgctcaaggtggacattatggcaatgctctgcaggctgcatcagctagaggctatgagaagatagtgcagatactgctggaccatggtgctgaagtcaatgcccaaggtgcagagtatggcaatgctctgcaggctgcatcatataaaggtaataggaagatagtgcagatactgctggactatggtgctgaagtcaacactcaaggtggatattatgccagtgctctgcaggctgcatcagctgatggtgatgagaagatagtacagatactgctggaccatggtgctgaagtcaatattcaaggtggagagtatggaaatagtctgcaggctgcatcatatcaaggctatgagaagatagtgcagatactgctggaccatggtgctgaagtcaatgctcaaggtggagagtatggaaatcctctgcaggccgcatctgctgaaggccatgagaagatagtgcagatactgctggaccatggtgctgaagtcaatgctcaaggtggacattatggaaatgctctacaggctgcatcatgtgcaggcaatgaaaaaattgtgcagatactactggaccatggtgctgaagttaatgctcgaggtggattgtatggtaatgctctttatgctgcatcagatagaggccgtgacaagatagtgcagatactgctggaccatggtgctgaagtcaatgctcaaggtggagactatgccaatgctctgcaggctgcatcatatgctggaaatgaggagatagtccggatactgctggaccgtggtgctgaagtcaatgctcaaggtggagagtatggaagtgctctgcaggctgcatctgctgaaggccatgagaagatagtgcagatactgctggaccatggtgctgaagtcaacgcccaaggtggagagtatggaagtgctctgcaggctgcatccgctgaaggccatgagaagatagtgcagatactgctggaccaaggtgccgaatccaacccacacaaataggaaggtttattcgttcttttgtatcgtcagcaatatccgtacttgctgtctacatgggcagtactgacgagcgccagaatcaagtgcaaacgtgagaaatttcgaggaagatttaacccgtcgtgagtgcctttccttgaaccaagaatgttaggtacgatgtcgactgcgcacggcctgccactgagtctatgcggattaaggcttcctcagataacacctttacctgcctgttatatcacgttcaatggaattttctcctctttagtctgtatctaagtgctgatagatagttagtgaggctagttgtgattgaatacacattaattatttaagtgctagattgctagccaccattgcttggtaaccccgtagagctatagttatatgaataggaacaatcttcgtagagtgacgttgagaatattcttaattattaagataaattattattctacctttctatattttatagctctctaatcttcatgttctgattcggccgcaccgccggtgctctgacatatacgacgcttcatctgagtgggctaagcgacgttcttacttcgagccatccggatgcgtactacgggcattacgcgggggacgtggattgagggagtcaaaggagaaggcgtaggcagcgtattatggggataatctgccgagatgaagagggtcaaggcgaagcttgatccgcatgatgtttttcataatctgcagagtgttcagccaaggtaataggtgcgttggacagactgggtcactacggtgggtgacggccctcaccgacgggctatggataggctcgctgtgatgcattgagtaaaactgtagcaggtgaaatgagagaaagtttccacgttttgtctgacgttatttagggactttcccgtcagtagcgaagatgatacgtaagaaaacgagaaaccctcgagtatgtatctggacaacagggctcaggctaaggtaccacagatgacaaggagctcagtgaatgttataagcctgccagagaacgccctccgcaaattcctcagtccaaataagaaactatcaatctcaaagtcaatttcttggaaaagattatcgaagcaaatccctggcggcgactccccgtctaaaactcgcgtacatacaccgacgcccgcactggtaccacctctaccctcgccagtgataacaccagcaccaacaccagtaccaacaccggcatcaacagggcgcgcccacccgcttatcctgctggcaagcctctcaaaggtccgtacgcactgcgacccttacgcacagagatgctgatgcctccgcagcgcaaggagaacagcctcctagctttctgcaatcgaattcgaaagagttcccggcgtatcatggcggcaaggaaactcgcgccggcgatgtgcaggaagtacaatcgataccaccaggggaggaggccgattggatggtctggttcgatggtttcaatgaggagggtgacgatctgcagggcggcttcgaggagtctggccacccattccctcagggctgcgtcaagttgtaaggccgcgtcgctgtatttgtcttgctgcggctgcgacgaacctggctggcttgatctcgatgcaggcatactccgcgttgtaactgctgacttggatcctagtattctatagtgtcacctaaatcgtatgtgtatatcat

SEQ ID NO: 5011 - DNA, 2634 bp, Emericella nidulans
ttatatgggccgtccgatcaattgatgaaattgtctctggagaagtggtaagaataattgtggtggttagaattgcggacgaaccaccttatctgacagtacctagctgcggggtacagaagtacagcgtcacacagagatatgacgagatagcgaaagagggcgaaagaggcgaccagcgcagaaattgttgcgggttctgtggatatggagcaaattaggcgagcagaaggcagaaaagaaagctgagacagggacaaaagataaaaattggagcctccgtgcgggcctggctgactgcggagtgtgaccgatctgggcgccagacgtactggttcgccgcgagcggacagctcagtcttggagatgcagagaataggacggttgaaatcggcaggtagtatgcctcgcccgagactgattcccggtaatcttgcagaaaaaataacggagaattgtaaattcaggctatcgcagctttgaagtgctcactacaccctattatggctgacgtcatggcaagaagctccaaacctatctacatgctcgcaatttttcagaatctaagaaataatgatttggaattaccactcctaagtacaatcagtcaactctgattatatagtacgagcatcagctcacatctagttccgccaaaggagccggtgacgcccatctgctgtcctgcacgtgcccgacggcctacatacatatctgctgtcacccgactgtttccttcatcctctcccgcttcttccccccttattcaacctcgcaagcttcaagtaataatgtgtatcgctctggtctcaacagcacatccagactactctttgataatcatcaacaatcgtgatgtactccagcctgacccaacccacaagcgaacaaaatagtgaccaatctaacagtgtacgcataggaatatctccgtcgcccaactgccccagcagaattctggccggccccaaacagccacatccttggcggccgcgaccttgcccgcaagacccaggggacatggatggggattacgcgagccggcaaagtcgccgtgctgaccaactaccgcgagacacgtcggacgccgcaataggacagcagtcccgcggtgccattgtcaatagttggcttactagatccaaaggagacggaggcgcagatgcagacgccacgaagacatacgttgaggaaatggtcgccagcccaacggcccgcagtgtcggcggattcagccttgtttgtgggtacgtgaatgagccattggcgattgtgtcgaacaggtcaagtaccatggaccaaattacatggattgcggagaagaaggggcagacgaaggggttgagtaatactgtttttgacgatcggagttggccgaagatcttggatggtgagaggctggtgggggaggcgctcaagaagcatgtagaggagggagagggagagaaagagctgattgagaggctactggacgtgctgaatacgaactcgctgcccgagttgaaaggcgatgcgacggcggaggattatttaccatatttcaggcagagcattttcataccgcttattgggacgagggataagacgggttcaaagtttcctgctgcggctgcggagattctggagccggggtcgacaccatccgtctgtgctgaagggcacagcaacggagtggcattggatccagcaattgtgaaggaggccaatcccggaaacgatgtaatcgaccagtcgtacctgcatggtccatacgggacacagaaacaaacgattatcctggtgaccaaggaaggccgagtgagatactttgaacggaccctctacgaccaggaagccaaggctgttcctatcggtcacggagacaggtcgtttgaattccaggtggcgcgatgaaccaagccattggaacagctactcatgcgttcttcgatgtccatagttccctcgacttgtctcctctcaacaaaaatgatttatgggttacgggttacgacgagcctatgctggggacatttgtatatgactatggctgaataagcactcctccactatgaagcggctcgccaacttgcctcccttcgaggatcacagtagtcgccataattctacgtgtctatctgcgtcgccgcagatgtgttggttacaaaggctaccaatcggagatcaaaaccgggcaatactaataaaccacttccaatgagcctacagtcccaaggctctaggtccaactcgatcaataatgtttgtcttttccgaaaaaacacttctgaagagcgtggcttcgccgacaacacagagtctagacgccaccttacctgtcacaccaccagttaatggtgtaactgacaagcccagaaatgcgacttcttggccctggttcccaaacctgccgaagtataccaagggagagctcatgcctcactctgccgcatgcaatctgacaaataccccatccgcaggcgcaagcgtcaatgtcagcccatacctaatctccctttccgggaaacagtccatgattgcatcaaatctcttgcagagcctaacaatcacatatcccgcctccgtgagggcaaactgctgacctatgcatacccttggcccgccgttgaaggggagatactcccacccaacttt

SEQ ID NO: 5012 - DNA, 14643 bp, Emericella nidulans
ctgaaggcgtgtgaggtcggccagtttccgttccattgccctcgtacgcataagaagataaggaggttcgaatttgacgaatggctacgcagatcaaagcttcggctcatggtcacgaacattatcttgataatacgtcggcatgggaacatcatcagggacttcgacgacgtcgttcgacacactactgtcctgcttatcattctcagaattcgttgactgtgctgtactgtcatcctgagacgatgagggatgtagtcgttgttgcacttcatcgagcttcttctcaaccataggtgatgtcgggatctgggcaaattcatccctcatgacgcaggtctctagtctgaggttatacacgacgtaggtcataaactcggttatcctcttcacttttgcaagtgtatctgcatttcctccgcggagcactattgtacagccaagttcttttcggcaacccgagatgtaaatgtaagtcttgcgctggcctttgtagacgtaggtttttacatcgaaactgccacattcgctggttaccggggtggtcacaagtttatccatagaagtgataattcgggtttgcgtgcatcttgaaacagcctcgaggactgaggatttgacgttgtacacagttgcaatcccggcgcggtctagtagttccaaagccaagccggaaacattcttctcaaccagcaataaattaggccgtaatgctgatattcggctaaccagattttcaaggaactcgcgctcttgccgaataacatgctccaagctcatgaactgttgctgatgacgtgcaaattccaacgcgaaggcgatgataagaatttttggctgaatgatacttcggggcatgctcttgagagcaacgtttttgctaaagaccaagccggagacgtatgaagtatcgccagggcgtccacctggtattttctttaatttgatataatgacgaatgtccatatcgtcgccgttctggactaacgggtctacttcatcggctgctttcagtaatattggaagtagcgctgtctcccagctgcgagggtgtggtacagaggagtcatctaggagttgtcgcagcagcttacgaacatgctgcaaactagctttgcccatttcaactggtggcgcccctgagcctcgcatggaggagcttctagtcatcttgaagccgctagaattcagagatgtaggtaaagcttgacccgcattttgaggctcgtaagggttgaatacagcctctttcgaagttcgaggggagtggcgatggatgctgctcgcgacgctgagattgcgtcggcgagaagaacggggtaaattggcagctctgaggctgttcatgctgctatcatccaattcgcggccggactgagcaaagccaggtggtactccggtccccaaacgcagaccgaccctttttcatagaggcgaacaagccaccaagcatggtcctttctgtgtcaacgccacttttgggcaatgaaccctcggttgctgctgaaagcaggtttggctgctcatcgccgctcgatgcatcgtcagagagatattgcgcgaggtcgggatcaattatgttatccttgtgaaaagcagaaagcctcgtttcgaaaggtgaatcatccccatgacggcgctgaaaaggagcccgttcatcgtgatagggtttgaaatttcggatgacttgctggcgggaatgatggcgtttgtgacctatagaatgggaccgaccgctcaaggtagacttcaagcaccttgatgatgtgggccgcgccaatggcctatctgggcttatttcaagaatggccgagcggcgattatgtccttctccggcacgtctggttgctggaattgccattgtaggcgttttattcggtgcattgagagattgagaaacgatggaggctgaatcatcatcctcaagaccagcgcgtgaagagtttccgatgctgagttcggacacgcgaggattggccataatggggctttgctcactgtccgagaattcagacgaatcgtcgtcatgaccgttgatcatatgctcacagggcttgcatacacggatagttcctggttggccaaatttctcgcctgagataaggagcgtacattttgaatcaaagatttggccacacgtgcgacagtggtgttttcgccgaaatgttgagaaaggttccccgcagtgaaaacagtctttcgcattctcatcacgcatccaaaaatccttacttagtaatctacttctgagctgggttacgacgccgtcgccggcatttggacggcggctctgatttcgagacggtattctgtcaaaggcagtgttcagaggcgtgattatggtcggggagcccatggtagtgttaactgatgagatctgtgacgctggataaccaggcagacgaccggaacgagtaatgggcggtctttccttactttcagtctgggcccgagacttgagtgattcttttgactgagcctccccatccataaacgacatggacgtagccatcgtggaaggcgtacgttcttcggtataagcgctgtcttctccgcttgtaaactgattgacgctatccgctccggaagccggtgcagcgatggtagtatcatgttgcattgatacagcagaattggatctcgtccggtcggtgggaacattgctgtcctgcgtcccatctatcgaccgcttggccttccggattgaggacgaaaagctcgtatccatttcacggcctgctcgtccatctggtcttcttgagctatcgcaaacttggcttccactgtgggtactgccggtttccgctcctgccggtccatcgtaaacattattataagacttcgcttgcagaactggggagtgcgttctttgctgactccaaccggatgagctcagtgacgtagttcgtggaagagaatcgtgatcggtgccacttgagtccagcatttgcggatcagtcgatggctgggtgttggatatgtcactcgttgcacgagggggctctttaatcgcattgacatgtacttcggtaacggctggatctacggcgccagaatttgcaagatggttgggtaatgagacgttatgaggtcgtgcagtcgcagatggagcaactgaggctttggacgatatactcccagctttggaagagactttggaggaccttgctgcgcctgacaccatggaaccatcatggagagacgggtgactcactgaggttggcgagttcactgccgagggtaaaggagagctggtatattgctgggtttcaacagacatggaatctggggtacgtttcgtcgtctggcgatccgacgggggacgcttcgggtcctctgcagattttcctaccccgctgaccataccgcgcatcccgccgactgaagtccgtattcgactatatagtccactcaggccgccctggatctcatcagatatgctcttgtcgtcagcagccgacgccggggtaggcgggctagcgaactcgttgaacacggtgagggcatcggactggtaggctgctgtatggatctgatccagagcggcgttcaagctgtcgcgttctgcctgagtcgataaagatgcgcgagagcttcgtcgcccgagtgggagaaaaatagaggatgctgatggactgggtgtcccatgagacggttggggagccatatccttatttttcttgtctggcatcgatgggaaagggcaatgcgtcaacaagcagagatagaggccctgtgaagaccaccaggtacgggttacccggtttgcgttagcacaaaggagcggtggcgaccatccaggctaatctgctgcggagacgcttcgcgttccgtgctgcatagagatattgtgtagtggaagatccatgcaggactgtgcttgtttcaagcctgagcactacatcgaatataactgtacggtaagtgctgatcgaacagatgagcgaggttcgttgaagaggggaagtgggatgagtgttgagctgggcgggttgttgtttctatcaagtccagcccggcctggagcctgagcgcctaatggtggatgacgtgggatgtggcaggtgactacctactgtggctagtaaatctgattgacggttgtggctgtggcaacgcgacgaccgcgtcgaacagtgtcaatcaagccgtctgttcggttcgagggcgaatgagcagcgattcactctgtagctggccgtctcctgactgatacagcatctctcctccatgaccaccaatcacaccgtctcccagctctcagacgcagaacatcccactgaaagtctgtgaccttcaacgcgcattctcagctagctccaaagaaggatatgatgtcgcaaacggccgcaaatgagctcaggacgcagttctggctaagtttacaatgagctcatcgaaccattggatctcactctttgttgaacattgcctttcgagctacgagaccgggcgacaccccggttcggattgggaagacgatgggagcaacattcggttttcctcctccgagcaacagcttgcacggattaccgaggtaggttacgggttttattattgcaggtatccagctgatgggtgtcttcctccgcagtggagcgaagtaaacaatgttccccgacccagattgagcgacttggatacgcaaattgaagcggtcttgtcaagtggatcgttgcaggagtataataaggattttccgaataaaccgctcaatcgggatcgctgcctaggttataccatccagttggacgatttcgagctggtgtacgaatatcacgccggaaaaccaaacgttcatttgtatgtcaagcgtttcagcatagtatgggctcgtgataaggccaaagagccgccgagggggaagctagtcacaaaaaaacccgcgcttataacgctcttaaaacgtgtgctgtctttgctcagatctgggcatcaggcaatcgaaccaagccaagaaacagtggacagtagcgggcaaaacaacggggacggcgatatcctcgccgatggccatacccaacatgtgcggcatcagttcatgtcccagttgcctcgctctcattcaaggtctcctgttcaaagcccaatccatgatgcggtgctcaactcgggtaagttgttggaacgtttagagcagacgcgatcctcaaatgatcgacagccgagtcgggatatatctttagatgcgcagcaattacaaccaatatatgggcctaatgcagtaagacaacgaaatacacatcatatgtctacaagcaatgtgagtcacgtgcaccctgaaaagcaaggagcagcagaaggagacagaggaacaccgacaagtgttagttccgaaccatttataactcaggctataaatcgtccatgctccgaaaaggcaaccagacaaaacttttcgccgcaaaaagcagagcggcagtcaccaagaggggcagttgagaggtcaggatactcaaactcgcctgaaaggcaaccacagtctcagcttcaatcttgtgaagatggcattcctctgccggctagccctgataagaatgcgaaggcaaaaattgccgatccgtgggaaggtatgacaggaatcagcagcgttgatgttacagtgcctgccgatcagaaagagcttttggactccaacccaacgccgtggtatccgcctccggatggatgtcaactagcgtcaggaaacgtgccaagggcgctgctggctgagtggaatgagttggcttcccgacggaatcaaattgaagacaataagccaaaaactgtggatgatactcgtcctagcacgccggttagtgagacgtcttctgagtcgcttgcagattcttgggttgaaacgcccaatcgaacacccagccgtggcgtgctgctgccgagggatagtagtccgctcagagataactccgtgcgtcctcagagggcgcagagctcaggggaccaacatagccttgaaaacaacacagactcgcatatgcagatggtcgaggaggaaccagtgtccgagcttgatagaaatacagacccgatatccaaagcctcggtagctgctatggctgagccaaatgcgaaagccattgcgccagatatggtttgcgatgatggcggccatgttttagaggacacccagtcaaactcgaggatggcatctgatgacagcaattcgaactcaaagataaacaatgcgccaggcgccaggcctatcgccccaggcataggccacgatgacgggcattataccaatgtcaattctgaatcacagaaggaccctgcggtagatgccgggccaattgccaaggcccaggttgacaagggttatcaatcggacggcagttctaattctgacgattccgagaaaaacgaagctccagacgttgaaatctctaatccagaccctgctcttgggggcgagcaggaatctgaaagtagttctgattcagaaatgagcgtggcaattccccggccgctaagtggtagcacgcaacaagagacatccacccaaacagtatcaagcccagagccgtctctttctgaattcgcggggcaaaatgttcaggtggtggaaaccccagcggttctcagcaaatcgcgtcccgtactgtcgggccaggatgcttcaagaacagacctcactgaaagccagtctcaaccagacaaatcctcccaatcacgcattctcaacacctacgccagtcatgaaggagacagcaatggagggacatcacaatggaactccatgtctctcccagcaagtgcgccagactctttaagttgtgtacatgtaatgggcaccccgttgagcagccaagtctcaccaacgcaaccaactccacggtcaccatcgaattctatccatacatcgtcggggccgaatgttgtcgagggtagtgtacctgctgcttctttataccaaacccagtcgtccaaggcttcctcatcccatcacgaaccgcattcgtcatccatgttgtctatagacgatctcctcaatccaagcatacaaagctctgtccaaggcagctcttttagacccgaccgcacgtctccactgaaacgccttgcatctgaaactgacagcgatcgcggctcacccttgaaacgaagcaaattagatattaagcctacggtagtcaaagcagaaggcggacttgacgagactattatcgcccgccaccagaactacatcatcaactcagcacagtccgtcgaagcagcagggatttatgaaaaattccgcggcgactacccgaattatgccggtaattatgaacactttataaaattgtgttccaggttgcggtcatttcgggaaaggggtagtctacaaaggtcatttctgtgggatgacttcatcatcaaaaatcttgatacttatccttcctaccttgcggagtgccactacaaccacatcaagcccttggaatacgaagagtatttcgcagagaccttctcaaagccaacttataaaagacgcagcctcgacattccaggaatcaacgcgtgcgcggcgcaggttgtcaccatcgatgagtctgtcgagtcacgggagccggacgacgcaaaaacgtcattcacagcaagtctcagggagcagctttcgaaactccatactcattcctttgcggtgcaagacccaacgtctcggaatgcagtatctgaagatggtcaaaacgccgcagagtcagattccacatcgcaatacagcattcccgacagcgagcccgctcgcgctgcggcccgggaacatgacgatgattacatgaacatcgaccacctacaggagacagatgacctgcatactgtatgggaaaacagcgacgaagacatggaaaacaccggcatggacgttgatgtcgatgatacgggccacgaaacggcgagcgttgagctcggcgacgatgagacccctactgctcttctaacccctgcacggcacaggttttgctcagagccccaacctgacagcctagtaccggacagaaacaacaagcgcggtgtttcatcgccatcgacgtcaagacgaaacaggctcactatccatacaacaccagagagatcaactttaggcatagcctccaaggcagcctcggacgaaagcgttcacggagacgccaagcacgcccttgtccccagaaacaagtctcttacaagccaaccaactttagagacggctatagacgcggcgtcaggcatgatcttaaatacaagcactggcttcaaagcgcccagcccaaacaaggacaaggagcctgctcatgtcttaactccaaagcgaaacaagttccctaatggccaggttgtagagaccccaactccaggaacaacgtcaaaccactccggccgaggcatgatcgaaactgttatcgagaacagaggctcagccataaatgcagccgccaattccaacattgaagcacaagatactgagccctaccccggtccaagcccaatccggaaaacccatccagcactccggcggccagagagacctacttctgcttctgcaggcgcttcagtcccagacaaggaccacgatgatcatatcggtatccataatattaacaatacaaatgacatctcagaaaccgaggaagtcgctctctccgcctcacccgaccccaaaggcaagggtaaatcccgccaacaagaagcagaagatgaaagcgagaatgagaactggttcacctcactccggcatatcttccctcagagaaaaagtacaaaacctgtctggtccgacgatccccacacccccttaaagcagtgggcgcgcgcagaccagaatgtccttctagtgcgaaatcagcgcggcggattgaatgttcctgttgacgagaggggcgttattggtcggatcccgaggaagacaggactgaaccagggcagcgagcatacctagatttaagcctttatgtgtgcggttgtgataggagaagagaagatgcaagacgacgatagccaatgatatacggagtaactctggactatctggctatatgtactgaaatgataaaagcctgcgagccattatccatatgcagatgcgtatgcttattcctattcagtttatatggtattgtttatatcgtcatgcatgtctactacttagatgtgttatgtctttcttccggcccctaagctatgcatcattcccgtttcttcccgtagaccggagtgagggaagtcgacatagcgggcgtgtatctctattggggcattgcgggttatttatacgcttacttctgttctacttgatcgtgaccgggtggatttcagttctgatggcgttggcactgtaggagtgagaggaaatgaggtatcgcaggcgcaatatagactactaatgctttatccatctgtgaagttgataataacttaatatacttgagatagctacaatagggaagatatgcttctaatgacttgttcattctcagggtatcgttatcataaaaaatctatctacatgccaaaccatgccgagccagccattgacgaatagatagataataaaacaaaaatgaagaagcctttccatatccatatccatatccaatgcaatcgaagcatattccaggtataaatcaagtcagtgcaacttgcataatgtcgtcactcttcactcgaagaggaatcgagccaaagataattttctgcttgttttcttatttttgtgttttagacgtggcggtatggctcataggcggttggccgctgctgcgcagagtagttaggggcgctggcgtggaaaggcggttgaggcgaagggtagccttcgccgacgggctcgtaggtgtaaggcgccttctcggcagtgatgccaccacggttgcggccgtgacggtggttatatggcgagcggccggagcagcagcaggagctgatggcccagaacaaagcagcagcaagcgagaaagcagtggcgagccaggtggcggcgtagatgttgcggcccatgtgtccgtcgatcccgtacggcttgatcttgtcgttgaagactccagcgataacggcgaacatggcggtcgaagtagccgaggcggcggcggtgaagaggaacgctgcgatggcgacgagggtcgtcacacaggatccccaacggctgaagatggccgtgataccgaggaggatctcaagacctgtagcggcgaaggcgatgatataggcaatgcacatccatttggagacgttcttgtacacattcagtgcatcctggaggtcgtcgggaatggcgttctgcaggccaagggttttgagattccagacttcaacggggtcgaaccagaactgtgcttctggagaagagcagttggtgacgcggtagtcgttgttgttggtgacgttgccctggcagtagccgaaaagaccgatattgtagaaatcagggatgttgaagtactgctcgacttcttctaaagcggacccaagatcgccatcgtcgacggaaatgttcagatcatcgaggacgctagaaacggagttttgtataggtgcggaactattcagatcttgcagatcggcctggaaacgtcagctgatgctcgcccatcatcaacaaatcttgagagtaaacataccctgaaaaagtagaggtcgcgaagagagtcggtgccattgtcagtagagccaaggcccacaacgataagacatattaaggcggcgatagtgaggacgtatggagtgaagatgcagatcatgcgaccgcctttacccatcttgagagctgaatttgggtcggagaattaggcgagttttgtgaggtcgatgtagggatgaggatggcaggcgtgaacagtgatggattacagatctgatagcgagaagagggaggatcaggatatttatttatgaggctggaatgatgagctggaaagtaagaggcgcagtgagcgacttcgcctctttctaaattaagccaaaacaaatatctgtggctgatcgtcgtttacactaagccgtatttggaaataccacgcgtcactgacgtctcgctcgctctaagtatcagttgattacagagtacagagccctgggatttagttgccttgctctatagcttagatagagatatctagcgctaactattctgtcaatgtaatgggattggcctttactggatggcagccatgaatatattccatatgaagtcagcaatgtactagagtatttacagtaggcttcactattccagtcttggcatgtcccattgtccacctgcaatgtcccccccacacgccctggtccagagtatggcagaagcttcgtaatccccgggcccgtggttaggttttaattcgaccgctcagccacagcaaattcttcatcgctccaggcatctatatttcgatcttccaactgggtaatgctcagataggctcatatatcgatagctaattttcgtctccggcaattaagagctccagtaaaccactagacagaatttgcagctgagctcagccctgggagtgggtctatatcatgccttattgcctggaatttcaggcatgaaaggtccagtgccgggttgtcctcccggcaacgccaaccactgacctggtattgactccaactatcatcaatttgttgagtgatctgcatggcgattattgtagtgtgattctatcttgagatactcaatatatttgcaagacgctgccgtgctccagaccgctgtttgacctgccaatccgcatagagtgtcacagggtcgctgctattcaagactcggacctttcaatatcacccttccagccgtcagatagctggaaaccctctgtagtatctaatctgatgattgaataactcaatagggccaaagtgggatattgtttaggtaggtgatggtaattacacagagaagaaagatatattgtgaatatatatatgtggagcagatccttttggagtatggtgcaatacatactatcgaattaagcgcaacgggtaacccgttggtgcttgaatacatcaaatttacttagagactacagatatccttgttaatcttagtccttgatatatgtgaaacaaatgcctataggatgtgcatcagtgttgattcggaaccacggcgtagtgacagccgcagtggaggcaccgttctttgctcttcgactacggacatgttgactgaaagaacatcttgttatacaacgacgaagacggggacgaagacgtgcatgccttggcccacaattcccccgtttcggcgccatcctcaacacaatcgtgttagtctcctgccgcagtatctagcgtccagcccgtcacgtcccgccccgacctcgaccagctgcctattccacgcccagagccattccccaatatcttgccccttaccatcagggtgaagtatggtgagaatgtagatcatagcggcgggtaggaggctaagcccatgaggtcaagggggtagcggagcaatgggtctgcctagacagggagacggagtaggcgagaatgggagctggcgaagagtacggctatgcataggagaccgtttggatatgggatcgttgttattcaataaaggttcacgattctgaaaccggggttataccgccataatcactatactcgcagtcagtccgtaatcaacgttcatatcaatatccagagtaacaaatctccgagacgactggctcaccgtaatagagcaaccgtactagagcaccaaatggcaatcaaatgccgatctctaccgcgtcgtcgtgagatagaagcgcgtgtacggacaaagcccgacagccaaggcaatcagtgccgcagcggatggcgcacgctgcctattgtgggtcggccatgtatattctaagctaattccatgacggggtacgttggacctacgcccgagcagatgtaagatgcgagatagacaaagtataaagtacggagcccaaaaagaattgaggatgctttctttatatactgaaacatttcacagagtagagtgcctatatatcacttggacccaatgatcaggacgaggctacaagcaacccatactcagataacttaattcatgtacgcctccaacgtactgagcatccccgtatacgcaatgccatccgtcggctccatgctgaacatatagtcttcccaccaaggcccagcagcccaccaaagcgcaccgagccaaacatcatcgttctccttcagcgcatccagtagactcttgaccgctgcgcggcatatctcgttattgccgcccgcaaattcaccaatgacaccgagtttgccgttgtctttcagccactgcgtcgcggattcaaccctctcggcgccgattgtctccgaaacacaggtctcgtgtgttccggagccgtcagtatcgaggtactggtgcatttcgtagacgatcttgtcctgcgggtcggtgagggatttcaggttgtcattgttgtccgtccatgtccaggcgccggtgtacgagttaccctcgacgaagatgtattgcgaggtggcgccggctgcgcggatgccgttgatggcggcttggttgagatccagcacgagggtctggtccatgtcgtggaattcgttgtctgccccagacgtgttagctttaagacccatgcagagagtaatatacaagagaaataaaacatgaccgcctaacgaataggaatgacatactggtatcgaaaatgacgttcttattgtccgcgaactcggccgctacgttcttccaccaagtctggaagtcggaggcgctgcttatgatctcgccgttgctgggtctattagtagatgcttctgtagggtaaaccaggggcgtacaatcggccaaagttttgggcgtcaacgatggcccatgctcctgcatcggtgactgcattgacgacctgattcgttagaagaagtcttacatcgacgaacagagccatggacgtaccgaagtcagatttttcaggtatccttcgtcgaaagagcccgtcatctcaggcgtcagacgctccataaggaagggaatgcggaaagtgttgaaacccttcgagatgagggtcaagatggattcagtatcggggaaggtgtagtcagtgccctgcatttgcgttcgtcagcctaggtcgcatccagatggacctctaggcatacccaaacaccaggaatacttttctcgccgaactcagcgccagcctcggtgactccaaaaactgcctagatcagcaagctacctcaacaagctggagaaggttgacgccgtacacgtaaaaccggcgcgcttcttgagctggggtgcagccatcgcggtaccagccgctacggcaaccaaaagagtgttgaccttcatattgaaagagagaaaaagaaagatcgaatgaatgaaagaatgaaagaaacgaatgcgtcaagcgattcgaaggagcgacggtagttgcttgaaaaacatggtgagggcgaactcgaggccgctttatataccgtaccgacttcagggtttccaggttgctcgtagatcggcgaaaagtcgaagacatcagacagccggcatgtacagttcaatacaagctccagaggctgtcaatctgaaaccccggatttcccagaaacgtggtggcgtgcggcttgaaacacaactaatgcaggacgaacgtgtccacctcggaaattgaccaggactcggcccgccggcagtgagga

SEQ ID NO: 5013 - DNA, 6129 bp, Emericella nidulans
cagcgtggttgccctgccgtacatcgctggcatgtctttgtcatgctgttcttagtatcgttagtgcaactcctattatattatcaatagagtacaatgtcacctaccaaccaggagagacgccactccttgtcttgcaagactgtacgcaacagtcaagccgacaggccaccgccaacaataagaacatcggtactaatacactgagacattgctttgaaggtaagaaccattaagcagcgaaggatgaatggtgtatgaggttccggttgttttgttgtccttttatattcactacctcccggcactgtcggatccgatccaatgaagaatcaacaagcctctacacccatggtcatcaatttgtcatttgggaggctcggcctttggaaatccttctcatcaggcgctgaagagagtaaaaaattcctatatggtatggtcatctggtgtatcggataggggtttctaacaatataaagagctgaaaaagcgtatcggaatgtaacggtaagtggatcgaccaagggcaatgcctctgccggatcaacaggatgttaatagttgatatcaaaccaggaccagtcaagcgcgacattgttgaagtcaatgtcttcaaagaggctatctgaaaaagtcccattcgctgccccattctcatgaggtccagacctattgttctctctagtctgaagcgcattcccatcacagcggtttgaatctatacctgttaacccagtcaatgcacgcagagatgctggcttaccacaaattttcagacatctggatctcgtatcgttcagactgtgaaagcaacgttcggccacaacgctgtaagttcctaggtagttgagaacccactggcatttttcccatgcggcgtccaaagcttcgcgggtgacagcctttacagcccgttatggaactcggcgagaatgaggaccaaccctgcagtgaaggtgtctaaaaagtaaatatcagtattggaatgagaaagtcaatccaatcacacgtacaaatacgttgtaaagccaaacacttgccaaatccgtgctacatgtgtcatgcacaagggatattagttcaatggcaggctgagcacacaagacggagcaattcacgttcaggtcggaatatattccagataaaagcggctcaattggctcgctctcatctccctttccaaatcgcactttgccaagggaccaagatagagccagcctataagctaaaagtctgaggtttagaaatctttgcgcaaatcagtctaatcctccatggaaactgcgttacttcccactcaccaactttgagcagacacttttctctcagtgacggatctgggaggtcaggggtcatgtcctcccaactcagcggttttgggacattcacccgaaattcgtctaggtccagttcaatctgagtaataaattggacctgtcggacactttgagccttcttatctgctgaacctcgacagtgatgttccgcctcgtcctcgtaaagtatgttgtgaatctttcgcagcaattcatgcaatttcaaagtggcaacgaaccactcaacgctagaaaatgttccagatggttgctggcagacaaccgcttctccagacagatgcaatcatcaactacttcaggcaggggaactagtgagtgttcagatgtcatcgccggacgcccaagcatagtactagttgctctaaattcggttatcatgggcccattggcttcagtactgttacttacaggtctaacattctacaaccgtgccaaactcgcctcctcatctgcttctgggcaaaggaacgatgctcgtcgccaacagtcgcatgtagaccgagcccttgagccagccgaaatgcagttccgatagcgtgcaaacagcggttgggagtttgcgaaccttggagataatgggctataaacagaacgacctgaactagagctaagtctccacgctcgaggtaatccacgtcaagagccggcttgcaccgatgaaagaaagcttcagacgttgtttggcgctcaacacacatcatttctgaaaattggcacccatgagcgaagacaatatttaaccgtagtaaaaggttcttgcgctaacggtggagtcgcccagcccgaagccagtgtttgtgcttgtgtctatacggtcgccagacgtccagagctgctgatacgcgaaagaaaagctttcttgtgtacaaatggatacagaacgtgaatcttggtaaagtagcagtccacgagatggtctgctagtgcgcgaggcggaaggagatccaatgcgatgtccacgcttcttgtattcttctcaatgaagggtatctgggtggtatcagaggctgcagaaggccccggagaaagctcaccagatttcatggtttcctgcagccgctgtgaaagctatggccgaagagtcaccaaagggccccttttgatttatcgtcatcaccaagaggacgagtagtaaagcccattgccgtgacttcaggctcgaactaatcctcaactggcacttgctcttgtgcctagagatcggagaagcctaaattgtttctaggcgttttatctaggttcgaagcctatcacgacatcagacataacgacttcagccatttcgatagcacacttactcgaaattctgaccatgttgtcatcgccgtaaacacaagtttctcgacggcgacggcgaagacaagtaccacatttccgccaaatcccatcacagcggatcttgtgcacacggcaggggttacaggcaacacctacccttctttgctttacaattcggccgacttggtatgagccactcggaaacattctcacagcagactcttgcctgcaattgtaattctagaagagtgggcagaggcatgcccaaaaagggctgtcagcttggattcatgactgtctaagactaattagtcatgacgcctttttggcttagcggtatattttctgataaagggaaagtcgcgggcttttctcatgcaaatcagcctaaccccaactcagactagtccatcacatgaccaagatacataaaatttccagcccgcaatcttttcttttcttttcccaactcctcgctcaaaggatcgcattcaaagcttacacacagagaattttccagttctctcctcttctaccaagaagagtcttgctttgggagaaagtccccggacaccctgtctttcgtctctggcgatagacaggcaatgcggaaacgcgccgccataaaagcaatttgatagcggctgactgccctattccctaccggtgctgagtgcgtactcgacgcacactgtgtggaaacaatggggtatacctctgtgccggagaggggtttattgggttgcctttcgtcgtgtttggatagtcatgcgattgctcagctactgagttagctgggtaactcaatggggctcattcttgaggcgaggagttcatatcttttgggtcgggagcttattgaaagcggggactggccgagaggtgcgggagcatatgctctgtcgaaggggccggactctttttcatcatcaatgtcccttttgataatccccctttacctttagactgtaatgtggttcgatgatgatataccaatcatagagtcaaggcctaaaactcctactacggtatggggtggttaacgataagcgagtgtttctttatctgtcgaacattatcattacatgtcatgtcgcttttaatcctctacctatccaatatgaaacacctgtacatcattatgccttcttagccgtagccgggacggcctgtgcgctgcccttgacttgtaaggccaggcccgtaataatctcagcaataactgtaaccgccgtcgcgcatacactgttccaaacctggacgctcaccgaaccttgcggagcgcgagggaaggctagcacccactccacagggtaaggaagccagccgccggggagttcaaagacaggcgttttcgagtatcggaattggatgaagatcttgagaccggtcgtgctgagccagcgggcgattttgactaaccagtcaaaggaacctttctgcgaggagagcttctggtctataaacgaatgaaagaataattagtccctccttacccacacacagaatagagaactaaatgagagtggaagcatactcaaagcctcatattcactcaacgccttatcatgtcggcgccgcagcttcgcccactttgcaaattcatcttgcgagcttgtattgttcatgtcccgcttgagctggacgacttcgcgcttcagcttggtttgttcctgggcggtttggtacagcgacgtcgggagcttaaggtagaggagccatagctaaggaaagcgttagctgcggtctcagaggggtagagaaggaatttgccataccaagttgtcaattgtcgccgcaccgatcgtgttcacgagaaaaatggcgatatggagaatgaatatcgtccaaataagggagatcatgattgcgaagcccaagtctcttgaagttcggatcttactgtttgtttgtggaggcacgaagacgaagcgaagcgaggggagcaggagaaccagccgtggcttcaaaggacaagcggcttcaagaaagagtacacgataacgatctgctaggtattggacgctgtcacaactcgcagcagaattgctggcagaggtattgtgagtagcgcaaatgacgttgtcacgttgccagaactgatcggatcttcggcgggcggctttttttgatctccggcgcgaacagcggggaacaaaccacggcaaacagccatgcttctgtctcaatgacagcccaatgtccgcaacaacccaacgcttttcaagagctcttccggatttttgcgaacagagatggccgagttcttgaattcgagattctcccgccggcctttggcccgatactcgaggatggctgctcgattggaattacgaagaagtgcctcgtgcaagcgtttgttgttgcacggagaatctttctaaattctttgatggcgaagtcgagctcacaatataccgatgaagctgcttcgacaccagtattggagggtgaaggcggggaagcggatcagaggcttacaatcgcatcggagatcatcctcctcttcgactgcgaacacttgacggcatgcaactggaggaagcgaaggttaagcgcgctgttcacctcagacctggagacgctcatccatgcattggataccgaactctccctcatgacgacgtacctttgctctccgctccatcggcacaccaagtcgccaactctgtggcagcatcgtcaatgggctcaaacgcatcttgtccggctccgcaagcccgactttaagggcgtcgaggatctttttcaagctgaattatcagtggtcctgcgagccggcgagctacatcccaggaactactacgcctttacgtacttgcgacagatccaccgtatactggctgagtctgggggcttgaaaagcgaggagtggcgggtacaatttgggcagagcatcatccgacctacactggattggtgccttgtccatccagctgatatatctgggttgatgtttctgctttatctgctagatggtgtgccaattacggcgcttcggctcgatactgtgggcaaggtcgcccagttcgcgctagatatcggctgggagggcgagagtatttggacgttcgttgaactggccactcgcaagttcaacctactcgaaccgctcggccaatcaccgccatatccatgggctgtcctgcgcaccgcctcgttagaggcaatgcatgttgaaattaaagcgcgtatatcatggcggacatggcttgagagagcacgaatttactgggccgcggagaaaaccccaacaatatagaaccatcctcataagaagaaaccatcgactcctcttcgtgcccgcgtttctccctctataagggataaacgttagatgcccagcccaattacccattatctaaatatagtgaaagacccgctaaaattaaaccaaacgcttcagatattcattcaaacgcctcgctaagaaatcaagcgtactatcgtcaaaagtgatattccatgccccagtgcggaaaacccaattattcccagctgttgtatacga

SEQ ID NO: 5014 - DNA, 760 bp, Emericella nidulans
acttggtacgattctcatgcttgcttattcctttctatagggggaccgcagcccatagacctcgtctacgtgagctcaaatgccacccgcctacctgcctactggtaacccgcgtcgcacagcaaactggcagactgcagtgcaaatatctagcggcatccgcggtcgctgcaagcctttgaagcacctacgaggtacggagccaatgcgaatagcgctgaagctgtgcgtcccatgtccactacacctttaccttaaacaaggaattatttggctcacacccccaaatcctgctggttgggcgatagagacgatgagaagcgatttttcgcagaagtaccaagaactgtagagggagaagaccttgtaagaaaggaatgctcgagtaagctgcgtagtgcgggtgttgacggaaattttcgtatttatcctggttttgagctgtaacagctcgcttaagatgttcgcggcgctgtcgattggctccatgtgccgtctcgtgatgtcgaatactatatcgataatcccagccgatgtaatgcccagttgatcagcgactcgctataaaggcgaagagtttataaagaccaagaggtcaggacgatggaatacccatgaccattgctgcttatttggatcatcccctatcctattgctaggccttgcctacaaaggctaagaaagctagtttcgttgattgcaaggccacagaccacgtagagtgatcggttatcgatagcctactccgcatatctggcgg

SEQ ID NO: 5015 - DNA, 2872 bp, Emericella nidulans
aggaccatgaagggtctaccgatgctgtttttaacagtcaactttacctatttgaggccgtcggtattatctgctcgattcccaccatacccgcggacaagcaagttctctacgcgcaatccgtgctgtctcctgtgtttgtggatatggaaaagaacctgggctcggccaaatcgggagacgcgcgaccgtgcttcagatacaccacgacatcatggcgcttggtacactcgcaagaggcttctcagactggcagcccggcactagctcccctgccacgcagctcccagcgcccgaggtctcagaggcgttcagccaggtgtcggaagccacccttgtcgctttggagtcccttaaggcttcatttgacattcggacagcgtctcgatttgcgttctcgcgactgatcggggttcttgggtcccgaatcctcccccagcttccccgatggattgatggtctgctgacccaaacatcgtcgcgggacgagatggcgctgttcctgcgcctgctcgaccaggttattttcggcttcaagggcgaaatctacaatatccttgatgcgctgttgatgccattcctgcaacgggtgtttagcggaatcgcggacccaacctcgggtactgatgacgagatccacctggcggagttgaagcgggagtatctcaattttttgctcgccgttctgaacaatgatctgggtgctgtcatcatcagcgaacgtaagttttcagctttgattgttccttctcccattttttatcctaactggtttgataggcaaccaacccatgttcgacacggtcattacaacaatagagcactttgccaaagacgccgaggatttcacgaccgccaagatggcgtttagcgtgctgtctaggatgggcagcgctggggtggtccggacatcgcaccagcagcctcaaacggcccctccacttcgcaagtcgcgcttccaggtttcggccagttcatgattacccgcttctctcctctatgctgggcgctccccgccaccccgtctttcaacgcaaaggacgcgcaagcaaaacaggttctcgctgaagcaggaggtctgcagcggaccatctacagcaagatggggatggagtatatcgaatacctgcgggaccgcgagctacctggcatgggcatgggagcagacctggtggaagagtacgtggggacactgagccggctggacctgagggggtttcggcagttctttccggtatgtttgcattaagcccgttggtaaagagacccgtcgctaacatcacacgtaccacctgcagcaattcatccaacgtttgagcgcatgagcattcccgtcatctatacacaaccgttccacctaacatttcctcgatttacttcccatttcccttggtttatttccccgcttccattctattagatatcccctcggtttggtttgatgactgatgtttcccttttcctctctccccaatctctctgtcggcggcccacctatcgtactgattctcgtacctctgacgcacggactgccatgatcgatgaatacttgggactcggataaaaggtatatagtttgggaggcatttgcatgtattggcgttgatgtgcagagtatttctcagcgtgagcacgagaaagcagataagtaggaaaagaagaataggaatgtatgtagtaagtgcgctagaagtttggaactcttggacaattatgaaacccgtgatagcagttggcagtgtggctgctgtggctgccgtggtagccacctagtatgaacttgctgggatccgtgcttggcggtgctttattgagtggagaccatagtggacctagtgggggtcgctgtcagcgtccatagcgggtgagagattcaagctactttaagtttgcgaaccaccatgatcaaggaacactctaggcgaacctgaaacccggtctctgctccagtctcttgctacctatcagcttatccggagtaattgctgtctttaagccaaacccgccctcacaaggctacagccaatcgcctggcttcgtactcggggaggctgagcttgggtgttgcagtaatgacgaggatccggacaagccggatgctgatgcctgaccgaagatttacaaggctgagggtaaataggcaactggtcatatgaccaggaagaaaagtgcgctggagatcgggaggtgatagtataagatactgctaacaatggatgattctacgtacaactagatagagcgggcaaagcatagctgagggagcaaacggatggggacgagggcaggggcagaaggcagcacagggactcccatgcaacatgatgacggcagctgcgcccactggcctttacccatgcttattttccttcacgttgactattactatatttttcggtctgtccgctggtgcccgtgctcgttctgatctgtagtccacgtccccgcgtcctcttccttcccattccagcaccgtggacgaccatcccatatttcctctatcctttccacgaatattcctagaccacaagaatgggctcctttaagaatttcatcgagcccggcggtcagtacgatcctcttcccatcgttcctgtcttacatagatgttgggatgatgttgattgatgtggatgtgaatgtcgatgatgttggctccggtgctgattctgctgacactgtcttcctaccagccatcgctgctgttttcacggccaccaccctatataatcgccgtcgccgtcaaccgtcgagcccctcagatcccccctccgccgaatcgcccttgcttccggacccggttgttgcgaagactcctgatgagaatggctactatcgctcagtcgagaacagtcgaaccgtccagtcacgg

SEQ ID NO: 5016 - DNA, 2844 bp, Emericella nidulans
acgccgcggcacttcgcgcagggccaaacgttaaaaaaaaaaacaaaacaaaaaaaaaaatcaaaacaaaactccggttggaatgattccagttctcactgtaaggcaataatacatatatctacaatatctaaatcgtattaccgtccaagaataatgttgtacaattcctaccatgagcgaaatcctagtcatcacctgcccaagcggcaaacaatgctcccgcctcatccctcttctttacaaaaagagtcgatttaccttacgactggcagcgcactctgagtcttctgcccgcaagctcagggaatgctaccccgaggccgagattgtccgaacagatttgcagtctcttgccgactgccgcaaacttctgcaaggtgcaaccgccatcaacgccgttctacccagtctgcattcccatgaaaaagaaatcgggttcaatctggtagatgctgctgtggccgagtctaggcgcgagggtaatgttttcaaacatttcgtgctctcgagtgtcctcggtacacagcatagaaccctcctgcagcatgatctgaagagctacgtcgaggagaggctctttttgagtcccttagactgctggacgattctcaagccaacaaatgtgcgtaaagttgaaggggcatgcccatctgagcccacaatccactgacagagttggacagttcatgaacgcctaccccgtggctgccctcgcagagcaagagcacccggtcctggaaaagtggtggaaaccagaacacgagaacagcgtcattgctctggaagacttggccgaggcatcgacaaaagtgctagacgaaagggagcgccactaccttgccgagtatccgctctgctctacgatgcctatatccgaggtagaaatcgttggcatcatagagagacgcatcgggaagaagatcgagcttaagacgccctcgttcgagactggcgtggccaagctgaccaaggctctgtatggtggggacgaaaagggcgccggcgagcttgggctcggttctgcaagcgagggagaccttcgcggtgatcttgttcgtgataccctaacgcatctgattctgttttataatcaccgcgggcttaaggggagtccgaacgtgctcaggtggctgctcggacgagaaccgacgtctgtcgagcagtgggttgactctgttgctccgaagtgagtcagctgtttcctgtaatcacgacagcctatattcatagataaagtgtgcaactcagaagaagaatcaaaatcctttcgttatcccctgtgcatcaatctaaaggatcttctacatgcctctgatggccgtagataaacattactgcaaatgccaaaatttatctgcctctacaccctccaatatgtcatatcagagatcaaaacagtagtatatgtatttgttacatacatataaaacatctaagttacgttgacagtgacagagaagggtaattacttatccagctagcacaagtatataccaaccgggtggtcaggaagaccaggaaagttgctgccaggacaaattctattttggagacgatcttgtaacattcagaacagagtaagagaaccacaagggagttaagagcggatgaatgtgatatgtggcttagtagggaaatctcgcctcctgcatggagattaatcaacgggtgagaaaaaaatgataccatctccaggggtaaagacgcaattcccaggaaacctagagcagatcccacgggtaaaaaaaactgataaggagaataagcaacatcacagagcctcccataagccggacaatcctttctgacatggcccccaaggtatcagcactatcttcctgaaggatttcaggcccccgcatggtggattctttagggagaaaccttttgtgaaatagcccctcgtgaatcattcccgtgctgattgtaaataagtttttctacttgggttgattggagaaatcagtagacgatcagttgggaactcactttccaacggttagctgctatccaaccattgagaccaaagggcaatgtgggtatctcgacccattctgccacctatgtagggaacgactcgttggaggacatacagcttactccagcggaattgtataaatatcgaatgtgccggggtagagatagcagtattggtatttagagcccagttacacgcaacccagatctgccactatcgacctctcagtcagacttcaaatatggcttcatcgtcctcatctactcaggcagagaaccttatactcatattcggcccgcaagacccgaacctcaacgacgcatacctgcaatctctccgcacgaatctcctcgactcgccctttctgcaatggatcgtgcacacgctaatacagttaccacaagaatggcaaagaattgcacctacacacactgaactagggtcatttcaaggccagaagtaccttcaattattaagcgagtggatgaggaaggggacactaccgggaaacatctttccactgccgaacatactagtgacgccgttggtggtgacaacgcacttggctcagtacacgaagctgctagagcagttaaaccctgccattgctacaaatgatatgctgtcggggatagtcaaacatgacatacagacagtaggtctttgcacaggactcttgagctctgccgccgtggcaagctcagccacgctggcggaactggaaaagcatggtgcagctgcgattcggatggccatggctatcggggcgctggtggatgcaggggacacagaggtcgaggacggggacaagtggcagtctctagcggttggctggaccacccagaacggagacgctgaactcg

SEQ ID NO: 5017 - DNA, 4622 bp, Emericella nidulans
  unsure (1)..(4622): unsure at all n locations
aagacttccgagaggcatatattcgccgctttggagaccaatggatgtattaatcagcgatgctaggctcagcttattgtgtactatttagtctttgaactgtgcattttttaaatttattgctgataatgcatgtcataatccgctatacagttccccaaatcaacgccattcccagttaagataatacacccttaagaaaatcaagacagtcaaccctcctaagcttcattaacatgaattcaaacgcatcaagccttggccgtcgtaaaatctgtctcaagggcagattcaacagcttcagccttctcgcaagtacaggaagctacaaaaagtcagcatttgccatcagatttaggaacagtaggctttaccttccggtcgcttcccgcaaggacaagtctgcccatctacagggttgttttcactcgctgctcgctcacaagtacactggccggccggacgagcccctgcacgcacttattagaatacatccaagccaagctagattgaatagagataaggcagaacatacggcacgagcatctcgccccctgaatcgtgttctcgctagaagccttgttgcaggtgcagtgcagagcagactcttttccacatgagcatcttgcctgcgcggcgcacacgcaaccgccgctgggatttgtcttgcagcaggttgaggtggggtgaaccatattgaatgttgtttgaatggtagagatgaggttgaggaatttgaccaggctggtgtcgttgtatggcgtataccaagcttgtgatggatgacgtcagatgttcgaactgggctaggttcctgcaaacgctggcagatagcaaacaaaaccggagtaacgaagatgagatagtggtagtaaaagatagatagggtctgatgatgagaaatagaggtaaagagagagtcaaagtgcaaatattatacgctcaagctgctcctgcctgtcaagtcagccgttgatatgcttgggaatctgccggcgctggttggctgtctccaacgtcgccttcctggtactgagctgaagattggtaattgctctcagcgcattgggcgtttacagttttcaaggctaagtgataggtaatcgcttttccgttggtggtgctttgattatgctattgaagtatacctcagccctaattgcctatctgctactccgtactacggagcactacatggagagtatgaatgatatacagtaggcgtagaagacagatatagactaggataaggtaagacacaaaaataacatttaacattatacctcagttaaacttgattgtgagtatgtcttttgaacagccacgcataaacaatgcagcaagcagcaagcagaaagctgaccaacgccaatggtcccaactccgagtacaacaaaacaaagatttttccgcctgcaaacaaaaagttttcaataaaacacaagagaaagaaagaaactattatcaaatcggcaccaagtaggtgtccaaccacattcaccattcaatcgaacttggccatggtccgcgttactaggctaggtagagatgtaatcgctcaagaagtcgcgttgagtattgctttagagaaatggtgtttcgcatactataagtagttggcatagtcgtatccctgactgtatttggccctcaggggatccatgacctgcggagacgtcgtcatcctgtcatccgcggggctgctaacggcaacgtgcccctgttcggaagagaaagatgccgggaggctcaggctagaggcattggcctgggtgaatggaatcccagtgcccatgctgtaagggtggtgttcgtagggataggggcgatagtcgggtgtttccgaaaccggtaggtgctgtaaggtgggcatacttcgcccggggtgatgcatgtgcgagttcatttcaattccgccgtatgattttggagcaggcatcgaaagcggaggctggtaattgtgtatttggtctagtagagaaaggattagcattgccaatatctcaaacatttagagacttactagtgttatccattccatatgtcagttgtgcttcttgctgaccactcggcgacacagaaccctccaatggacgatgctgaccatagccaaccatcatgccgttcgctggccggttcatcacataatccattggccgtcggtatgaaatccctgggtggcccaccgcatccccaggcctcgagaaacgaccggggtattgaagacttgtattgaaagacggctcagagaaactactcgatcgcggaaagggaaagttggctcggctgcttctcagatctggaaccgttgctgccgctcctcggttctggtagttctcgaagcccctgtcggacgaggtcggtgggtagccgggaccgcttgtagaggctgagctcaatggagagataacgtaatcgtcgtcgttcaggcgcggtaaaccttcagtaagaagaccctgggacactttagtctgagtataaagagcaaggcggagtgactctaccgatgcttccgaaggacctttactgccaaaaggggtacgcaagacttgagtcgtatcaaagtcatctgggagcgctcgtgacttcaacatccgttcccgatcgttgctggtgagccgcttgagttttgcccgtctactagcgtgtcagtcggaaataggacgcttttgttaacatatatatatacctattctgaaaccagacctggacctgacgtggggtgagccctgggatctcccttgacagtctttctctgtgcgcagcatccggatgcgcctgtcgagtgaattcgctcatcaaaaagcgcgtttgattatgcgtgagccttaaggggtcagcaattgcccaaaggatagtctcagaccacatacctgaaccgcttcattttcttcttgtccagcttaacatcctgcgatgacttcttttcgtcggcgattgatccgtcatcatcagatgaccctgcgttggcctcgccgtggtccttttcatcctcatggacctcttccgacttaactttggatgacaactcatcatttgtctgagactcgctcgaaccttgaatatcggcattctgtctctcagggttcgccgtcaatgatgagtcgctgtgtgcgtttgtatttcggttttccagtcccttcgagagtacgtctacccctgagtactgcactgagttggaagatcctgcagccggctgtgtcgaaaaggcattctcagccttaaatgcagccggctgcatttccgtagggggagctttgtctggctcgcctactgttttcccaagtccggatagagctgataagtccgctctcgatttcgtcaaggctggctcgctattccaggagacggaagcccaggaactcgtgattgaagatgggtgagcagcggctggtgatggtatcgtcgacacccaggcgcaagggccactgactgacatggtcgtgatacccttacccgcctagtccatgcaagttttgtgagtgactctttccagcgtaaatacagtcagaatgtgatgttgggattcaacgctctaaaaagagcaggacttgatgacgggagaaaggatcacggatgaccctggttcaggtgggtcttgaagagtcgtcaggaggtttttgggagatccaggattctcgttataaccgttgttggcccaggggtagcgatagggaaggaagtaaatagaaagcccttgatcgtggttatcaggaagtcctcaagctgtcattggacttagtagctgacggacaagaaatagtctaaccgcctggacgtttcttataaagtcaaataaaaggggaatcttagtcgtggctgatcaccacaagtcagcggtaaagagatgaggccgattccacagttgggtcctagtgtggccgaacactctagcgtccttgctcctggggagtaaagaagaggagcgaagagatcaaacagtgctttagccaagcgggtcggaataaagagatcaaggattcaaggtacggagattcgaaatcaggaccaggaataccggggcgcttaggtctaagactgtgcctccttccgagagtattgatccaccggatctgtcactccagcccactactgagggagaggggagtgccaggtgactgaggggtggcaaggcaaggacgggtacctccggttgaccacaggctgacttgtctggagacgaataacgaccaggacctaatgcaggaggcaatcccaggaaatccggcaactccagcagcaaggttcgccggtacaaaagatatcgcacgccgagctacgggaatgagcatttctccaagagtatcacaaagtgtccgcagaactcaccaggctaatcgtgacaaagggcagtaagagaaaggtgggtaaaatggggaatttagctcggattgtaggcaattctttctgttgtagagtaaggggtttcgggtggtgctctattcagcggagctactactcagagcaaaacttgacaataataacggcgatataagggttcgtgcaagggtgttatgatagaaagcngttggcgctactggagatcgagcaaacgtgtcccgataccaatgacgaacatctctaggatacggacagaagatacaattagatgaaatctcgcg

SEQ ID NO: 5018 - DNA, 2648 bp, Emericella nidulans
caagggcactatgacactaaacccattccacaccgaccgccaggtgctgagccgagtatcggctgctggcttgctcactgttctcgtgtcgttgatcgatgcgaacagttcatccttgctgagcaccattacctcctctacttcctcatcacagccatgtacccgcgcttccttgtcacgctcgacgaagacctccagccgcttccggtcaacgtccgcgtcggacaggctgttgatgttgttggacaggctggaaggccaaagacgatcactggttggcagacacagagcacccctgtgctgctttcctacggtgagcgagcagagctggaggatgagaaatatattcctctcagtagcacattggagggtttggttatcttgcgtaaggtaagtcatcgcagcttctctgtattgtgtacgaacatttctaacattctcacagaaccctaactgggaggaagaaagctccgcctgagcaacagtgtcctgaatggtatctagtgagatagaccaaacgcaatatctggcgttcctatacagcttaggccttaatgaattcacaaaagtccaaagcatagtagacaactgattccttgacttagcatgtctgccgttccagcgtccttgtacatgatacattgattggcaattcccagctgtgcctggccggagataagatcatccttttagggtaagggcacgtgcgataagaaatcccaattttccgtagcatcatagccgcgacaacaacttgcgctcaaagacacgccatttagcccagatatccatcttaattaactaggagaacctggaaaaatgaagcttgacccgaaggcgattcgctatcttacctcggaagatttccgtgtgctcgcagcagtatgtcttcacatttcgtttccccgcattatctcagcgggggatatttgcacaatctagcaactgacggcaacgtttctcaggtcgaacaaggtagcaagaaccatgaagttgtaccgactcccttgatcgcacagatctctggtctacgaggcggtagcggcgtcaaccgtgccatctcgaatttggcaaagaccaacctcatcgcgaaggtgaagaacgccaagtgtacgtattacctgccgtatttctgcattgtccttctcacatacatgtttcttggctagatgatggttaccgacttacctatggcggactcgattacctggccctcaatgcccatcagaaacaaaagtgcatttactccgtcggtaaccagatcggggtcggaaaggaatcagacattatagtcgttgcgaaccacgaagggacacaacggattctgaagatccatcgactcggtcgtatctcgttccgaactgtaaagaccaaccgagactacctgcggaaccgaagcacaggatcatggatgtatatgtcgcgcctggccgcgatcaaggaattcgccttcatgaaagcgctacgggagaacggcttctcggtaccagagccgatcgcgcagaacagacacacgattgtaatgagtttgatcgatgcctttccactccgacagatttcgaaggtcccaaaaccagccctcctttacgctgagttaatggatacaatcatgcgattggcccgctatggcctgattcatggtgacttcaacgagtttaacattctcatcaaggaggaagtgaatccggaagcaaaggggaaaggacgtgaaggagaagatgacgacgaaaacctcaaattgaccccagtgatcattgatttcccacaaatggtatctgtcgaccatccaaacgccgaaatgtactttgaccgcgacgtgaactgtatcaagcgctactttcagcgaaaattccacttcgtcagtgatgtaccgggacctttcttcgctgatgccaagaagcagttaaagaaaaatccaggcaaacggctcgatgttgaggttgaggcttcaggtttctcaagaaaaatggcacgcgagcttgagaagtatatgaaggaggttggcgttgatggggacaatggggaagctgataaggaaggtgccgagagtgacaatgaagatggttcaggctcagaagatgacactgcaggtcagagcgagacagatacaaaagaggaaaactcgaatcgctcacttgaagagagttctcagaaactcgaacagttgcatgtgtcgtgaatacgccagatgcctacgctgattaatgaagagttgatgggttgagggctagcattacgtgattcaaacctaatgactgtcatgaataagaaatatagacttcttttccgtcattatggaacaagaataagttatacttgtgaatcccattgtaagattgtataagaatgacaaactacggagtactctggagtatagaccggctccggcacgcgaagcgacaaccacgcagttctaatctgcaaaagttccgcaacttcgaaaagaccgccaacttgctccatcttaacagagaaccaacaaacccccatcaaccttccttcaatactcaaaacatcaatccggaccgagtcactaaaatggtccgcaagtggtccaaattccccaagaagcccgccgactgggttggccccagcgcaccactttcccagcgcaagacggtatatctgtacgtcctcttagacccaat

SEQ ID NO: 5019 - DNA, 4602 bp, Emericella nidulans
ttcatgaacaaaggtctctggttcaagaactgaaagaagatttcgctcacaatggtcaatctgctggccatcggagttgcttgtgtgctctgtggtatgggcctctgggtgtctggcaaggcgttgcatgataacccaagctcagccagcttttcttgcgcgaataatgcttagccgatcctgttggtatattccaaatttagggtatggcggtttgtttgggaggtctgtataatatgcatactcggtacatatttgggattgttcagcttcacatagactcggcgttcggcttcgtctcttccacattttcttctcttgcatcggtggtgactttttgagacttctttttctcttctttatggtctggtcaaagtctgttgttcaagatttactgccttcgccgtgacattgtgtatatacctttttttcttctctactgcattgcttcgcatagccttttatcatttgccttctcaacgaaaagcttgatgctttgtattattgacttgaatgacctcataattgatataagagtaagctggtatcagtaattggatacagaattgtcaatgttggactaaaatgagaaccaccactaaacataagagcgccagcttaggttcaagcttgaatgtagttataagatctcggagttatccggaactcgccttatccctcttcattctcctcctcttcctctgacagtccttgattgcctcaggcgtcaaaatatccccaggaagctcaaagtccctctctccaagctccggaatcagatgtccgaatgcaagcctcgttcgccccttgcggtttcccgacatagcctgtgcgcggagatgcggtttcgcgaagaacgaggtgaatggtttgggcagaccaggaagaggtggtggagcagattgcgcaagttcttgctgctctaatttcgactttggttgtttcccggctgttgcagagcgggcttcctgaaggagttgacgggctgctagggcgtcaacgtcatcggatgttggttcagcggtggcttcctcgtcgtcgtcctttctgtcgttatcttttgcattgccgtaggatggttcggcggcgtcggagtggaacgacgcagacttgtaatctttatcaagcttacggcgcttttcttcttccttccagatcttgaacttttggagtaaggtcgagatttctgcgatgaagtagtcgcgtttcggctcgtaaagtttcttgtcttgctctgaaagactgcggcctgtgatgcccatcacacgcagccagtcgtgaccttggagctcgtcgaggagtcggtctagttgttgttgatcatgccgtgcgcggtcacgctcgatgttcggagttgcttctctgccgttcgtgtcggcatgagctttgagtagaattcgtcgtaaggggtcgtcatcctcagcctctccagcttcaatatcaggccttgactcatttatgagctgggtatcaggcaaggttataacgtcgcacttgtatagattgaccagggggtttccgaagggcgcgtccgcatcagaactcgaaggggcggaggataaatcgacaggttcggcaagatcatctattagctttataactgtattctctgacagcaattctacatttgccattagttctagtcattccagcgcaccgaatgaggcgacgatgtacgcacctgtttttggaggctccaaactcattatctgatcataatttggaaaatagagcgccaattcgctcttcgcccttgaacccccatcatgggagcgaaggctccgccgcttctctggcacagcgcgatcggccgtttcggaaggtactgtcaacgattggggagctgattcgtctgaaggtggcgggacggtcgagccccgagccggacgggtattctttgactttgaactatcctttacagcttgttcagacgcgggttttaggtactgcgtgagacgacgctggcgatacgccacggaggtgggcgtgggcgtactagtagtgattgtagatggtttcagagccggagcaggcgagattgtatcaaggggatccgggggcgggcggccaccattcagatatagtgccgctgaactcgaattaggagtgtggtgttgacggaggtttcgggcgtgaggcgtgctgctaccggatggcggagaggaagtggtgtgagcggaatgcgcgaggagcggtcgcggtcggcggagctttgtggaggaggtggagggcgagctgtcgattgtggtatcgaggagatctggagagctctttcgacgacgcgaggggaaaaggttcagacggggtcgcttggggggaggcggttgaacgcccgcggaatcatcgttcgtggcgttggggtctttgcgcagggcgcggagagatgacctcgatcgcgcgggcatgatggctgtggaggtcattggatctgtaggtaatgggggaaagcgactggggatttcttcgacgcgctctgggcgcatcaaagcccgatgccggtgtgagatgacgcgtggaagggggaattggatacgagaggaatggcaagaatgaccggatctggtcaactcgaagctgtcgcggtttcagtcagcagtcgacacaattcaaacgactatatttcacattcttcatgataatatatcatccaaaattctcttgttggtctcagcaattacatatatatacactaccacgctgagcctcaaaagatctacttcagatccttcaaataccttattcccgactccagcatccaccaagcagtcaattcgtgcacccaattcgcgaacccattctctagagggagcttattctttgtatccttgtccctccacatgagcgtttcgttgtgaaagaccatgtcctcccctttaacttcaacactcaccaccaaccggccctgaaccccaaacaggaattcaaactctaccttctcgggcgcacgtagcctaaccctatacgcattacagaccagatccccctcgtcaaagtcgagagccactatgtgcgcgcggtcgaagctccggatggtttccgggtctgatgctgcgagtttgagaaggcgggcttgtggcgaagatgcgaaagaggacatatttcggcggagaagcgcgatgaggagttggcttggttcgaggtctggtagggagtggcgtggcgctgagatggaggcgtagtcataaagggtatagtactctgagctgaagatatcggacgagatggaggagacattgcgcggtgttgaaggagagagctggccgcgttctgaagaatgtctgacctgtgatgcgagatagcgtttctggtgtgaaaggtatagggagacggctagtgagaggccactgatggccgttgccgtgatgacgagggcttttctcattgtagacgccttgagttgctaggactgataagcacgtgtgaatgaaggtcaagaaggctacaaagatgatattgcttcgtgcttagaattttgtcctgctctgaaagtcacgggccgaatacgaacttggcgttcgttttcttggatagcattaccctcaccaaaatcaggacacagtgagagaattctatgctcctttatagcaggctatgtacctttgagccgcggggtactatgttcgagcgcgctggtagctagtcttgaggatacccagctatgccagtcacgtcaacgtcaaacttattggccgcaggagcacctacagctcctctgctggtctttataaagcttctactccttctgccgcctcgagaagacgggatctgaagctagcgggcacacgtccgcagagagagggccccaacagggacggccatcatgaactcggacacacatattgggcacagttacctgagctcagacagccgcggactctgtcttaccaataaatgccgccaccgcatcaagaactgcacatgccagatctatattaaagtatagttcaccgtaccgatgcagaaccctagagtctcgtccagccaattttcgtgaaagagaaaccgcgcagactggaaccgagcacaggagtcaaaccgccaagcagttctacattgtgttccttgacagaagtcgcaaatgggtgcggaggtggcgatgggtttggtccagagtattcagtgaagcttctcatgagggctggaccagaccccgttcggagacgcgaccgatagatgtggagtagtgaaggacgtgacgttccggggtatgattgacaatccgactaagctcagtggtgccgacgccgaataggctgtagcttatatgcattacagcgctgcatgggaggtgctgagcctgaaaaaccctggtaaagtcagagaacccttgtaaaagtcaatatctcattagttccattgtatttcattgactcttgcatgagggcagaccatagcatagtggggagatattcgtacttgtcccaccagttgtgccggagtttgtccggctcgttctccagacagacttcagctttcacacaagatagacgcggccagacaacgatccatatccgattatgcttgatgggatggcaattggttgatcaggcaatggtcttgttaaagcgtctccggcaaaccgttccgggtgcctttggcgtc

SEQ ID NO: 5020 - DNA, 3419 bp, Emericella nidulans
cggcgaccgcgcagaggatctgcaatatctgcatggagcacggcgtgtcatcgcccctggcacgtgtacatggccgaggaacccggctggttccggatcacgttcacggtcggcagggaggcgttggaggaaggtcttaaaaggctgaagaaatcccttttgcgtgtacgagcggagtccgaggagggcgtaaaccgcagtagtgaaaggagtgcgcccgtcagttgggaagtacggagttaacactcaagataacactaatccggtggactgagacggctgcgctggcagcttggacatggcttgaaacagataggtgcacgagtaggcctggtggtcattatggatggagaggatgagatacacttagcgaccagtatcaggaggaatcgaggatttttattcggcatactctcctactatgctagcggattgggagtatatcttatggtccatattggatttacacctcacagcttacaccggcttcattcgaatcccttgagatttgaaaggcggctggtcctcataagcagcagacattctacagccatgccgagtaattataggtaccatcccaagccaatgtacctctccacctacactattattatcacaaatgaatctcttgtgataacatgcagcctggcattacaatcagccccaataacccaagtgcgaaatacctgatgccttttccatgagccgtctccgtctcctgtatcccctcgactgtcatcattgtaactgagcataaactgggtgtgcagatatagatatcacaatttcgcccaaaacccctcaatgtagtcaaagcttggatctgaatgtcagtttccagataaccggtccacacgagcctttatgctacatatctcctgggttgatggtagctacgagaccgtgctcgatgcgtccgtaacgattaatcagcggctgggtcacaacgctgcgacctggccgctgacctttgcgggtggtgttgccccggcattgaaacccagatccttgaaaagggagcagtatagctacgcgacaggagataaaggaagagaagcggtgggacatgttgcggcaggggaaggctgttaaagcagcgaatgtcaatgcttttcctgaagaggtacgcgctataccgcaagcgacagttcaatacctccgaaataggcggtggtaagtggcagaataatgcctcaatgagggttgttttcaactcccgctaacaaacatactggtggctagcgcgttttggatctcgtctatggtcacatgatcccaagcccacagagcttgactgagctattccacaaacgcactagcgccaacagattttcgaaagatcccaagcgtcggttgaaaaaactcgactgcaacaacgacgagctccacggccatccccgaaaattgactgccagagcgggcgtgatattttcgagattcattttctgaacgacgtctcctcatcgcatctgacgtcatcgcgctttcgagtgaccctctaccgtccgaacctttttcgaaagctcttgcggtagcctctttccacggctccgatttccaataaacttatcaacacaacttcaatccacatatcataatggctttcggtggccctcgaggaggaggtcgcggtggacctcgtggtggtggtggtggtcgcggtgctccccgtggcggcgctggtggccgtggtggtggtcgaggtttgtgaccgacctacaattacagggatgggaggatgctaggttgcggtacttccggatttcagtctggctacagtgtctacggacgcttttgcctaggaatcgttaagctacaatgcgacgcggcatcctccttgatcttcctttcacgaactggcgctaattcgtttcttcgttgacttcaggtggcttcggcggtgctccccgtggtcgtggaggcggtcgtggtgctcctcgcggtggccgtggtggccgcggtggtcgcggcggtggccgtggtggtgctaagggcggtgctaagggtggtgccaaggtcatcatcgtaagttgatttccaggctgttacggtaacctagcatttgttgaccaggatctctaggaacctcaccgtcacgccggtgtttttgttgcccgcggtggtaaggaagatttgctcgtcaccaagaacttgactcctggcgaggccgtctatggtgagaagcgcattgcggttgagtctcctgcgggagaggatggtgccgttccaagaccgagtaccgtgtctggaacccttccgtagtaagctggctgccggtattctttgtggtgtgggatgaaatctacatgcccccttggtttcaaggtgctctaccttggttccgccagcggtacatccgtcagtcacgtcgctgatatcgttggaccgaccggaaacgtctacgctgtcgaattctcccaccgttctggccgtgacctgatcggcatggctactcaccgcaccaatgtcatccccattgttgaggacgcccgtcaccctctgcgctaccgtatgctcgtccccatggtcgacgttatcttcgccgacgttgcccagcctgaccaggcccgtattgtcggcctgaacgcccacatgttcctcaagtctggcggtggtgtcatcatctccgtcaaggccagctgtatcgacagcacagccaagcctgaggttgtgttcgcccgcgaggtccagaagatgagagatgagaagatcaagcccaaggagcagctgactttggagcccttcgagcgagaccactgtatcgtctccggtatctacaatcgttcgtcgtaaaagccaaaagcagggtcctttataacggtttttctttttccttctcatgtcttaatcttgtgctctgtcctggcgtcgagtgtgctacgatttttcttgatctgtttcgctttttgttcaatgtcaggaatttagatgtgtttctggacatgtaacgtgcatggagttaattcattttctctcttcaatttccaaggcctggtatccgagtaatcatgtgccgtagtcaatatctcggacttacgccggtccccaacctctatcacgccagctcggttgtcggactgttgcccgaccaattcgccttcggaattgttgcgggacgttaactgacactggctaatcacagtcgatcccctacgcagtggaagaatacctacgtagccataggggtgcagagcggggataaatcctggggatgccccgcaggacacctaagtacttaagaagaccgtggaaagactcaatccagcacattgcctctgcgattcgtctgtcatcttctgtcacttttcattgtatcctttacacgctagaaaatccaagatgtctgtacttattaccggcgcagcggctacgtcggccaggagctggcgtctgcactccttgccagctccccagatttg

SEQ ID NO: 5021 - DNA, 10263 bp, Emericella nidulans
gtttatgtccggaagcattgaactcaatgctagcaaatatatatttgtagaaggtcattttaactataggcttttccaatatacccacgacacttctattctgtgctcaatatagcttagacttattagcgagatagatatctaacggcggcatggccgagtggtctaaggcggtagacttgaatatttcacaagaaatcaggtatctactctcttcggaggcgtgtgttcgaaccacactgctgtcgagtttttgcacctcgaaaccaagcgatttttttttactcaatcaaattttataactcataatacatacatacatatacacacccttcaaattacaataaatttatttgaagtcaatctggtttattagttttttttttttttttttttttttttggccgattcccagaactagaggcatccatccactttacatgtgtaacgggtgtaggcagtattattttcaactggctgttctgtataaacgagtatcacaagcttagagaaagaaaaagaaacaagagatagaagcgcagatatctccctcctccctttatcaacctttcctgatcatacgtcaggacttctgacttcccggaccagtataccgccggacctacatgccgacggatctcttttcctaagctacgaggctgcaattccgaggctgtatactgatgttgcagaaaccttatctagaactaggttgagggcatggccgacaaccaagctccaggccatagcctgtgacaaccagccgcattgtagccgccacacctagctgttcccttcccagttgttgtggaatatgctcaaaggggaaagggcaggaggaaactgtatcgactacaccaacgtagcctactaaggatcggatgccatatgacgattgtccatctatctcgttgacgattacgggttcttactcttctgttttcccgctatatatacatgcagagggagagaaccttctataaccaggcgacgtccggtcattccaccggaggtcaggtggcctcatatttccgtatcaccagtcaagcatgttattgaggactttgacagggtggaggtctcccgcccaaagttcaggtcagaaaccagctgggtttgacggctaaatgccacctgacgcagtctgcctcaggcaacaaggcggctgaagcttggccgagccctaaataccgcatgtagattcaggtacccattagaacccgcgaaaagcccatttgtacccgtcctcgtataattttggtgccaagatgcatgaaatttgctttgttactccagtaaaatacagtatttccctacagtatttgtttactgtcacggggtcagcctaggatgagattctgccgctgctgaccacacagttggctgagttttctcgagccccggctctgatccaaaccagaaccttgagctatgttttgtcttatctatgtacctgtttaggaacagatctcacagggttgggggggtgtttatacacttactgcagattatcttttcttggattatccttgctttatggggtatcggtatgggattttatttatcctacaaagctctcggcttagtcgatgtaatcagctttacgaggcggcaccctagcatggtgtgcgacctagtactggtagttttataagatgttggaactcaaatctgggagtatgaagagataaccactaactatctaaccatctaacctcttccaaaactgaaccccttcagagttcctacattctgccccagctgcaaaccagaattatgagaacccgaaaacgtcgcattcgacacattggcggcccccttatcctcctccggaagaacaatcttcgacgcccactgggtaagaacccgaaccaccttcttgaaatccttgtcatcctcgccgtcgtactggctcagccgtagctggttgcgcgccaggcgctcaggaggaggagcatcggggcctcgggccaacgcctcatcaacgatcttcacatccttgccggtactgcccagcttggtgccggctccggcatagaagccttccacctcgaactcagctcctgcttgcttgagctcggcaaaccgctggggaatgccgctgaggcggtataaccggtctttcaggtccgattcgctggggatctccgcctgagcgacttggagatactttgtggctgctgctaccgatcccggctggaaatggggggttcctagtagtaatataccgtggatgcagccaatgagctctcttttgctgggatgttcggcggctcggactagggcctagacatgagaatatcctacattagtgggattcccatgaacaacgagaataacgtacattctttaaaacaacgccaccgagacaatgtgcaacgaaaatgattggtctttcctcctgtttgcttcgtcaaccggctgggtcatgaggcactggtagagtagagcggagctgggaagaaaaccttctctttctcagttcgatggtccatcagttcgttgatcaggtcgctggaaatgtccgtgatttcgtcgtcctcgtcaaaaaaaagaccgatagccgcttcatactcaaacgacaggatacatgcgtcggagattttacctgggaggagcttttcaggccagaagacatccgaggcggatgtccacggtgcttggtcgccgtgcaagccgtggacaaacacaatactatggggtgatttgggtaagaagttgacttagaatggatgggctgtgctagagaaagagacaggcgatcttactcaactttggcgttggccggttctctaaccgctctgatagacattctgaagatggatgcagtgggaaggaaggctagctaggaatgtagcaagcaagcaagcaagcgagcaagcaattgatatcctttgcaactcttaagggttattgactatttaatgcagacgggggacgacctacgaccaaggtagaagcgtggaaaactcacagccagatgtaagatttaccttgagatctgcttcctacttgtataatagtctacgggcaagcctagtctgtattttttcattacgaaaattacaaagaggggctgaaacaccacgcctagtcaaacttctgcgctgagcaattcacctgcaaggtgtgctggctgaagccttggcctttcccgacttctcatgcgcaagtccatacagaacaatcaaaaggcaagaagggcagtcacgctattgggctaaataagctcgttaagatcccctcttgtgtaagtgggacgaggtgtcctttccataagatctcgcctacctaccggattgcggctggccagatgtgcggccgcctcatgttacatcgattgcccagttaaccgattatattggtatatccgatatgaagaggtcggttgctccgagaactcttgagatagacgggaataactcactccctgaccatttattctcaatgccctttcaccggcgccttgagaagacggaccatcaacagtatggacgagaactaccttcccccgattcccaattcactaatctggacatttacgctagagggccacgctagccgcacagcccgggctgagcgcgctataccggtcccgaacagtgaccacggactcaggtaccctaagcaattaccccgccctgagtgttgctgcctaacgcacacaccgttgttgagcctactctcacaaaagagatatcccatcatatcttggaactgtactactaggaagttgagtttgccgtagtctcttagaatgggataatacaattgtgtggagaatgctattgttctccggactgggacggcgtgggaacgcggtatttttcactgttctgagaccaagtagggttggagtaaatgcggctgagaaccatggactaagagctacggcttttggctctcgattggctggccagtcagttgcggactcgacatccgcatcactcagcccagctctgcttccctgtatagcagatgaggcgctggactctgctggctcattaaagattggctttcctggtccaagtctaaacaacatcattcacataccttcctcactcaatcccgctccagcattcgtctttcacgcttgctccaacatggctacccagggaaagctcgatgcggcacaggcgtccgacatcagtcaactctggcaacaagcagtcaagaactatgagaaaaagaccaagaagtctctgcacctggcgcaattcagcaacatcgaccaaataatgaagggcacggaaggcttgtcaagcgagtttaaggatttccggcatgaccgatcgaaaacagacaatgtgcggactgcattgaagaataatttatggctgattcagaaggtcgtgaatacagtcgaggtggttgggaatgctgcatcggtatgttctcttatgtggaattcagcgtgtatgctgttgatgctgatgaggttaacaggccttcccccccgcaatgccagccagcttgattttcacggcctttggacaggtcatgcaggtacgaaacccctgttgttatcaataagggatttagattctgataaagccccaagtcttttgccgcggtatccgccgactatgacaagatcatggggtttttcgacttcacgcatcgcttcttcgaccggctctccatgatcgaggataaaactccccagcaagcgccgttccagcgatgcgttgcgcgggtcttctcaggcatgctgaccatttgttccatggcgcaggaatatgccgagaagaaaagattcagtaagcagctttccttgatcggcttttttttttgttatagcggcgttaattaaaatcatctcatctagaaaagtggttttccagtttgatcgatggatcggatggggctctttctagtgccatccaggaaatggaggaggccgtgaacgagctgacgcaagccgttggcctagctacgttacgaaccgtcgagatcttagacgacatcgtccatagcatgaacggaaacgtcgagttcctcgtagcgcaggtcactgtaatcgatggacgaatgaaggacatcaaatccgacacagggactatcatcgaacaaacccagacactggaactgaaacaggacgccatgctcaagatgctgaacgagcaatctcggcttttcaacgacgcggtgcaaagtttcgagtatatccaaatggggtctaatttcgggcagagcttccaaaccagtttgctgaaactcgacgtcgtaaggctcaagctgactcggtggggtcagtcggttggactggcgaatgtggacgacggcgtgaaacagcttcagatgacgaatctcgctcccgaagatcaagagcaggtccaggatcttctgtcccaaattctggagctctttgcggaagctgaagcggcgtcgaagcgattgcgacgaccaatcccaacttgaaagtgctggaccccgccgaagagctagacggcgtctcagcaccactgcaccagaagatgcaagatctcgctaagaagcggcagggaaagtccgagttggagcaggaccaagtgactattctgtacgaggagaagaatttcgcccggctgatcgaggacatcggtgaattggtggatggcttggtcgatcttttcccaggaattcaggaagagcagcgcaagctgtgtgaagaggaggtgtccgggttgaacgcgaacgagggcgctctttcgctgctgaaggaggttgctgctggccaggacaagctgctgagtgacacggttgtcaaagtcattcaatccactacctcctacaccaacagtgtggtattttcgggacccaactcgggctttcagatagggaacaactccggcaagattagtggtgttcgctttggtggttcctaattatgtctggcatgtggtaacagttcaagacaaacaacgaatccatattactcttcatctactatcgtgaacctcagcaaaagtagtgttccgggtgtccataaagaatgagaggcaactgagagaatggctacaagcgtgcagctctcgtgagtcatattgagaagatggggagaaattgactggtaaactttccacagctgctacaacaaggaacaacatacaacaaggattattagatactgataaaacataactgacctgataccaacaggatttgaaacttcaccagtcaacctcgctagtcaactccatttctccccaagtccactgcagtaacccgctacaccgtcatagctcaagtgttccccagtctgcttgtaagctccgtcgatcgatattaaagcttgagacttgaccattgtcgtatccgacaaccactcgatcaccgtgcgcatcccaacgagtaacatagaagtccggcgacagccgaaggaagggcattgccccatagcataaccactgatctcggtggcacaggctctgcaatgaatccgaatccgaatccgaatccgacctcactggccgctccccttctccttttgtcggggtgctctctagtggtattggtccaatgtctgttgcaaggtattggttgcctgggctaaatatcacgtcatacacctgagcggatggcttaatctccttccatggccgggacgatttgatatgactaccgacagcgcggcccagatattttgaggctttgagggatttttcgatgctccagacccggatggttttatcagcagaggctgccgcgatatgctgaccgtctgatgaaaaggccactgaaaagatccagtttggatagcctgagctgcgtgaaaaagcatcagtaatgatgctgtctgaatggcatggtagtctcttctggaggtctcctgttgcagcatcccacagcttaatggctctatcagtggacgttgataaaattagcttggcatcaggagagaaaaccagccccgtgatttgggtattgaagatcgcttcttggagttggatatcgaaaacctctgttgtcaccagggaatcaaatttgcttctgtagcccgccattgtctttaggagactgcctgtggccatatcccagagcttaatcctgccgttacaatggcctgatgcgatgtgcttgccgtcaggtgagacagccacaattgtgaacacgtcatcgctctcaaatgagttctggaccttacctgtggcagcatcccagattttgactgcctcggaggagcaggagacgatctgcctgttgtctagtgaaaagaccaccttctctactgtgtctagatgccctgttagggttttctggagatcgcccgttgcagcatcccaaagcttgatagtcttgtcagcagagcctgacgcaatcaccttgccgtctggtgaaaggaccatagttgtaacatgctttgagtggcctacagcttcctgaacgccacctatggtaatatcccaacgcttgattgtcgaatcagtagagcatgtaacaagctgcttgacgtctggtgagaaggcgatagacataattgcccctggatggcgctctagcgtcttctgaagagtgcccgcagcatcccaaataaagattttgccatctttaaagcctgctgcgatctgcctactgtcgggtgaaaaggccacactcccggcaaaaccgcttgccagtgtcttgagcaggtcccctgttgcagcatcccacaacttgacggcctcaatagagcctgacacaatctgcctaccatctgatgaaatggccacactcaaaaccgttcctgtgtgaccaacgaacgtcttttcaaggtcacctgtggtagtgttccagagccggacagtgcagtctacagagcctgttacaagctgcctgctgtctgacgaaaaggccatagttgagcattcatgtgagtggccttttaggatcttctggaggtcccctgtagcagtatcaaagagcatgatacatgtactatcacgcgaccaaccgaatgctgcaatctgtttgcaatccgccgagaaagcccctgcgtggaggccgtacccgccctgttcaggtggctgcaagtaggtataattgacctttgatatgccgaagtggtcggctatctcttgacggtcacctgtggtggtatcccagagcataacagagccatcataatagcccgatataatcagcttgctatctggtaagaacgccattgccttgacttgctcctgctgtatttgatatcgccttttcgggtggctccctgatagtgtcttctggaggctacctgtagtagtatcccagagcttaatcaaaccactgtcagagcctgatgctatttgcttgccgtcaggtgagaaagcgactctccagacagcctctgaatgacctgttagtgtctgtatcataggcgtccaactatcctccataggaggagctcttcccagccatacaggaactttgtgaaggttttcgcctttcacaacacttgattcaggactgaaaatgatggcagagctgtagatttgcagtggccagtgtgacaaagtgtggtaatgtcgtaataaaaagcgcatagcatcctgcacgaatgctaaagcttgacagtcatcctttgtcaacttgatcagtaaaagagcaggcgtcaggagaaaacatcaagaacccactttcagtatttcttcaagtactcttaacgcgtcaatggcccttggtagcctgtccaacagacttaggcattctagccattctatcaactttgtgtggttaaatacgctaacttggctcttgtcgctgggggtgcttgtgttctttagatgtgacacccagaacatagctgcatagtccacgcgagacagtacgccatttgtcggtccatttcccaaacctaaagtgtctctcgtggcatcgggccgcggcaggttgacaaggttgggcttgagatattcagataaataggtcagacaagcgagggcaatttcttcatgtccaaagcgtccatgagagtcgagtatagacagcccagtccctgcggccaagtagtctcgcgctgactgatgaacaaactcgattttgtcttcgcgcaaccggatgaatgaagcacagcaatcgactaatgctctaatggtgtcctcttcatcggttaggccgatcacactagcgacttactccactttcaaaggtcggtataccgtcatcatggccttgagcagtcgcatacacttctgtacttcagccagttcgccttcattgagctggttcaatacccgatcataaagcggatgcagacccggcggcaagctttgaactgtggacagagcgtcatctcgagagacactctcgagcgccttgcataccaagcttacccataggaaggtaccttccgatctttcagtaagctcagtctctatttcgctcttcagggtcgctccatatttgtgctggcgactaagctcctccactttggaagtgatataagcctccacagccccagatacagattgggaattgtgttccccatccagattgatttgcacctggtcctgaccagctaataacacccgctctgcgccgtcccatggtcggcttgtcaacatccacttgaccttaccaggctgatccagtccctttcgcacgatggatttgagaaaatcaaccatgtcgttatcctgacattcatcgagcgcatcaacaaccatatataccctagagtacttgcaccgggccaacatttcgaaaagaatgttccacaacgattgccacgaggttacatcctcgctgaaagactcctgtatagtgtcccaccggcgacggagcgattctttcagctctggttgccgattcgccagctgcagaatcaaccccttgagaatggcttccaatgtattgagctcgtagtcggcattctggcagaaagaataaatcaccacggtggagtcatcctgcgcacgggcaagctgttcgatcagaccgattgacaacatggtcttccccttcccagcgcctcccttgatccaaagcaggccgacgtcatccccattttcccaatctttgtactgcgcatcttcaagaatccactgaatggattggtaaaccaacctgtccttgctctctttcaggcgattcttcacagccagtgagtccgggcagcgcagagcatggagacaaattcgatcaatgtcttcggtggtgtacgctagaaacagcgtttagtctccttaaatcaactagaaatcacttggaaattaccccgcgccacatggaattctgctgtgatggaacccgagttgtttccgatttggaggccatggtttgccgcattaaaagcagtggacgtggccatcatcaaag

SEQ ID NO: 5022 - DNA, 2569 bp, Emericella nidulans
cttatcagtcagttgcagatctatgacacccaatcttcctttcgtagataagttactaatattcgcctttgcagcacacatgctgatttatatatttactccgcggaccgctgcttcagctgggtgttcaatgggcacaggcaccatcagaccatgtccggctgggagagacagcacgagccggaaagtacctacagatatgcacgtctccgtcatatcccacccaaagcgcaccatctagggcccgtcagccgccacccactgtcaaaaccgaacgtccctcgcaagaaaaacacaactgggacgacacatatgcgagatacagaaaggcgcttggatggcatccacgtccatcagccagggcctatatgctcactaatatggccacccggcaagggcaaacaggaaggagtaaccaaacaagcaacgcggctgccaccagtgtgtcatcgaacacgaaggcaactaagaatggggtgaatatacacaacgatgtagcaggacgcggctcagatcggtcgctcctgccataaaatgattgcctggatacatgctaccgagagaggtgcaaccatccagacagcaagaagcagcaactatagctaggctgggagctcacatcatcacattagcattgcaagcccggaatataggagagaacagtggctgaacggaaaaggatagccaggaaccgacccagatattctcacacgggccatatagggtacccaaagaatattccaagtttgccgcgccagaatgacggaggccccatcgtgatacagcatctcatacacactgctgccgccccagcatcatacaagcatgcggttgaaaatcaaagccaggtaaccacatgcccataccagaacaaaaaagagcaacgaacacaatggcacgtgctcatcaagctgacggacagcatgaggaagttgtgacccgtcttctagatcatctgtcagacctgcccgacctgcctcccccaaaccccgacagacgctgcaacccggaaacagatagagcctctagcctatagttcattgcaaacgccctcaacgcgagacacattaggatacctgctaagaatttgtcttcaccccacgggtcgatcagatctgattccaaactgtgaagtataccatgcaaggaaagtataagttgctataggaggaaaaaagggaccaagatttcatgcgcccatcaccatgtctgaaaatatcagcaagcacaccgccagtgaggcttgactgccatgaacaggaatagtcaaacaatggtaagatctgtagccagtgccacataggagggccaaacagttgggtggatgaccaggagaccaggcgccaatgaagctcttgtttggaaaggcccaacatctccaggcagggcatgatttacaaactctaaaagaggtgctgaccactttagcagcgatatcacagtattgggacatggtcaattcaagaccactgtgaggttcaaaaagaccaacacatatactgtttactaaacgagaaaacgatgagtaaaaaagatggagcagctgggaatcgaacccaggacctctcccatgctaagggaacattataccactaaaccacagccccatttgatggtaaagacctgactaactgactatcatgttcttgtgttgctctaggtagtggcaaaatatgctccatcacaaccccatctgatatgagccctagaacttttttctttctcgcctccaaaaaggttttgtaggtctgcttcatgggaagaaaaaagaatatggagcagctgggaatcgaacccaggacctctcccatgctaagggaacattataccactaaaccacagccccaacttatggtccttggttatgggcgtaggcatcttcttggccgctaagctgcaagcaataaaaagaatacaaaaagaattcgacatatagaactacggagagaggcaaaaagtggagcagctgggaatcgaacccaggacctctcccatgctaagggaacattataccactaaaccacagccccatcttgatgggtaattgtggacagacgtgtctcacaaatggctcggttaggcggtacgtttgtctgcagcgacaatcacttctccgccgttggatgtggttgactgcttttgaggcgatccgcaagttccaaatgcgggttgtgagaatattcagggggaatcaccgcaaagctgtcatccataagcagcgagtacagagagtagtatggactgctggaggcccattgttggagtatcgcatctctgccttctcagagctgacatccgtttgttgcaggattgatctcaaacattgttagctgaggattgtttcatgtagcagcagcgtcgacattattcacttgacggattggtgccaacactgtcagccaatttcatcgcaagctcgagacaagtttccgttgagtgaccaaggaagttctaccgaagtcgcactatgttcatagctgacatctcccgaggtccaaagctcaacaaaaccaaagataccactggccagtaaagaacatctcgccacgaagttagcaggatggtgtga

SEQ ID NO: 5023 - DNA, 2994 bp, Emericella nidulans
taagagcgtgttcgacgaagccattcggtatgctatccaacgatgatggtgtttgtctatgttggagctaatagtgactcccttagtgctgttctgaacccgcgacctgcgacgaaacagaggaacaagaagtgtacgattctgtgaagcgcaatcgctccatattctatatttctgttcttgctcctgactaataatataaataactaatccggcgtttcggttgctggggaccatcctccccatccccgatttttatgatttttttgagtacttttttttgtccacctagtccggtgtcatgatactgatgttctacatttcttgttccttccttccttccttccttccttccttccttccttctttctttcacttaaagtttgtcggaatacaagagagggtttctgtcgtcttgcatatttgctttcaggccaccccagtataaagatgtaagacggttatacaattccatacccacatacatctgccagcctatagatataccgttgtactcttatcacaattttatgggcttttaatggctttcctctctgcgcggccattcctgtccgcgcagtaaggagctcaggaaaaggtcgtgcattataaaatcacgggactcggaaagctccagaatctcatcgaatcgcaaacgagatatcaaatggaatacaactatcttgtagtaaggagcagctcagaaagttgcggggaaattccccctatgatgagaccacggtcaagaatcaaaatagaaacacaggacttgcttgattagctacctggtagaactaagaatacgaagacacgaaatccccctcaagaacccttctatattggtaggtacttcgatacgaataactctcccatatcgcccgttcacgatatcacggatgagttgacaagtgcatcgcttcgacacggggcccaagtccagcacgccgaacgaaggaagtccaacaccatcatcttcgcagttaggctaatgcaacgaatatgtgggtaacgatagacgacccgtcgcggctgctatctgggggataacttggactgggaagaagggaccggaacgggacgtggcttctggcttaaaaaccgtggaccttaatggtcttggcatcaagctcaagaccttccttcttgtcggtcaagaactcttgaacatccttgcgctggtctccttgaagctgaatcacctcacccatctcggtgtcattgacgatggtgccattgcaagctagggctcatgttagctacgatatcggaaggctagcaaggcacaaagagcataccaaacttcttcttgatcaccttcaagatcttcttctgatcgaacttcttagggagaccctggaccgtagtcaaggtctttcgaccattgcgctctggagtgacgttagtctcaggtccaaaagcggtgaggtgcgatggagctcgtagcgataaaggggaagtcgcacgtacgttgaatccgtatatggatgtagttttgagactgcttagtctcgccggtgtcttcgtcagcttcggcgaaggggtctataggagcacgtgtcagcctgggatctctaccagaattaccccgccagaagggcccacgcagatcgcataacgcagactaagcagggagctggcttcttcttgcagctcgcactcgcagaatggctaaatagctggttccacgagtgtagcaggcagtcatcctcccaagataggcgcgtcgcaagctcatgggagcaggcgctgagaaaggggtggcaaggccttaccgaaggtcttaaggttttcgatggacataaactcggcctttagtcgtaaacggcccttaaaagcggttcttgtaaatgaagcaggaggggagaataaatctcagtgatagagcgatcgcgggtctgcgtgttctgaagtacggagcgttagagtagtgtgatgtggatgaaggaaggaaagatccttttgaggggcgcagtgacttggtggccttaggttgtggggaaaggcggtatgacagtgactaagcggttttgcccgcctactgcgcccaatgactctacagccgcacggcgtacttggtctttagcctttctctttggtctctgcaagccctgtactactcaagaacctatcgcataaggagctcgatgcgccaagcctactgacacgctgccgatgttgcgaggaaaaattttatgtgtagcgtgcgtgacctattccgatgatgtggcaattagtggcgagcctccgacctcgccccaggtttgaatggaaataccgtgataatcgcatttctggaaaacagagtcatttcaatatcaatttattatagaataattagaagcgatacatccgcgctgccgaaaggaagtccatatctgcggagattcgcatcatgccggcccccctcccttatcgtgaatatagaaaacgccgcaagtgcttggactccgattattctggcggagaccatttcaacttcatcgtggaccgaagaaatctgggcggctttacgcagctggtgtgggagacggcgtcgggacggcgccgccgcggggggccgtaggaggaaggaataaggggaggtaggtctgcgaagggtacattagaatcttgcgcgtccttttcgaaagatattccaggagctcgacaacatacaacagctaaagccatcactataaccgtagctcgtcagttggggtcattttcaaagtcacgtatagatagcgcaacatacaagacattccaacagacatgtatgctggtgttgtagcattcttcctttgctcttcggtctcaccaagccaggattgaagcgagaataccatagcgaccctagtacttgttagtttcctgagaacgactggtaggcggcacataccatccgatcattctaaacagcaaaaagtgtcaagtgagtagcgcatttgaagcaattcccaactcacctgttgcgtgtaaacatctataaggattgtcaagtattgcttgataaaa

SEQ ID NO: 5024 - DNA, 13260 bp, Emericella nidulans
catcgctgtattcaaggacatgatggtgacaggcaaggattcggcaaacgattcaacggctctgtacactgcagccctcggactggctgggaacctgcaggcctcagctgtttccgaacaggatgttaacaaagtttccctttccacgctcacggtcctaccccgtcggttcgaaaatcggtttttctacgccagctggttgaaaaaactgattggaatgggtgaagtcgattccgccgctttggtagtcgagctgatgtatgaacgcggtgtgaggccagatccaaagcatcttaatggtctgattgccggctggctacgcgagggaagcgcgcctgctcgagagaaagcggaagagctaggctggtccatgatcaaacagcggatcgaccgagtctccaaagccgaagcaaaggattcagagcaaccagaaactggacgcacgaatgctcgaattccaaaattcatgcaacgaccaatgcctgcagcgaccattgaaacattttcgattctactccttcattataccaggcgaggcgatcaagaagcagtcgaacatcttgtcaagaatctcacgctttcccgtattcaacctaactcttacttcatgaaccatctcctctacgctgaacttcgaaaacaggacattggtgccctctggaacaaatttcaagtactatcatcttccgtgcagccagaccttgaaacatatgcttgcctctgggactgcggcaaacttcaatacgaccgcagccgcacagcatacttcgccgagtttccaacagcccgcgcgctctactcaaacatgatgacctggttctcttatctttccacccgagcccagacaaccgcccgggaagacttttccaaagacctttacgaccaaatcatccgctgcttctgcctctccaaagacctcgcaggtacacttgtcgccctatgctccctgcactcaaccttcggcttccacccggacgaaacaacagcccgtctaatcatcctgcaagtcgcacgtctcgccgccgtcccatcggatacccctaaacgccgtctccgccgcatctcctcaaccccgcatagcaaagcgaatatcgcgcaggtcaagcagcttgttgagatcctcagtgatcgcaaatccgccacacttgaatcgagggggcttaccatcagctcgctagatccgcatgagaaagagatgcatcagcttgagatcatgactgatctgctgcgcatcgtcatgagccgggccgatactagtcctaatcaaacacctgatcccaaccgtgtagaagagcagctttgcactgttgcggaggagatgggtgtgcctgggatttatcttgggccgagattggatgacgagaacgctggcttggtatcaatgagataagagaatgtattggatttggcttgttcataaagggtaggagggatatttcggcgcttatatcgtgtatagagggagtctgggctgccccatggcgttactgtattgtatcacattactcgctgcttgcatatcattaatagactaattcccctctcgatgatttaagtttatactaactactctgtactgtaacttccctacccaaggtaaaatcatgatttccagatccaaccaacactcttgaacatcctggatatgcgcattacgtcaatatggcctataccgtgatatgtttccaagcaggacaactcattctactcaagactcatgaagctgaaagtcgattctgccttggctgtgtggacgcacgaggtgtggctgcggtatcgtggctttgctgtggctagaccgaaacttgatgcaaggcagactttattctcattaacatgttgctgacatgcggcaatcgtggattatggagaataaacaagaacagatgcggtgtatttctccgatagacaccctcatttgtcagagtctggcctgagggaacagatacaggatagttttctcagtcttcgatctgtggggtggtggagatagtagaagctgaaccgctgaaccagaatctaagcagtggatatctgtcaacatcaaaatgtgtacaattatacccgggtcctcagagggaaggagtttcgcgttctgaattggctgagaaacgctaccagtcctagcctctagtttggcgctgactggcgcttgaagctgcagtgttgtgataccaaggtagcctcgacttctttcttttttctcccccaccttgttctggtcgctccccttctttgttcagccctgttgtcggttttttcttttctcagagcctactcccaactgttaaaataattattcttcctttccaaccaacaaacccccttgttttaaccaaaacttagtcttcttttgcttgttgccttcccgtcgttatactggccttaactatcctgctgtcttttatcttatcctgacttgctaggtattggcctctccttctacgtcatattgttgattgggccacaaccatcctggtcctgtcgattatatccgaagcaaggttgaatgacctagacttgcgccagagactgggcaacgttggcggctcgttctcttagaatctgacgtgttgccccattcttcttaaatcctcctgttcccgatcatctacaacgtgctagacatgccactttgtacccttctcatcaggtactagtgctacgtacctctggacacactctagtctgctgagaagaagagctacaccctcctgctcctgatcctcgttgagtcgctgagctttcgtaaacgatcgagtaagaagatgtcggctgtctcgcctcagtttgtccagagcgactcgaacgatagaaatctcgaccccgaactctcaaacccctttcttactgaaaatgaccctgaagaggcggagttccaaaaatttacaataagattgacgcctgtcgacgaccgagggagcgcatggactggatctacgtcctcgcaggatcactccatcaataacacgtccacaacaggcaatcatgagggctacggtaccacctactctgaattcctcagcccagtggacgagtgggccagtgatataagcggccatacatcacctgcagatctcatgattccaggcgtttggccagtcattgctacatcacctcagaacgtaacggcgagctcaccaactcaatctggtcccagtccgtcgtctccgcccgcgagcataaacccttcccagctccttacgccagttcttaccaatcatccaagcccagcgtcggatacgaggagcgttgggagccctcggattccgcgggctcagcagcctcccgtacctcgtttgaaaacaacgctcttagatgacaatctcggccctggtccagtttccgagtcggtcacaacgatcagcccaattgtcaaagtggagagctattcacgaggcgattcgcccgtcagggacagcttctcaacaaaccgccgcccaagtcaatcctccatacatttgtccccggggggcgcgtccaacgcttcgggtgaagatgctaccatagaggatgatcgtcattccgtttcaaggtcagccgatggggcatgggtcccaaatgtgctgactggccaagccggcctcgcaccggatgcgcgagaggatgtatatgttcccagccccaatgaactcgactcacagcgaaaactagcggaaaggaatgccgatatctatacatggtcagaggccgttagtgaggcccacagtgaagctggtgatgattatctgtgtttccagagagggcgaacagattaccatggcactaggcggagggcgaaaagtaccggtgatccttcactcgattatttcagtctaaagttcacccctgaccgatctgagatccgtgggccgggtcttgtgctccatgagacaagcgattatagcgacgatgaaacagagtcatctgctcctgttagtgtaaaggaagagagattggtccaggaagcatttgaaatgacgccccctgaacctcagtctgcagaaacgggtgagccgcaagctcatcagtttctcgggtctcctccgtggcgtgacattgagctcgaccggtctccccaaacaacacggatgcagccggtcagctccactcaagctatggttgaataccaaagacgtgctagagagactgacgctatatcccgcgttgcaacgtggggcacgcgcgatcttgatgccaacagtatcagatccttccagatgatgagcctcaacgaaaatgggaaagaaaagaagcacgagagacgtaacagttttctcaagtatcttccccaaaaaaaaggcaatctcctgaaacgtcaacgccaaaagactgatctttctaccatgcagcctgtccacgaaggcgaagcccaggacacggagagcaaggctgctccccagaggaaagacagcttcccgcaccgattaagtctccccttttctccaaaaactaccctaactatagtattagtggtgcggttatggcaacaacgaggcagatggctgccattggcggcaaagattcgctaagtgttgtatctccaagcacaacaacaacaacaacaaccaaaccttggaatactctcaaggttcggggacggagcagaagtgaagtacccagagcaccaggtttgtttgaactcatgacaacccatggcggaccgccagttcccaatatcagctacacaagtgagcccgtggaaaataaagaggccaagcatgcgcggccacaacatgatgctgccgaggaagatgatgacgatgatagcgaagaaaagcttattatggaatttccaattccgaaggaactaccgataccgacactggaaggattcaagacacagattctccggctcaacccccgtatcgaaccggctttgattgatcgatttgcacacgagcaggtccgacgatacaagaggttgatcgagatcaagcaaacacacgcacgcgatgtcaaccacaggaagtgcaaggctggtaaattctgcttcgccctgggcggtacagcgaaacttttaccaccacgcttatcagctcaggatggagattcgcacacccagttccagattcctaggccgggagaggaggaagagagctccgaagatcttggggaaaccaccatgttagcccatttcccgcaaggcgttccgcatccaccaccacaggtcaagctactgccggctgaatttgaatgtatggtttgctaccatgtcaagaaattccagaaaccgtcggactggacgaagcatatctatgaagatgtgcaaccattcacttgcacgtttcccgactgcaccgatcccaagtccttcaaacgaaaagctgactgggttcggcatgagagcgaacggcaccggcagctcgaatggtgggaatgctcgctcgctgattgtcgccacaagtgttatcgcaaagacaacttcgtgcagcacctcgttcgagaacacaagatgccagaaccaaaagtcaaaaaaccaagaaacaggaagttgtcagacggggcgtcgaacgacccaacttcccttgaggtgcaggaggagatcaaccgtgagcgagagatcaatggcctgtggaagcttgtggagagctgtcatttcgagactgcgagaaatccccgcgaggagccttgccggttttgcggcaatggtttgcaccaattggaaaaagctcacggtacatctggcaaaacacatggagctattggctattccaattctgggattcgtgttatatagatatttcccgtacaccgtcaatatcggctcgagtggcaacccagataatttctctggtcaagtgccgatcgcccagaaagacagcgattttgatccaagattagacactggagttaccgaggggcctggaactgcggacaatttcacgcaggcaccgtattcgaatagccatccagggtcttccgaaccgattatgttaccgttcaatacgggcgcatcgtacctccctaacgcctctatgcctttggatagtacagcacccaacccggcagctcgtttcgaaggagtcacgccgtacacagcacatggcggaggcgtggctggactcgctggggaccagacacggttaatggccatgcaccagcatcagaattcagtcacctaccctccattcaacgccaggccgcgactaactgtccccaatcaagacatgagggtgctgccggaatataacagtttctccatgtcccccacggagatgcagtacgatccacaaaccacggcgtacgtgtccagcggagcggagaaccactatccttaccaaggaccaatagcttcggctatgccttacgattcagggtaccaaggccaatgagttggccttggaccagttaacggcgggatttttccagctactttttgtacgtgataccccagtggcagacttgacggatcgtggggtggaaaccgtggaatggagttccaagctagaactttgcttctttggatggccttgtttattgccatgttgagaactacacggttgacattgattctcttttttcttatttttattactctctagcatggtcgtgcgatgtgatcggcgtttgttatatcactctatatacccttgaaaccccccctcccccttattgggcgcggtgactgctcgacatgactattagctctttttttgcgatgattcttggcacagtgcgatagatgtatatgacggatcaatgattatgatattggacgtctttcgatagacttgtcaagggaacgttcctagtccacttctccagtgattgaattgaactactgataaggactatggagcaatacctactattccggagtccgtagtggcttaactaggcccggcgatcgacatctgatggaatgccaggattgtcggcttgtcagttgttcttcttcctacagcggagtagctgtttctcaagcctccttacaggcacagccacgccgcttcagagagatgagagtttacaccgtagagacagccttatgacaaccttgattcctaataatgagcagcaaatgagaatttttcatatccgcggatgcctcactttcatctgcagccaacagcactaatcctgcacacactcggcctattctcgtccgataatcatagtgcctaacgagtcttgacacgagtctagtcctgtcattcttcagtgttcgcgtgggggcccgaagacctttgctctcaagattgtctttgcatctacgaaatactctgctcacatctgcttgcttttttctcccggcttcaatccctctctccaaccttcttccatccgatcctttctttttccgcacactcaacgcctatcgtccaggttatgtccaacaaaaggttgtccacataatcgcctgagactttggacccgatcccatcatctgtcaccgccgccgttcatctctagtgctgtaaactccgtcctttcagcctcccgcttcgacctatatgacgtccctgcgttcaatcccaacagtgtcactgccagcattttccgtcttatcgcactcctcgcttgagtttcgtcggtaacacagacctgtgcagaaaatccctgctcgagtcaattcttgtttgtcttggtcgcaccgattgccactatgagtgtaggtacccgctcagttctccccgagcttgccctgccccaaaccctcacattgactataaccaagaagaaaaaagtataatttatggtactatgcatcaagaatgctaaatattttcaggggtcaaaccatatctggggcgactccagcgatattcttcagggcatcagttcaacgcctgcaggcgagctttctcccaacgaaccctccgccgaattgagccccagcgatccagcttcttttctgggatatcagtttgcgacagaccacggcgctccttcacaaaatcacggcctcttccttaatcactggatacgaccccaaaagcagtcggcatcgcccagtccacagcctctcgaatatttccactactcgtctgcgcggttcctgagagaccaggattcatggactccccttcgaatcaccggtgtacctgccaatgtgacttactccacgcggccatcggagatggttcaagagctgggcgagtttgatcgtaggtgttctgctagccattatagcgaaccctctgagactggaagtcagtacaatggcctacactcgtccgactctggatacagcactcgcagttgcacgacacggtccatcgctacctcatatgctgtaggttctgcttgcagtccgcgccttaccccgcaagagtacgaacatggcgagaaaacggcgccggtaggcgccgagttagcgcatcattatgaacctatggatattgtcggtccaccagagtcgccgtctatatttggtcatgaagtgatcaaatgcgactacccaaaatgtccgtggactggcaagtgtccgtctgataaaaggtaaacaccttaagccggttcgcgttttgtaccgatttcctgattgtattatgcagaaaacatgaagcccggcataagaagctatttaagtgtgatatactgaactgtagacgcaaggaagggtttggcaccatcaatgatcttgcacggcataagaaatgcgttcataagaaggagccggagcgtgggcccaaggtattatatatgtgctttggacggaactgcccacgaagcagtaagaagtggccccgcctggacaatttccgtcaacaccttgctcgcatgcataataatgaagacgccgatgaactgctgaggaggtaagctcacacgtaaatcctactaagtgaagtatgaagtctgaccgggtctcaggtctcgtgagtggtacgaaaacctaaagtcaaaggatactgtatctatacatacggacaacatgcctgaacaggcaacactgtcacaagtccgacccgaatcaggaatcatggttcaatccgctagcaatgacctccaagatccgcttgccgcgatccatacagctttccaggccgccaactcgagcatgttatcgttagacccagtcagagagcacagcatgctcgacatcgatcatactcgggccattgagctggcagaattgaagctggggccagcgttggagcagaatccttcccagcctgccaatccacggcatgataaaatggacaatatgatatctgaagcggcggtgagtgtgataaatgctatgacgaaaatgatcaacaatcatcagcggagacgtggccacctgggggaagacgatataaccgaacaggatggcgaattatcagatcggaaccgagacatcctgcagaagatcttggttacggcatcggagctgctatcggggagtccaggaccaggaaatagcaatcccctcgagaagactagtaacaggtcggacagggcgagctggagtcaatgtgagttttgtccagaataaacacgtctgcgctatgggatgaaataagtccacgcaagacgttagtcttgtatatatctaaaattgtccttagaaaacaccaaaaacgaggcgaagagccatacagctgcacatttcacaactgtgacaacaaaaaagagataatcagacggactttgaggaacacgagcggttgcaacgtttcgtgtgcatgcaaattttaggcagacgagattcttacgcttggcatctcaagcgcaatactgattgtcaacggagagcgcagaccttaacatgttgattttgctcggtgagacggacagcccgcattccggtatgggtttttgtcgtggtatagtctacctggcaatggcattctaaccttgaatctgcgcctcaaacacactgatctccagcacttcaaatatggtgagcgcattgataacttggtttttgccttctgaccatgggcatgttagcagtgcgccaacacacatacacaacaagagtgagcacgaggagcagaaggcataagatacgggattgacggtaaggttggtctgggtgaggttgactaccataatgggaagtccattgtgcagcagtgacccggtgcatgaggctgcataagcgggcagaactataacctgatcatggctcactcgagccatcatgatgcttcaacagctttgaaacttgaacagtcttatgaaaagtggacaaatgatcaggacaacgtcgatctaatttcaatttcttttctcttctttcattggtccattctttcattcttcctttttatctctctctctctctctcttgtcttattggaaaaagagttggaccagcaatgggaaaaaagctgcgagcacaaattgcgctatgtatgaacattggctaaagcatggatatgctggctgtgcgtggaagctgttataaagaaaagtacttgatacctagttggcataggttagctgtgtaaatacccctaagcatgtcggcgtctaaaatatgtagcaggaaaaaacatcaatctgataagtggactacgggcttgactcatgaatgaaggggtatatttcgtggatagtagacacatacatatactaacaaattggaatacattctataccatataccaatctcaccatttcatttcttcccagtcccggtcagctctcttgcctccgtctccaaggcagcgagttgctctaacaaataccgttagcttaagcaagatgtaaagccgaagatgagaacacacggttcttctcaaccttgacctcctccatctccaacttcacccaggtccagtatataacctggtacgtgaagacggcgcccaggaagacctttgcaaacgggctggcgaagactttgtagcgcgacatctaacatagcaattcagcgagtcattcttcctgattgataagcacggctaaaagatgacttactccttccttgtaggcacttgtttctggttgctgggttggtggatgcggcggcataccggtgttcagtcgggtgcgggtggttgttaagtttctgcggaaaagcgcccgagagcaattgaagttgagacgaggaggcatgttaaattaatatactgactgatgaggtaactattcaatctaatgagttctgcttctattctatgttttatagagacgaagctattttgatgttcaagggcgggctgactcagcgatcacatgatatcaagggccccgggtcaagttccagacggaggtcaagaacaagcggggaggaagcgaagtcaaaaggcgataagcttagatgcagggcggaggcgctggtcaaaaaacaggctgcgtgtttgttcttttccatcactctttactcttcatccctctgtgaccaaaatcagtcaagcgggtcggaaagagccgctgaaatgcggcaattcaactcagaatgacatccggggcttatttctgatgttttacaggtttgatagggatggcgttgtggtgtttacggtgggttctgatgtgctgggtttgccgtgatctcggacggatcccagcccaggccagcccagttgcgattgttcgtggccactagccgaaaagttgagaattgggtgggggtccaggtcttattgcctgagcgcttaggcaggaactgggcattggccgcgccgctagacctatcaggggtctagttgtggcttatgtgtggctgacgcagcaggacgactgactccagcctcaagacttgctcgcagtgggaggtcgggatcgtgacaaagagggcgctgctaaaagtgattaaccccatcactcagttagcctattttgattgatgacaataaattgactttacaggcttgttgaataggtatgcgtgctcatccatcatttgtttttgttacatctcagttttgattttcgatgtgctgacacccgtcgagaccgagcactcggactaactaggctctccacgagacgagcgaagtgccgcctgcctacgacgcgtcttaacgttgtctattacttccattctttactccgttcatttttgctctcgatccgcggtcggctcgccttgttttgagtatttgttgtgcagtggtcgataatagattccttttgttcgacgtcgctcttttgctacaacagctgtccctgcgcattcgctacaagtactcaagtgactttacttgctgaaatactatccattggcctttgctttgctggggttcgccgcttttctagattactttcggcccttcttcatgccagcacctcctcgttaagtactgcgtgtgaaggacaatcgagatctaatctcggtttttgttggtgagttactgagcccgtaacggaattgacttctcgaccatgttactttagcgtccgtcccttgtcgttctactttgagttatcttgcgcgtcccccgcgtccgttgcatactgatggcattcagcagagcccgtgcagcagccatggcccgtatcaaaagatccctggaagagatcgcgaataaatccgactcagatgatgacgactacagcgaccaccccgttcgtaacagccggcgttctgcctcgaagtcgaagtcgaggaagaaaaaccgtcctacgaagaaaagggcgcggcgcgattccgatgatgatatagtctccgatgaggacgaaattagcgaattcgatgacgaatttgacttcgaagggtcgcccgaggaggaggatgttgacgctccgagaacagcccggggaacagtcgcgcgcagggccgccacaaataggccagtctacaacgagggctcagatagtattgaggatgaggaggaagaagatgaagaagacgttgttccctctccgaagaaggtggtgaagctgaaagtcaatgcgctgaagcggcaagcgttctcggataatcctacaggcactcggcgtaccactcgacgaaatcgcgatccgtctgaagacatatatgcattgacgaactcggggcgccatgttcagacggtgcaaaaaggcacgcatagtccagaagcagagcgcggtcgccgctcgtcgcgcgggtctaagcgcgctcccgaggtcgagggtgaggctgacgaagctgacgcgaagatggaggatcccgaggttatcgaggagactttgacagagatcaagacctcacagctggagatccaagagagtgcacctaactctttcagagatgacgatggacaagatgcgccagccgaggatgaaggctttgtgccagaatctgagaacggtgagggaaatacgaaagtagatgaggatgatgatgatgatgacgacgacgatgaggggccaactacaaggcgacggaatagacctaaccgcaaccaaaatactcaagaagccacacaacaa

SEQ ID NO: 5025 - DNA, 5333 bp, Emericella nidulans
gagcaccttgctcaaaccattttccgagacctggtttgacaagctagatcagagtctgatttatgtggtattctgggaagagtggcctacgttgggaatgggaatgggctctgtggggtcacccaggtcctcgagcatgttcttgatgagaagagaacgttcggcaacatcgcgggctgatcgactgttagctcctcgacatgacagcgacgcttgggagaagcgcaggtccggaatcacatacggacttcgatgttcttgccatcgttgctggtcataacaagcattttctcggccattttgaacgactggagttgctacagtcgacgttagtttttggtgtccgaaataccgaaggtaggagttgaattgtgcaagcttggggtcggctctggtgttaatgaagaggggtctaaaggcggggagcgcagttagtaagggtggtaattaaccgatcgcaattaggattataagccagtggatagagattgaaaatatagattcgtattatgacagcgaaaataattcgtgtgagcgagacacttggataacggtggtgagtggtataagtaggcggcaagaaagaggcgagaggtgtaggttagcaagatacagacttagtgtcggcgaaggcgtccgtcacattatcactattcccccggttttcactctctatttattcccatagcgctctctcaggcaccagtctcagcccatcgaagatcccttgcctagttctcatctccaaggagtggagagttctttattcagggtgttggctgatgacttccagactattctagctcagcatgatcatgattcaaagccgaccgaaatagaacaccagtgtcatactgtataatcgagagtttacagatagcaagcgcggatgaatgcggctcttgggtctcaagcatctctttcagtctgttaaagccactcaacctcgatcccctcaattagtttcacgatcgagtttggaacagtgtctctgctttatccaaatgaaatgagatgaatcgatagtttgtcttagtgatatcattccccaacgcgtctcttttccactcgctggcctccctgaattgcattccgactattagtttctttttctgctccgtacctttttctcgttttgttttttttttttcccgtaaaatctttaccgtcgtaatatctctccttcgagagtttttcaagacctcttgcccaacgactcgcgtcttgatgtcgcgacgtgatcaaatttgatcggttccacggcgtcctgattgcagcagcatgtgcagtacaagaattacgctccggatatacctccatctgtctaatctcccgtcttgcaacctatccaaaccatgtggaggcgaacatacttgctcctcttattgatccgggcctacttcgcgctgagccccagctacatccaccccgacgagcattttcagggcctcgaggtcttcgcaggtaagctctttgtcaattaaaccgagttgtccctggcttggtgcggcttgggtcatttgacgatgcggcggcgcgactgattaaccccacacaccacatcactcacaccatgcgccaatactcaccatgttctgctttgcaatacttacgcagtttctttcgtaggccgaatcctctcctatccgtcgcggctaccgtgggagtttacctccgagcgcccgatccgcagcgtctttccgctgtacccgatttatggcgtcccgataagcctcctgaaatggttctataccgagactgggacggaaagcccaccggcggagctagtatactatgttgttcggggggtcatgttcttgctgagcttcgtgctggaagactgggccgatgcacgatctggtgtttctcccgcgccatcgccgagtagctctggtgttggtggcatcctcatatgtcacctggactcatcagacgcacacattctcaaactcgctcgagacgctgttggttgcttggggtctagtcttgatcaaccgtattattgataacaaggtgcgaagccggaatctggagagtgatgactggctaatgggtgatagcggcgctcctctctcttctcttgcgctattctatcctttatctgcgtagcaggtatctttaacaggatcacatttccagccttcctggtcgttccaggactccagttactaccgcatttttggcgcaagtaagttccgttgcagttgtctttaggtctggttgtttacaatttcccgcgcaggccattatcgttcttttcccttgttggattcggtctcgtcttcttctgcattgctgtcttcgccgacacgacattctacaaaccatcggcatcgttcgcggatgtcttgcgctcgccggtaatcacaccacttaataatctcctctacaacaccgacaattccaacctggctctccatggacttcatcctcattataaccacttcctagtcaaccttcctcaacttcttggccctgcgcttgtggccatggttttgcaagcgtacaacagaggcttcatagcctcttggtttaagaacctccgcgcagcttctgctctatcggcaaccgcaatgctgtcaatctttcctcaccaggaacctcggttcttgataccttgtgtgcctctgctcctcagctgccttcaagtccgcaaatcgcgcatatttttaggagcttgggtcatatttaacgcaaccttgggtttcttgatgggtgtataccatcagggcggcgtcgtgtccacacagctagcagttccgtccgtcatatcaactaccacgtctctgtggcacgaatcgttgaagggcacacagtctctattcgctactgtagtatggtggaagacgtattctccgccactgtggctactaggcgacaactctaccctaaatctgaacatcgacacccgtgacttgatgggcaagcccgggtcagaaatggtcaaagagcttgagcgcttagtccccacctgcggctcaaagcagaagagcaccgagttaacgtcgagcttggaacagcccgatgctgtcttcgtagtcgctcccaaatcagtgacctttcttgaccagttcctggctccgcagtctcctgattcaagtctggaactgcttgagctatggagttacaagaagcatataagtctagatgacttggactttggctccgatggcgttttgcccaccatgaagcgcgtgattggcagacgtggattgggagtctggcttgcgcaacgccccgggtgccgcgccattgacagctaagcttccagagctatgccaatccgtactatgtcagtcaacacagcttatatcaaggttgcggatagctaacacttgcaattcaccttgtcatattgctgtctatatccctgattgacgccaatctcttctctatcttcacttctctgtacatgccttgttcttttttcccttttctttgaactcgataatattcccgggtgaattgattaggagattatataatatacccttccttcctatctacccttcttttcggagtcttcacattcgtcttaacaccatttggttgaaatccatggcaaatataccctcccgacattctcggatgatattatgacaatcctattcactgcgttgagtctttcctacgagatggttgacttcaggaatccttgaaataatatagcgtgctctgcgcatttcggcctttgaccagtcctgctctgtattactgaatggtattgcaccaggattgtggtgcaaccagcagccttttcatgtagcttagtggttctttataatataggtcacataagcacatgaaaaaataaaggtggctgcttaaattgtgtcaactgtgtacagagtcgagtcggcgaaagagaatctgcccaagcatagcttgtacaaataggttacgaatactgaagcgccgatgttgaatatctgctcggagtccagtcgctacgagaaagaaaaagagacatataacgtaagccgaatcgcggttactcagtatgggagggtgatagattgacagaaaagtagcggcacaccataattaactaaagtcggatgatagtttcatgcatcgtcaccgtcgtcagaattctcaaacaggtagtttgccgcgagctcttcgttcttatcgcaggcgaaataggcttgaataactaggtctcgcggaaatccgagtcggcagagctagggctaagtcagctaagagaaaaagaacggccaaggaatcgaaagcatacccgttcgatggcgtctcgctcctcttccgtaacgtgaatctgggttgtgcccggaggaagtgcagcatcgtcctcttcgctcaacaattgaaggaaagcttcctcgttttggccaatgagctgggcaatctgggggttacctgaccaacttgctgaaggataggttccagcatctgaggttgctgttggactagctggcgaagttgctggaaagctggatgattgcgtaagaagtcgagtgactggggttcgccaccagacgcaccgccagcgccgccgcgaccttcaccagcctgagcagcagcctcaaagaggttgaccggctcgtcttctccagaggtagcaggtggagctccgctagcagcggcggcttgaggagcggcaggggtggtagcggctgatctttgttgttgctcctgctggatattttccggaatgcccttgattgcaaaggcagagatcagtaactgttacgtgaattgaaacacgacaagactcacattcagcagatattcaattgcccggtctgggttgaagaacgccgccctcatagcacggttgatttgctcccgctcaaagcccatgctcatcatctggttgattacttcttcactttgcgagccagtcaacagcgctgaaggatcgttgaaagtgctagcagaggactgggcagccccagatgaagcgggcgaaggggttgccggaacggggccagaggtggctgttgtagatgtgtttgtggacggagcgggagcaggagggggcgcgggagttgaagtcactgatttagctggtgttgacggactttgcgaggacggctgagttttgggctgaggaatctcgtagttagtacggttgtatcaaagaaaaacttgaaaagcttataccttagaaaccatgcacacgataaatcccttttcctcgatgttgtagaactcaaccgtcttgtcatcctgaaggatcttccctgcaaagttggaaaatacgtcagccatgagtatcgacacgttgcaagaaaccaattaactaaccagagtaaatgagcttcagcgaaggtacatcccaccctttctccgtggagatcttctctttc

SEQ ID NO: 5026 - DNA, 2582 bp, Emericella nidulans
cttcaacgtcgaatcgctccccggatttcgcttgcacccagtttccatgtagtagggaggcttcatgtagcagccctggggtgtcgagctacgagaaaaattagtatcgcccgcattctcacacgggaaggctcgagataatgtcgcaccgtgaatggtagtgttcgccccatcatacaaggttatatcgtaacttgacagcaactgttcgtatgcaactgtttgatctgtgtatgaagtcagatggaaagtataatactatacgtctcatgcaagagaccaggggcaggccccctttatagttacgctgaacccgaccagtagtgcctttcctttcagggtgcagaagaccggtctctaactttctgtcgcaatagccattacgcaattagcccaactgttaggagggctggaatgacggtatgaggaactatctggggcgtcatcttgcagtaggagatcgtagtgacctggctagtcccttcccccagtcattcaacaaagtacaattaaactaccgactaagtttatttgtttgataatattcaccgttgaatactcatacacagctcgactgaattctctatttccacttataagaggtgcaagcgtccagtaaatgttgtggaacttgcgttggaggcgttgcagccccataatgcaatccgtcatcctctccagggtggcaatgaaatttgagatgccaacagatttgttgaatgggacgcaggattgtttgggaccgagaggagaaggactggtttgatggtcttcgatgtcgctcggtccttcctttctagatagccgatgctatgagcagtcatactggagtgaacagatctagcggagatgctacgaagacctggtggacttggacaggcggcgatagcgaataagccccttctccctgtgttcgctggccctaaaaacaagcttaacctttaggggatgttaactcccggctagccctaaccttagcggtcaggccccatggctggcccggttatacttaacgttagcgatcaggaggcgcctttcgataacatcctcgtatctgcgtggccaacaggcccgacctagtcggtcagccaagggccacccacattcttctccaaggctgccgatctacggcaattccaggtctatttaaggtcgccgctcgatcctcaagattatctccggacgctgttcacatgagcaaacacacatttcgcgtttctctacaatgactggcaagatgcatcctttcgaccctctctccccagaggagatctccaaggtttgtccgtgccatcatcgtcagaccaacctcgttgctagttatttttgctaattatgcaaggctgcgaccattgttcgtggacaattccctgggcaatcgccagcgtttcgtttcatcacgctcaaagagccatcaaagcaggagatgatgcccttcctagagagtgagcatcgtggcatcccagcagcgaaacggcctgctcgtgtttctcgcgtccaagtagttctgcgaggaaacgatggagccaaccagctccgagaacttctgatagatctggactcgacaggtgtactcaagaacgaccatctagtaggcaggcactcttatatcgactcagactacatgagactcgtcgaatccgcttgtctggcggatcaacgagtccaggacgagattaagaagctcaagttgccgcctagctcgactgttatcgttgaaccgtgggcgtatggaacggatggcacatatgacgggttggagcgagttacaatggtgcgttcaacaaatcccatatattcctctctatggtctgaaattttgacttcttctgacttctgtccagtgctggttctacttacgccttctcgacaatccggatgcgaactactatgcctatcccctggatttgtgcgcagaggtgtctgagcagctaaaggtcatcaaaatctactatctaccatcagcccaaaatgaccgaataactgaccaagcgcgaccgtttgatatcaagaaaatccactctacagcagaaagcgagtaccatccaagcttgcgtccccctccccggaacacgacaaagccctaccaggtggtccagccggaacgccgtcctttaccatcaagggtaaccacatctcgtgggagaagtggacaatgcgcgtaggatttaactaccgggagggtctgacgctccacgacatccgctatgatggacgcagcttattctaccgtctctctctgtccgagatgtttgtaccctacggagacccgcgctcgccttatcctcgcaaggctgcatttgacctaggaagtgacggggctggcatcaatgccaacaaccttcgcctaggatgtgactgcctaggcctgattaaatactttgatggttggcacaacacttcttctggggagccactgaagctccctaatgtcgtctgctgccacgagcaggacgacggcattctttggaaacacaccaacttccgcacacagaacgccgtcgtgacgcgtgcacgcgatcctggtgttgcagacaatcatcaccgtcagcaactatgaatatatctttggcttccagttt

SEQ ID NO: 5027 - DNA, 5727 bp, Emericella nidulans
ggcttgcaaagagaatttttccgacccctcttcgccttatcgataacaatcgccgagaaccctccccccccatgagcctttcccttgaacaatgagcatacacttacccatgagttaattgcagatcctctctggtaaagggggagttggcaagtcgtcagtcaccctccagctcgccctagctctcaccttacaaggcaaatctgttggagtcctcgacatcgacctaacagggccctctatcccacgtctcgtcggtcttgaaggcgcaaagatcacacaatcctcgaacgggtgggttcctgtaccagtacatgaagctgaggcccaaacagcttcaggtaacgatgctgcggttgcgctttcagacgatggtggagatgagaataaggacgtagaacgtgcaaagccaagaggaagcctccgttgcatgtcgctcggctttctcctccgcgaccgcggtgacgctgttatctggcgcggacccaagaagacagcaatgatccgacaattccttacagatgtctactggggtgacaccgattacctgcttgtcgacacgccgccagggacaagcgacgagcatattgcgcttgcagaggaactgctgaaattgtcaaccacgagcccatcttctaccggtgtcggtgcgctcccccgcctcacaggcgccgtcctcgtcacaacaccccaagcaatcgcgacttcggacgtgcgcaaggaggtgaatttctgcgtcaagacgaatatacctactttgggtgttatagaaaacatgtccggttacacgtgtccgtgttgcggggaggtgagtaatctgttttcgagtgggggtgggcaaggtgatggcgcggcacatgggagtaaggtttctggggaaggttcctgttgatgtgcagtttggcgctttggtagaggggaagagtcaggaggaaagcgatgatgaggatgaagatcgggaacggaacaaagtggaagaggagaaagggcaggattttgttgacgagcgaccgctggtggagaggtacaaggaatgctggtcgtatgggcagtttgagggttttgctaagacgctgataggggagattgagggttgatatacatgagtgacggagttaaaaggtgaaagtcggttatttcataaaatgataagcatcgtgtcatggagatctcatgagaggtggaaacattcatagatctcaataaaaatatcgctaatcaacagtatcgctaaagcaaacttggccgcaagatctgattatatactcatcgtgtcctataacagaaacagaagatagtccccgcccgggaagggtattaaaatagcaactcgtgcactgaacttgtatcaagaagacactggctcactctgtcgctcaagagtcgcccgcagtcgactttcagctgactgttgctcgatgctgcagccgtcgctccatgcagcttgtttcagccagcggaagagtgactgcacatcggacgacttgccgcagtctgtccactggctcgataggtctgcctgggacagctggccgggaagatggtcagatttcagacggccattggcttgggcatcgagaaggatctccgatactagagccggagtgaggatattttgaactcggtcattgtctctttcagctatccctaacaacgcccgtccgccagctttgggtttggatgcaaactcgcgcttagtaggaagctggccggtcgattgatggtctagatgatcgttcgtaggtacaggctgcgagggtgcggtgatgggaggaagaagggcgtcgaagaaggtgtaatttgagaatggagtgtggtccctgccgtcgacaggattgtcatcatcataaataaccacattatcgccagagtgttcctcatgaacagagctggcctcttcaacagtaacaagccccccaggcggcgcacgaatctcgcctagaggcgcaatatgactgccatactcgttggcgagactgagcttgctacgaccgcagatctccccgattgagtcgagcgtgctgcgaatattcggctcgatcgcacgaaggatgccgtcaatactgaactcttcgccagccgggagctcgggctcgggctcgcgtcgttgctgattgttgggggccctcgagaatagaaatgaccgccgtgcaggcatcttggatggatcggagttatcattaggatctcccgagtaagatctgacaagaacgggctgcgaagctaagctcgaagacttgctgctgctaggattataggctgctgcttggcgcgtcttccaggacaagggcttgggagcgctgttgccgtgaagatggcgtaacgcagatatgcgataagcgcaagcagtctcatctagggattcatatcgacagggattcgggctggtgttcgcttgccgcaagaaaccagcggtttcaggggaggacaacgaagaagaagagggcgcagtggcgtgctgctgcgacctctgccgtggagacgaagaggatagtggtcgtcgcattgcatcgaagtgggaggacaacctgccagatggcgtgcgatccatttccatcagaggaggcggccagttgctatcacaatacggccgtagtggttgcgtctgtagctccaaacgagaatgtatccagctcttggtgacgcagcgggaaaagacacgagcggaacacgacaacggtcaccacgggcttagcatgaaaccccgcttctcaggtagaacgattactgtcgggccacaaacactgagacagacacgtaggggcagtccagcacattgcatagagaaacacaggctgcacgagctgaggcggtgtcagacaagctggcgtgcatcggataagcataatcggccttgtcgggacacctgtcgtgctcctgattgaggcgggaagatgcaggcatgggacgaggatgagttggcaggaatatcttactcgggtctggagaatactccgcagtcattgctctgccttgtttatctaccggtacctagttgttagcgcagacgatggccagacccatccaactccacacccgcacccctctcaagcattattccactacgtttgacacttctcgctcacatgcagcgtattgtgcctaagtgcctccgccacatgctcattaatcttgctgacaacttggatggccgccaaaatgaacaagtttcgcgtacgcaccgctatttgtctatccttgttggcttccagcaccagtcagctgacatcaatgaatccctagttcggtgactctgatgaatcggcatcagacgacgatacctccagtcttccattccccgagcccttgtcccgatcttcgtttcttgctccagacttcgatccagcgacgtatctctcctccctgaccaaccgtcaccagagtctcgaggacctgcgccaggaattacgcaatctagaccaattgctcagccgcgaactattggatctggtcaatgagaactaccaggactttctgtcattaggtagtgcgcttgagggaggagaggagaaagttgagcaagttcgcgtcggacttctcgcgtttcaacgcgatgtccagtcaatcagggataaagtcgaggcgaggcagagggaagtcgcgggattgttgaacgaaaagaagcggctgagggcaaatgcgaacattgggtgtgcgctgctggaatttgcggatcggattgaggagttggaaaagagattaatgataggggagcaaacgccacaggagaagccggcggagctgtctgatacagattcggatttcctggagagtgaagacgaggacgagacggaggatgaagatcgcggcgacaatgcacctccgcttgtctcgctcaaacggcttgagcgccatctacagaagtatgtttatctcacgagactctcgtcccgcgttggagacgaacatccgttcctactcgcgcagcagcagcgcatgtcgaaaattcgctcggcgttactcttagatttgagaaaggcacttgaagaaacgaagcaagcgcgagagaagcgggacaccaaaacgctggccgttttgcgtctatacaaactcatgggggaggatacgagtgctgtgtccgccctaaaagacttgactatatagaattgcgtttgttattgcatagcgccggcgttgagagtatatgcttgaaccattcccattataatacaccgtacccttcctaataaaacatgttctgtacagcatgatcgagactagtttacggaccggtcaacaaggcaggatccacagagttctcggtcttgaactctccattcagactgaagccaggaccgtgggttgagctcagcacctgcagtcgatcagtaatagccagacagtgttgatatttccgcacttacaacttcgtagatttcttttgtgattcggtcgttgaggctagcagcatcctttttcacttgatcaatggtaacacgaaggttgtcccgtagttgctctggagaaaatcccagctggccgatggggagacggaccacagcgtcacgctccctgtacaccgtacctccacgaagcatttcgacacgagcagccacatcttcgacaacggtaccggtcttcgcactaggcatcagaccccggggaccgagaatccttcccagcccagccttagctaacgcgggcatactgtccggatgagcaaggcaacgatcgaattcaatccttccgctcttcacgacttcaaatacttcatcctctcccactagcaccgctcctgctgcaagtgcgtccttcgcatgttttgagccaggcggacagatcacgcaaattcgtgattcggtttggacggagtgagggaatcggatcatgttgcggatgacagggccgtctcgccgggttttcagtcggatgtgaacttcatatttggataccgctggctcccgcccgacttcgaatgctcgaaggtacctggcattgagatgtgtttagagagtgctgcagcaaggtccggaaggactagaatatacctcatcgcatcacagagtgcgaactgctccacatctttcaggtccttctgtttgaactcacgagggccctttttactctttgcagacttagcagccttatctctcttccttcgctccgctgcctgcttgttcctcgcagtcgcggctccccgagcctgagcctgttgatacccgaaaaacaggggcgccgccattgacccctgtcgaatggaaggccgacatattgacagtaatgccctcgccccggtgggcatcagcgcgctgaatgaggacatggtttcggccccgtatggatgtgtaatgcttccatgtccagcaattgttttccgccgaagctttgcgctggccggagacggggcggaagaacgtagctccggccgcgtctttttttttgagtcaagccatcaaagccccgccatttattgcttttagagtcattcttttcctgctggagtctgttcggggaaatcgctgcaatatgtctcaattccagctgactttggctaccaaggccaaccaagctgctttgctgcccatcctgctcgttgcaacttctgtcaacgaagcccgacctgccccagttattaccatcaattatgaagatgccacagttctcccgcggggcgacaaggagattgtcgagtttaccgctgcaacggcacactagtctacggatctgctgccttcaaggagcttcttctcagcttcccttatctgaacagcaaggaagagaagctgg

SEQ ID NO: 5028 - DNA, 4345 bp, Emericella nidulans
cggcaagagtgggaagcaggggattgtacctgtcgatatatattagcacattgattcgcatgaggctgtgtcggccggatagtgaggtacatcattcccgaaatcatcttttcgtaatcctcacacatggggatgtggtccagcccgcgtgcaatctcgataatctccggccttttcgctggggcggccattgtgctacactgagtgtggggtatgaatgggtttggagttggacttgaattaggagtctgaatcggagtcagtatttagttcgctcagtcatgggtatctaataggtatggattacaaagacttaagataggaaggtcttgatgtctggaattgactcgcgtaatatcaaggcgaggttgaatgtcattgttgaagatcctctgcgcccaacttggaatataggcttgggctaagatgagactataccagtttaggctagttcaggcgctgtcagccaataattcgctgtgtctatagtacgcgatcttctcccatttatcgagtctgtagcattgagtgagggtagggattggcttgacgagacatatctgcgcaatttagtcccaatagtctcttcaatgcctacatgatctgctatcattccatcggtcccttgcggatttgctgtacctttattcctcagaagtaaatcttggcccaggaatcgaactcaggtgaatggcgagccaaagggattgctcttcacttgcctcacagttcatggtgtagacaatggcgaaacactaagagccccaatataggtcttactggttcacatacggacaggtatatgtggaaaaggacagtctgagcaaatgagggttgaagtttatggaggagtgtcaacgacgtgagacactctgggctccactcagagcctggaagccacgctgcatagtggcagaatggatggaaaagatgtgaaagacaaataacgacgagtctccgggccactcacgttaaactccgatatcccatataatagaatcaccacgcaaccataatactcctcgttttccacgggccattcactccttcaggcttcatataaagcacagcctgtgtcggattggccttgatttccttcagctgaacaacttcatacacccttgccaatgggccgatgtccttttcgctcgtcggtggctccggacactgactttcctcaacttcgacaacgactttcgtaacctgcgcacaaagtcgtgcattccacattccttcgcgcttggagtgttggaagagaatattgagggcgcgccggcggaggaaggggttgcggcagcggacggcggcgtagtacatgggtgcgattattccgccctctagtgagaaggctgattcagcgtctttcactcttgctttctccgcgcctcgcgtgggcgaggaaaggcgaaggatttcctccgcgttggatataagcgactcgaaatccgcggtgaaattatcgtgtccgttttcgtctcggtccaacgcgacacagacccatagcaaggcagcctggtaatatatacgcagtaaaagggaggcgcggaggtctgactgttggatttccagcccgtgtctgtcgaggagtttatcgtgggaccatcgccaagacagcagttcctcacaaatctggtcgcgttctgcttcgaactgggcctgtaccaccggcggtcgttcttcgcgcaagatgccgacggagcggatgaagcggagggcctttgtcatcagacgatcgagatgggaccttgcttcggtcaggtcagtaaagatgtgtccatttctggtgcctggtgagtccacgtttattgggaccagcaggcggcccatgaaggatgcttgaaggttaagtcgaaggaaaaggtcgcggagttgttgatacagctcgctggtacaaccagaaccaattgatgttaattgctcatgcttgtggataattcgtagtcctgcctctatatgatctagtgcttctttccggttttctcgtaacatctccaggcagataaacagacaacatgtcgtcaacgccaaattgatactccctccttgactgtgtgcagtgagagacttgaccagagtctggattgacttgttatactcctccagcacgaactgctctgtcggcgctgacccatttaccgtcagaaccgcgctcccagctactgcactaagctggaaccgttcatggagcgcgccgatagcagtcatagcatgtctcacgctgggctcgtgctccgcaaactgtggtataaggtacgaccagagcttgctatcatagaatcctgcaaacgcatgcgaggtccgcgtgtagaagaagtcgatatagcgcctctctgttctcgttccttgccgtagaacgagtcgatggtccgccccaagagtgtctcgattaagtggcttctgacgctcggcaatgcgcgcgcgaagttgagtttgcgaggcgttatcgtacccgtcgcatttgcggccggatttttggcattggttgcagaagggcttgacctcgtcgcatttcacatgtcggattctaagcatggcttagtactcttgttttcggcgatatagatggccaggatcgtacttgcaagtgatacagccattgcgtgatcgaggtcgcgttatagtcctggttgtagacattcttgtatccttctttgcagagcaaaggcgcaaaaagaatggaaaattgatgtattccaagctttatcttcagctcgtatgctgcgcaaggagtaggtattaatatgatttggttttagtttcggccccgacacgcaatctcgtggctgagccgcagggcctggcttctccagcaaatcgcccttcgtgcctcgtttcttggaaatgctgggggcctagccaggattctcaatcagtcagagtgcaaataacgtggtcagggaaacgtgatcgaccgttgatgaaggaagtctagcccagccacagtgcaaggctagttaaacttccttggcggtcggtggccctaatccatcaatcttagaaaatgtgctaaaggagcgccagcaaagaaccgcatatatagaggaaatgggtatgacacagccagtatacctgaattagtccggctacccattaccacgccacagaccctgtcgagaccagcggggacatgcgttatttcctcgactaccgcaatgactcgttatgaagacatcaggcggctttagggtcgacgatgaagtgaaacctttctcccgccccagtgatcccagcccatgctactgatgcccgctatagtaccaagaggagcaccaagagaaacaccaggaggaacaccaaacacctgttcctactgctgcctttgtgacttgaagaatctagcagattgctgtggggcggcttcattgctaggaggatgatctgttcaatgcgtctggactctgaatctgtaaacacaaccgctggattggcactaaaacatcgtgccccgacaatgcttccggctcaggtctagtaaacgggtcgccgctgtacgcctatttgcgtcctttcttccaaagacagtatagcagcagtattgcaagacaccttagaagctcgagttgatgatgaaaggcgacgtcgtgggtcaacgtcctctatatttactcgctagcgtattcaaccacgggttagtcgattcacggcgccaaaaaagataacacatggtagaattgaattaccttgcgctcacgcgtcgacattggctttagctgccgatctccgaagctttaggcgctgtcggttcggagtatcttccaaggcagccagtggctcacctcagccgcagcgaaggaaattcgtcagagagtcgggattcgttgacagatggctgacgccaaggccgactcccggacttatcgacatcgacagtatctccggctgagtaggtagtcccctggtcagcatgaatagcacagggatcatctataaaggtcgattgcctctgattatcgacttcactcctacctgatgcgagaaatacaagatagcgagaaatacaagatacttgaagcgaaatgcgtcttatcctcactggtgccacaggcgttgtcggctccgcagccctcaaccacatcctcagcctccctgcgggcgagatttcagcgctgtacatcatcagccgcagtccagtgccggccgcagaaaacaaacccaatgtcactgtcatccagcacacgaactataacgagtacccgcaggagctgttggacaagctgaagggggcggatgggtgtatctgggcgcagggaatatcgcagacgttggttacgaaggagtgagctatacccttcacgaatattgagctacagtgcggtctaacatcgcacagggagtatatcaaaat

SEQ ID NO: 5029 - DNA, 7690 bp, Emericella nidulans
  unsure (1)..(7690): unsure at all n locations
atcttcgcgacgagtggtgcgatgcagccatcgtcgcaggtacgaatctgattattacgccgactcagaccatcgcgcagagtgaggcaggagtcctgtcgccaacgggcgagtgccgaacattcgacgcgtcagccatatgtacgcccgtggggaagccatcaacgccattctgatcaagaggctgggcgatgctgtacgagatcaagatccaattagggctgttatccgatcgacggccgtgaattgtgacgggcagagcgcaggcatcagtgcaccgaatcccgcagcccatgagagaatgatccggcgagcctacaagtttgcggcgcttaatgacgccctagagacgccttgtgtagagtgccatggcaccggcacccccagtggagatccgctgtgaactgcaagcgattgccagcgtgttcggagggatccaggacacgtatgtggggagcatcaaggccaatgtagcccatgcagagggggcgtcggggatcaacagcgtcatcaaagccgtcttaatgcttgagaaccgagtcatccctccacaggtgaacttcgctgtcccgaatccacgaattccgttcgaggcggaagcatctggtggtgcctacagagccaacgccgtggccgaccggtcgaccagagcgtatcagtgtcaactcctttggcataactggtgcgaatgcgcatgcgattattgaatctgccgcatcttacggcgtggttcgaccgtgctggaatggatcctccgtcccgaaactgctgatgttctctgcaaagaccactggcgccctcaagagccgagcagcgcagatcagaaggtacgctgatgcctaccctgacagggcaaacgctctgtcatatacactgggctgtcgaaggtcccaccttggccatcgcgccttctgcttcgcgggagcgaacgaggtcacttacatggccgagagggtcaagcagaccccggtcatcaacttcgtctttacgggccaaggtgcgcaatggccgaggatgggcaaggagctcatggaggagttcccgcagttcaagaacgaccttgtccatatgagcaagattctggctgggttaccacacccgccggcctgggacattgtggagggagttgctgcagccgatgacagagagtcgtgtcaatggccctgaattttcccagccgctatgcaccgccattcaggttgcactggtcaatctgttggacgtacttggcgtctcgcccgcgaccgttgtcggtcattccagcggagagatatcgccggcatacgctgccggtgcactcacagtggaagaagccattgtcgccgcgtactatcgagggcgagtagcaaccgaatcgtcgcgcactggggccatggcagccgtcggaatgggtcgtgccgaggcttcgctctacctggaggatggcgtggtcgttgcatgcgacaacagccctaacagcgtgacactatcgggcgacaaggaagctctcggttcagtcatggagcagatgaaaagtgatgataagaatctttttatccgtctgatcaagacgggcggtctggcgtatcactcgcaccacatgctgaacctagggtctaggtatgagcaatgtttacagccgtttgtcagggcccattctgccagactccctttcttctccagcgttaccggcaaaaggctggctgaagaggcgttactggatgcacggtactggagacagaacctagagtcgccggtcaagttctatcccgctgtcagggctctgatcgccagccaacagcctgcagaccagctctttctcgaaattggaccccattcagcacttgggggacccctgcggcagattttcaaggctacaaagacaaaaggccgtctagcttactcacatagcttggtcaggggcaggaatgccgttgaaagcgcactggaaatgtgcgggcagctattcttgcagacagttgatatccgtatggagcagtggacccatggaggtagcacattgacggacatcccagcctatccatggcagcacgaatcatctcactggtccgaaactcgggctgtgagggagtggtatgttttgcatctgtctacacatatcagttcgtaagcatttaaccagatctctaggaggactcgagcctttccgccccatgagctgctgggctcacggatcctggaaggaagcgatgtctagcccatctggcgcaacctgctccgtttaaaggatgcgccttggcttagtgatcacagagtgctgcaggatgtcgtatttccttgcgctggatacattgcaatggtgggcgaagctattcgacaaattacgcattgcgacgacttcagtatccgccatctgagcatcagtacagcgatgatactgggcgatgagaagactgtcgaggtgatgacctcactgagaccttcaaggcggatgtcgacccagtggtacgagttcgccatctactcgtataacgggaacacctggacaacacattgcgatgggcaggcgaaaggaggtagggacgacaaggcagtggacttgcaaatgcctggactctatacccagctcccccgtcaggtccagtccccatatcctatctttacgcgcgctggccttcactacggtccagcattccaggggctggaaagcgtttgcgcaaggcctggtcatagaacagccacggcgtcgcttcggcttcctccagagacaggctcagtgtatcccctgcatccaacgactatcgatcagtgcttgcaactgctcgggctagcctccgcagagggccttgcccatcacttcgagcagattcttctgccaacaatggtagaaagcctgtatattcagggggcccttgacgctgcggcgcccatgcagacaggagcaagagccgtcttgactgcggacaactctggcaattttcaaggagagatggctgtcgtttcaggcgaccaggtcttgctctccgcacatggatgcaaactttctccgcttgagaacgaacgggcgggcctgtcgagggacgacagaatagcagcagctcggctgtactggaggccggatctcgactttatccctctcgagagcctgatgagttctcatacgaaggatctcggtgcactacagctgatggagacttacgtcttcctatgcaccgtcgagatccagcatcgaatccgcaatcgtgcaccgtacaatggccactttggcaagtttcatcattggattgatgagtgcgttgatcaagggcgacggggagagaaccaaatcgtggctggcagcggcgaactggtgaaacttcaaccaaacgagcgcatggctcttatccgccagctgcgaggcaaaatcgccgactccgagtttggcaatgtcgcagagcttgtcagccggctcctggacaattgtgtggaggtcttcaagggggaaacagaaattctggatgtttacttacgagatggcggtctcacagagctctacgccatcacgggagatagaattgattccaccgagtttttcatcacagcaggccatacaaatcctacgatgcgcgttctagagattggcgctggaacggggggaaccaccctggtggcattgcaggctctcacatctatcaatggagagcccatgtatgccagatacacgcaagtccagcccattcttacgtgctaaacctctggcttctgactgaacagaaaatagattcaccgacgtctcgtctggcttcttctccgctgccagagagaggttcgccgaataccctgggctcgaataccggactttggatattggaaaggacccgttagagcagggattcgatgctggcagttacgatctgatcatcgcctctaatgtcattcatgctaccgaaaccctaaacgtgaccctgaaaaacgtccgcaagctgcttcatccacgagggaggttctttctccaggagctgacgccttctgctgcaaaaatgattaatcttatcatgggcccgttgcccggttggtggcttggagaggctgatggccgagcaaccgaacctattgtatctcctcagcgctgggatctcgagctgcgtgcggcaggattctctggtattgagtgtctggtccacgatgatgataatcagagggaccatcttggcgtcaacatcatcgcaaagcctgtccggcctgccccagattttccctgcgtcactctgctgctccgtgagagccacgatgatctgaactcggtcaagttggcgaagcaggcgttgagcgacaaggggtatcatatcgacgtatgctccctgggcgcccaactccccgttcaccaagacattatctcgctggtggagattgactctcccttcttcgaaccagactgcccgggcagcattgcggtcctgcaaagaatagtttctcagcttgggtcatcgaaactgctctgggtgacggggtccgctcagatgggaccggtggacaacccattctacggcctcacgctcggcctcgcaagggcgatccgagcagagctgtcgccttctctcgcgactgtggaagttgacaggctggatccaaagtctgcagaaacaattgtggaggtgtttgaaaagttccaggatacggcctcctccgtgaatccagacaacgagtatgtagtcaaggacggcgttgtccatatcggtaggtatcactggacgcagatctcaggcgagcttgcacaatctcatgacacgtccggtcaccctctcagactggagaccaggcgagaggcaggtgcgaaagtcctaggctgggcttcacagacacccatcccgttggggccaaacgatgtatccatatgcccggcctacgtaggcgtcggcctcaaggtacgttgtttacatgcctatctcggatagtgttggcttgcagccactaatcctcctcctaggactacgacagcctggtcggattgagggttccggcacggctgcggccattggagctgaagtacaacggctcaaagtaggggatcaagtaatgttcctcaaggacgactgtctcgcaacaagcattacagccgctgcagatcaacgagcatagatcccagacgcgttgagccttgccgacgctgccagtatgccttgggcatactgcaccgctatctactctctgagcattgtgggcaatgtccgaaaagggcagacaatcctcattcatgaagcgacaagctccattggtttagccgctattattctgtgtcaaatgcttggtctcgagatatattgcactgtcaccagccctaatcaagcggaacacatcaccaccgctttcaacattgcttccagccacatatttgcctttggcgatgcgtcttttcaatctaacttgatggctgcgactagaaaccgaggtgtggacaacgtactcctcaacttgccgtcggtggatgtgttgcaggcctcgtggaaatgcgtggcctcacgaggaaaggtaaggacttgcatctgttctccgcaatggacgtccgattgatggctaatcattgtctagctaatcacactagcaaagccggggctttatgatcgtgcagagttggatttggaccttttgaagggcaataggagcttcgttgtggttgacattacctcccttcacgacgtatatcaagagtatgcgcccagttccccttccatcccacggaaacgccacttttgtgtagctctaatatcctcgctaggctcctcgatgagacaatccatctctatactcacggccatatcaaacctattacgccaaactccattgtcggtgccgaccaacttcaggatttacttgcagttgtgaaccaaagcaagtcattaggcacgactgtggttgtagtcccagatgcagccaacgcactcccagtacacacagcccaccctgagcttaagctgcgaccagatagagcataccttctagtgggaggtttaggcggactcggccaatccgtctcaacgtatctggtcgaacgcggcgcccggcatctcgtctatctgtctcggaatgcgggtgcgcacgaacgccaccgacaatttattcaggagcttgaaagccaagggtgttctgtacaggcagttcaaggggatgttgccaaactggcggacgtgaaaacagcagtggaagcggctagccagccaattgccggtgtgctgcaaatggccatggttctgaatgatcgcccttttctgagtatgtttcacgacgactggtgcactgcaattcggcccaaagtcgacgggacatacaacctgcacaaagcgctgctggatgcagatacaacccttgacttcttcgtggttttcggatccgtctctggcgcattcgggatcgcccaccaggccaattacgcggcagcaaatacattccaagattcatttgtgcagtaccgccacgcgcatggccttcctgcatctattttgaacatcggtgccatggcgaatgtcggctacgtgagcgaaaatcacgccgtcgaggaattcttccgcgctgccggcatgccgtttctatccgagggagacttctttgaagcactccaccattcgatccgtcaccaatttactgctgctcctttggcgcagtcaaggtcatcagctacggcgcacggtcgaggcgcaggtgcgaccaacgttgcccagctcgccctaggcattcggtctaccaaaccgatggatgatcccagcaaccgcgtgctctggaaacatgaccggcgagtggacatataccggaacattgaagccgcacggctgcaggacagcacggatggcagggacgggggcgaggaagacaaactcgctgcgttcatgactgagctgcggtccagcccgtccgtgctggatcgagcggacaccttggccttccttacgcatgagattggcgtcaagatctacgagtttatgttgcagccggtggaagagcttgacgtaaccaaaggcttggtcacccttggcgtggactccctggttatcgttgagattaggaactggctgcggcgcaaattggaagtcgaaaccagtacactggagatattgaatggcggcactatcgagactttgggacagatctgtttccatagattgcgcggaaaatatggaggatcggctccggggaggtgaaggtataatcatagtgacaacaaaacatagcggatcacaattacttttattcccatacgagctcaggaaaaagaactgctatagaccatggcagaacccctgaacggtccaaagtcaggactcaaacccacgggttgagtttggggtcagaacctggattatagatagacaccttaagtagttgcagttgtagacactggagcagttatgtcccaacatccacctgctggctgaaatagtgcttgagccctcaaacaggccattggtcttttttttcgaatgtgggctagcggagttactttctaatactaataaaccagatttaataggaataatggccggccaagagtttcacgattgagatacatgaaatttagcaagatgttcactcaagagaaaaaaagcaccccgaaaccatgatggctgcattgaaggagattatgagggatctcttatggccaagcgacggctcttcttctgtagatcgttaatagagaggtttgcggccatatccanagcagaaataaaggctgggaatctcgcatataaggctgttgggaaaactgatatagaaaagt

SEQ ID NO: 5030 - DNA, 2797 bp, Emericella nidulans
tagatgacatttgtattcacacatcggtatagacaaattatagagtagacgttcaaaacggccaaagctgaatggatagactccatatgcattgaatatacaatgtattcgctgcaaagcatggataaaataagatgtacaaagtgtctttgttgtcgctttgaaagtggtatatcatcacatcataaggtggcagtgtaaccaaccctctatatcacctacatagacagctgatagaccggcaattctgttgatttatccgtgaatgcccgttgtgaaagcgtatttgtccgtgctcgtgatgggtgggattgaaagagattgcaataatcaggagtcgtagggctgatcaccccgagttcaaagttatttgtcgaaacgcactatttaccatcttccgacttttgaaggccatctttgggaatatggtatgcgcacgttttacactgtttatcggcatttttcgccctggttgagtagtcgacggccgtcgcgagctcggggtgcgcgtccgctgtcgatgtcgaggccagctcgatatcgtaatcatcagagcgacgacggtcggattcaactccctcgcctggattaatggtcatggagctgctgttgcggttgggctggcgcctccgaaagaagaggccggtgaggacgtcgaacagtttgcggaaccagtcaatccaggcaaggagcatggtgtacctgactgtgcagaggatacccaatacaccgcaggactaaagcccgccatatgttagcggattcattcgtattcgtaagaaagggaaagggaagtcgatttaagtttgaaaggagaagggaaaaaggcaaaagagggaatacagagatcatcatctccgacgagagaccagtcttcttatcagggcctatagcgctcgcctcatctctgcaggcatgcctgtccccgtcattggcgacgaggcaggacatccatggcatcagatcttcttcgctgtactcggctgagctgccccatcgcatatttacgtggcctacatagcccacaaataccagaagcaaacaagagatagcaatcgccctccactggagttttaccatcagccataggctccgtcccatgatctttatctgtaaagcgcgggaaagtggatcactgccgtcatctcgtttcttgaagattgagtagatgtgcgctgtcccgcctcgggttaggaccccgcggatagtgtatccgaaaatgtacactgtgatgagccaggagatgaatgcgacgccgatgagcgggccccagaaggaggcgatactgttgtcgtagcttatatagcacatatctccaacctggtacgagacgccagacacgccgagcgcgatgccgagcatgccggcggcgccgccgaagatggtgataatggagatccaccggaacacagtaccgggctcgacatcccatattagccggacgtacagggcgagggagcggaagaagccttttcccaccaatcgtcagttctgttcgaatgagtcacatagagctggatggggggtcacatacacccgatgacaagcacccaagcaccgtatagtattaatgaccccgtccatgcgcaggtcatgtcagagagccagtaatttggtgtgattgcgtcgtggcattggcgagcagtgcccccaagggggatgatgaatgcgagctgaataccggatttaaatcagcgctccaggactcgcctgcggtgattgcgaagtacgggttattgggacggaccggcatgaagacaaaccccatcaatgggcttatcactagataatgtcgtcgggtatcctcagctgggagaagaatgtacgtcaacgcaccgatgacaacgaaaaccagcacgatcagcgccagccaagggaccatttcattgccgaggcctgtaaccatattaatagtcgctcgttgtacaagtactggacgcaccgtctgaatactgccagtctgtaaatggacacgggaaacagcacgaaaccgtctcgttgccgacgagctgaggctcgcaccagcggcctgcaagatctagataagaaacgtcagcggccacttcgagggagcaggatagcgaaagactgacagccgccggtgtcgccaatagaaagctccgcgatgaatggcacagggcatgatacgggggagctgttcgaggccatggccaatctgcggcaggggcgccagcgcgcttgtcgggggaccggtttggcaaacaagaccactaaaaccgaaaataggcctaattgaccgttagtcaaatcctcatcgacatggttagaaccgagtacaagtaagaagtgtgaactgacagttaagtgcagtgacgcctcactgggcactgggctgagaggttggtcttatgtactgggttgagagattagagttcgtgctagcagccagctaggagacaacgcagattgcaggcagggctagagcaactggggcaggcctaaagcccgtcatgggcgcgatgggcccccagggctaccgcgctttagggcaagtgggccccggatcgtactccccctggcggtccgccagccgctaggacaggccagcccacggcacttggcgagtatagtatacgtaccagtcgaactctatagatatgactgaagggatatgactgaaggtcgaggatggtatagataagtttagattttttctttttctactcccccaaagccggtaaaatacaaccgtatctaaagggccactcgatatgaaaggaaggaaatttaagcaaaaacaagtggttggggccatgttccagccaggtaccataaa

SEQ ID NO: 5031 - DNA, 3152 bp, Emericella nidulans
  unsure (1)..(3152): unsure at all n locations
ctcaagatactcctccggcgccagcgcatcttcccttccgccttgctgcgcacgcacttgaagaaatgaacattcggacataccgctgatgagctccacgatcgagggccgtgatgactgggcccgagaggacgacctcgacttgggacaggacccgaaccaggacgaactgcaactgcatccggcggcagcaaccagcagcaacagcaacggcgttattaagagtgggaactcttcggaggaattgaaagatgggtcaattgcgtatatagaggaggatatacaggatccggctgcgcagaatcatgtctcgagaacggaactcgactcgccctcgccgctgcagtcgccgatcaagtcccctcgtcctgagctgataggctccgacggtgtcgacgatgttgcttccaacccggacgatacgccgtccctgcatgtgggtgtgacaatccatcgtttgactggagaatcgctaatggtttcgttccctagggatcaatccggtcgtcgccgagtagtagtacactggcatttcgtggctcttctcctcttcccagccctagcccgtcgcatcgtccatttgaccttcggttccagtcgaggttgtcagcttcatctctcggcagcatccggccgtcgtcgccgtttcttgcacaagtccgctcgcgaaagtcgtcactcacgagccgcttatccccggccaccattgagtctgaccaggaggggcgtcaggacccttgggaagttgtacgctggacgaagctgagaaaaatcacgggccaggcattttcagaggtcggcaaacgaaatttcggctcccctacgtgtatagtggtttctacgtctatcgttattgggacttcaagaggaattgttttggtatttgattatcagcagaacttgaaggctgtcattgggcacgggacgaaaggtaccgcatataattatcattttgaatgttctccttggctgattttgttcttgctttagctgttgaatgtggatcagttcagtcgctggctctttctgcagatcattcgactgttgctgcaggtcacgtctcgggtgatatattcacatgggagatatcaaggccagcgcggccttttcttaccattcctcctatacctgtaaatcaggttgagacgcgaacttctgatggccatatatctgggtcgccggtcatacacttgggatttctgggaaccaggcgcactgccgtcgtgtctgcggacaagcgaggaatggccttttcccatttagcgacacgcggtatgggtgctatgggccgtacggtgaagacaactcgagttctaggccgctaccctcagctgacgtcggagaacgctaagccgcggaacgcgagttctgtgcttgcgttctcgcctcttccccttgggaatgtcgaacagtccacagactctcttggcttagttgccatgcttaccccgtatttgctggtgatcgtctctacaacgcctgtggcacagacccaacacaaatcacctcgtccgaaagaggtcgccgctcatggcgcaatgacaggcgctcttgcctggtttccggcaattagactgaaggcaagcgattcgcagatatccaggactaaactcgtgtactgctggtcaaacttactaacaatactggatgtgctggaggtggaatcagatgattcatcaagagatcgccctccgagcttagaattccggccccgaagcagatggagagcagacgaggctatcgtggccgtacaatggttgagtcgctcggtgttggccgttctgactatcacacagcaaatgctaattctagaggaccacacgatgcgcgtgactaatgctgttgatttgttgaaccgacatatttaccatgtggacctgttttctgctcaacttcactcattaattgagcaatttaatgaagaggatacttccatgcatggtgttgtggccgacgccttctatatgagcttccgatcctacaagggtcggttgtttatgctcggctttaacgaattattgatcggcaatctatcaaattgggcagatcggctgcttgctatcatggaagccggtgatttcattggggctattcgtcaagcaacagcctattatagcggaaactcagaaaaattgactgttggtcttcccgattagcacgctctgaggcaacccattgtgcataaaaggctcctgcagatcataactgcatctatgaagtatgcttttgggcggaactcagaacccactaatgaccggctcgagcgccaacaactggaaaagctagctcacgtctctatttcagcctgcgtatgcatggcggacaaagacttnctatggcaataagcctttaactgcaaccaagaccatggaatccgaagagtcttccttgatgcgctggaaccatttattgttgaagggacagtggtagctttaccaccggatgccgtcaaagccctgataaaccacttcgtcgtcacccataccgctagtcaactggaagagatactctgtttgcttgacactagcacgatggatattgaccaagtcacaacattgtgcaagcaacacaacctctatgatgcatttatatacgtttggaaccgatgtttgggggattacgtagggcccttggaagagctgatcaaattgatcccttttcaacagtccatagccaatggggattccgtctacgagcccaaggattttacgaacgcgatgaaaatcttcccatatctctctttcattctcacgtcacgctcatatccgacagggagcgatatggatgacaccgaagcgtcacgagcaaaggcagccttgtacgactatttgttctctgggactcgtggatccatctctcctctggaagttctgctgaagtttgacacgtctagcttcatgagcatgctaaacgaagcgttcgaagatagctttctcaatgagcaagatccggacgaggttcctcagcaacggctgtctttcaaccgacagtatttgattagcatcttgctccaaaccatgacatcaggctctttccctgcgtccgattctatatatctggatatgttcatcgctcgcaatctacctaaatacccgcaatacatcctcctttccgggagcactctccatcaagtcctcgaacgagttgtgccc

SEQ ID NO: 5032 - DNA, 7733 bp, Emericella nidulans
tttgaggaagatcagatgcttagtcctaatcattgtttcgtgatgatagtaaaaagcagagagtgccagtagtcgccgacagacataagaaagggtatggggccatgtatggacagaaaaagtgggtaatgatgcacagttttccaactgggttcgcataggaattttgactgaggcaaggatatggggatgccagaaattaggtaaatacattgggacgtagggatacatatcggtcatcaagggtcgtaacaagggttcaatagcaggggtaatatgagttataggggaaagaaaagaacaaatatgaaatggacgagttcactatggccgtagctcgccgcctagctgcagaacagcgctcggccttttctcgcggattttagggctgtcgagtcctggtggcaggaggttatccaggttggatcgcctccgaacgtctttagatgccagcggggtccgggcgagcccgccaggtgttcggccaccccaggcgggttgggcaggactgggagtcacgttgacaaagtctgcaaaattgaattgctggttcggtgtgccgaagttggggaacaaccctccgcctggagtcggggtcaaggatgggagggcggcatgttgactgggcggcgtggaaggagggaactcttgcggctggggtttgatcgcgactctggcttgagtgggcgagttggctagatacagaagacggtctgcaccgccctcatggcggaggttggcgacatttcgtgatagaaaggattgctccggcggcggagtgccaggtggtgaggagccccacgacggagctcacttgaaagctgtgaacaggaagatccagatcattttcatcgtccgagtgggcgtggtaccctggccctggaaaggaaagctctgggatgggagccgtctctgaaatgagcgggagattgtttcgaccgcggcgagtgctggtatgacgacggaacccaggagacgactcgggcaattgatgcgagcgcttccacgacgcccgggacgcttttgccggacggtcgatgtctgcggccgaatcagaccggaggcgttttcgactggcagagagcatgggctgcatgaccctggagttgaaggtgactgcatgtctatttctggacgagcgagggagttccttcgagtaggaataggacgaggctcgcaggggggaggtcagaggcgtctcgcaacggctgttggaaatatcggaggaggaatcggagggtttgtcgctgcttcccaagcctagagagatatgcagtccaccgttctgacgcgagggtagccgaccattctggtacttgactttggcgagcccgagacggtcctggaggttgagcgacacctagagacagacggccattagcatgtttcgcgtagccttattccaagagtatctggatcaattgacatacctgagcgatgtcaattttgcggattgtcttctcggggtttgatgggaccattgcttggtgggtgacactgaaacggcggcgacggccataaaccaggaggggaggagactctgaggtagccaagcagggttcaaaggaagaaaggaaacactggaactcaggactcaagatgcagaaagggatgacggactcggaatccagagagtggagagagagccctggaggaaccttgaagctgaagggcggctggtaggagaaggattgacacccaattggagcacgcgagatgcactaaacgatctgtgggaacgagatctgaaaacaaggccagaatatttgactatggcgtaagactagaagtttaatccagccgataccccgtactcgagcccaagatatgtggacggtcgagatccaggttggccggagagaatttttgttggtgttccggtattctgcaagtgtgagtctgcaatctcgtgtggaaccgcgagcgagaaaacgcgtgcggctgcggcgtgctagcatcgcgacgcattccccggctggtcgtctactcagtgtcgaacgcccgtgatcgatctgctcatttttcatctacgaccgatcgagacgatcgaaaacatacggttctggactctaagctgtagcgggagcaattcagagccatatagagttctggtgcatatctcattaaattatcgatttgtgcgagtacgtaagtagatatgccgactccttgaaacccacaacccactggaatctgatgggtcgccagtttcggccgtttaatagtctagcaaattttccgatcgagcattctccttattcctagtttcttatcctccttcatcccttttgtcgcggcgtacgacgcgacaatctggccagattgtgtggaccgttggactatgcagattagcgttctctgttcaaccacgggatacgcagcgggcgcagcgggcgcagctgcgccggctgggccagccgtgccacctgcagtgtgctctggaggccgctggacgtagaagctgtgagcgatgcatcaagaggcagaaataaaaggaccagcgggtgccagagataaggtccactccagcagcaaaactggaaacaagcagaaatcgagccactgagccactgagccaggaacaggaaccaaggaggaagagtatgacgtggagtggatgatgcaataggagagcgctaaaggacattctgtgtctgtcaacagataaggaagcccagtaaggatacactgtatacgtagaccatctcactatgaggagagacgagaatgcgtactactctgctcgatcggcacttcaatatggcccgacggaacgggctgcatatttgtatctatctagattgagtgcattgagtgcatcggcttgacgtcttcgctgagacaaatatagcagatcgccgtaggtgaaactagacaagtgctatccaggcgtccgacccacttgtaaagctatgctcgctcgttcttccgttctgttttatatgtctcagcctgagcctgccttgataccagcttattagtgttggccagactttctgattatcctgatctttcctcgcgagtctccctccaccagacaactgctgtccagtgcccgctcacgccgtcaagaccacaaaggtacgtcgtcactattctcgctctgatcgccttccgaccgtccactcagccagctgggcgccggctgcagtgcagagcactgcagagcactgctctgcagctctgctccccactctggtcattgccaatgcttcttgcgttgccaagtacagccgtccacagcctggcgttgccttgtttttatttaccatgtttcttatcgattgctaataatgagctgtagctggtcgactttgatatctctccatcctgagctccagtcggtggggggtcgtcaatatcctctccgcaaacggtcgccagtctttccacgctcgtctctcacacatcgaacccattccaacacccgttgactccagtcgatctcgtcgctcgtttctgacagctagcgtggctctcgtgcttacaaacctgttcattttcgttcgttggtgttgaggaagacgggtgacgactctcaagggccgctccttcctatttcgtccaaccatacagtaccccagctacagcacaacgtccaacgcctcccttcgagccaccttttctcctggactcttccggtcgcttccactgctctctcaacatgcctctttttaagaacctgcgcagtcgctcccgttctagtttccgaagcacatcgcgatcaacagaaaagtccagcggaacatccaacgggacccagtccaatggcgatgtgacctccggaaagtcctcctcgaccacggactcggcgtcgtatagttctgtcacgccgccgtcgtccattaagcctaatatgtccacccataatctaccgtcgctcaatggctccaatggcagctcgaacggcacgagctctcccctcactgtgccccagcagcgcccacctccctcggggtctccgtcccagcggaatagctactttgtacgtgcgatcctctcaattagttatacctaaccttaccgtgcttcgatagggtggtagctccctatccgtcaacggtgccgcccggtcgtcgccggggccgtcgtcgccctatggacccaggattctctcaataacagacaatgcgtgggtgcgtactcgctttctgaaatcagtgggttcatccagctgactaggagccaggttaaccaaaagatcctgttaatatatggccaaatcggggacccaaggcaacatccgctggacggtagtatagtggttaaccatcaccaagatagctttccccaggtctcctggcccgtcaattcgtcccatttcaaagccctcgtgcatcttgttccgggtccgaatcgtctccgtcttgactttgtctcaaccaagtcatcgtctggcaacctccatcatgctactcattcctcttggatcaacatcaactacctcccgttgactaactcgccgccgctacacctcgtgatactgctcggaaaggattcaaaagggacgtttgatgccgtgccggaaaaggcgaatcgcgagggtaatgatatagaaactgcgatcaagaagtaccgaatggctgcatacctttggcaggcattcaccggtgaacagatgttccgcaacaatcttggacgacggtgcttccgttttgaggaggaatggcagccgggcaccgtcagtaatcgagatgcagcgagtgggcaaatgcgaaacgaggcgaaaattcatattgttcggaccgaaaagactgtcgcagagctccgggacctgcagcttgcccagcaatatggcccggctacgaggaaggatgagcttttccgcatcgcccaagaggccgtgaagaaacatttccacctaaagccgggccagaaacagtacgtctccgtcttactcctagactcccattgggatacagagtcgcaaaccattaccgggcatgccgccttgggctcgagcaatggcgacctgaaaatggcaatgttcgggtctcactgtcttcagagttatccgtcctgtctagaggaggtggttgatgcattctccgactgcacccgaacaaacacagattacgtcgccaacgattgcgggcaggctggttctagctgggaatctgcaaatattggtatcggcgcccatcttcacgaagtcggccaccttttcggctgccctcatcaggaatcgggcgtcatgctcagagactacgtccgccttaaccgctccttcgtgactcgagagccattctcgacccgaacaaagacacagggcctgcatccatgcctgccacaggacgaatgcacatggcatcgtctggatactttgcgcttccggttccacccttgcttccgtcttcctaatgatgctcctatgagctcagacgacagcgttcaagtctggcctgtggaaaacggcaggatcctgctgactgcgaccactgggattgcgtttattgaactgtacggtgaaggcgaccaggtgtgccatcatttccttgagtatctcaacacagaatcgaccagcaatgggcttccgaaacaagtcacagtgactgagagtgagctgcggcaacgagtgttcggtaccgacaaagaaaagaagaaacaggtcaaaatctctatattttccggtactctcggttcgtttaccgtcgagtccatcagcagcttgaagtccaaaaactcccaggtgaagctgcccaagggcgtcggttatcgaggatgtaaactggggatctctcaattagccgaaagccaaccggagcagcttctcctggactgtgctttccaatataagaaactcctaacttccattagagtctatcataatggcaagctgcatgggatggaattcttgtatgaggatgcgacgagccaattgtttgggaaccgggacggaatgtccgacgattttgtgctaggtaagtctgtacctgacccagtatctgcgtaccacgggcgtctaatatgtggttgcagacacgcgacgcggagaaatactcctaggcttttatgtccgagcaggacactggatcgacggtattgagatattgaccagcttaggcagaaaatctgggctctttggcaatgccagcggaggctcagggtatgtgttaagccttttttttactcaagagacttcgtgctgacaatcgtcctaggtacaacttaattcctcccttgggctataagattgccggtcttacaggaagctgcggagcttggatcgatggtctctccctcataatcatgcactgagaatctcaggatgatctagttgtatagtcacaccgattcgtggcggggatcgttgagcttcgcttctccagaggtcccggtgttccgagtcctttcgtcccagtctcaactctgctacgggtttcaaaacgcgtgccttaccagttcgttgccgaggctcgtgcctgaaaagtttattcaaccatatacaaccatttggacgacacgtcaactcgcagttgacctcttctccttgtactcatttctcgtcattcaacataccttctcggcaccttcttttccgcatcccgacaggctcgggctgtgctttactgagcggcccacggtacagagggcccacttcgtcatacctgaacagctcatacaacacaccttcgggaggtgtcaacttgtacagtgtttacatttctcgtgtagcggcgtttggagattgcctttctttgcgagctttgtctggctctgagattatcaggcgttggcggttgtgggagacatttataccatgagatgagcaggacttgaaacatgggtgttcactctacggttataccatacataattgataataggccgactggtcatagaatgcattatttttgttcacattagagtccgttcttgcagttagattgtaaaatcccaaacgcagaactcatgcctacgtcaaactacgtgtgccctgtgtattaggccgtacttcaataacgagggtattattcctgtagctgcgtaggatacaatctgatatacctccagaacgtacgaaaagttgcaactgacttgattagatgtacggtaacgcctgtacggtaaaaaacaacgagtcatctcgacattagctggagcagcatgcgtaatcacatggcctccagagacataaatgaaaacattatttggacgtgacacccatcgaaagaaaaagcaatggagcacatggtgctgtctaccagtcttttggcaggcgaccagcgtggatagcaagactagaccccaaagatgcgtacgaaggtcagggccaccgcgagaatgacactgctcattcccccttgggtaaacccggcattggcagctggcgcatccgtcggggttggggagactgaagttgtactaggagcctcagagctgtcggcaggagtggaagtgccagaggtagccgagctagtctggagcgtagtagtggcctgtccttgagagggactaggggaagcttcagccgaagtaggctccgcagatgtggcgccatcggctccagaagattgggatgcggcgggaggctgcacagctgagggaccagacgatgggccagaagtgtcagtcgcaagggttgtctcagggaccgaggtaatgggagagcctccagcggaggtaggtccaacaggtccacaaatggtctccgtaacggtgacagtaacaacctcttaagcagagaagatcctaagcttgggtctccctatagtgagtggtattaatttgat

SEQ ID NO: 5033 - DNA, 2537 bp, Emericella nidulans
attgaggtgtgtgtttcttgtgttcctctacgtgtcctcgaatcaacaacacctaggccgtggggcgccgcctcacaaacaaagccgcgcttctcccaaaacacttccccgaatcctcaaacgaactccctcgcaaccaattccctgcaatgaccgaggctactcttcacaacgcccctatcgtcatcgacaatggcagcggtacgatccgtgccgggttcgctggtgaagaaatcccctcatgctacttcccgtcatttgtcggtcggccaaaacatccccgggtcatggccggcggtctagaaggggacgtctttatcggacaacgagcccaggaattgcgcggcctgatgaaaatccgctatccgctggagcacgggatagtgacggactgggacgacatggagaaaatctggcactacgtgtacgagaacgagctcaaaacgctgccggaagagcaccccgtcctcctcaccgaaccgccgctcaatccgcgcaagaaccgcgatatagctgcccagatcatgttcgagactttcaacgttcctgctctctatacctctattcaggctgtgctgtctctttatgcttccgggcggacgaccggtgttgttttggattcaggggatggagtctcacatgcggttccggtgtttgagggcttcgcaatccctaatagtattcgaaggatagatgttgctgggacaaacgcgccgacacaccgtctttttgacgagatctatcggccccattccggcgctctatgtctatctagacaatgagtggagcgagatcctggccaaggtcgaccaggctggcggtgggtttgcgctgacggggcccgtctttgccacggatcggagagtgatctgggaggcggaggatgcattgggatactcggctgggaacttttacatcagctgcaagaccactgctgcgctgatcggccagcagttgtttggtggtgcgagggccagcggcacaaacgacaaggctggaagctccgatattctgagacggttccccagcctgcgcatgatcaaggagttctttctgttggaggggttcaaatatccaagtaaccagtagatagaatatacgtgcaggtacttgaaatggcagttatgactgaagtgacttgtggatacttttatgtagcaaaacgcatcgatacacccaggtagggaggtagcttgctgaggtatagccgaaagtacctatcccaaagcctgacctgctacttcggcaatcattgcatagattacccagatctgtaatacaccacactccagactccaaactccatagataatagccctgggtttgcgggtcatctccatccccctcatcgggccccctcccggtctcttatcaccaagtttagatcaccggcgaccctcccaaccattatgccacgacacgccatgcataccaaatagctatataacccctccccgattaacaatgatcgagctcgcgaacagtacatgagagatggcccctttctcaaagtctatcccaatcgcaatcatcggcgacggcgccttcggcctgtccacagccctacacctcgtgcaaaacggctatacagacatcaccgtcttggagcaagatgagaagattcctccgccatactctgccgccaattatctcaataagatcgtgcgggaagagtacgaggatccattttacacgaatttgactgtagtacgtacctgtactgccacccttcaattcacgggccgtatccaacaagaagaagaagaagaagaagaagaagaagaaagtactgaatacagatatagcaagcaatcgccgcatggaaaacccccctcttcgcgccacacttccaccaaaccggcttcctacactgggaccgcaggttgtcgcaaagtcctggtctgttgcgcatgttttgctctctgatgaagaaacttccgcccttcgtgggatccccgtcacttactgacgcgatctgggctttttctacgagcccgaccctaaaactaacctgctaaagctctgcccgatgggcagcgggatatcaataccgacaaggcgactggcgtctcgcactcgcccttccctgtgaaccaagaggcatctagcgggttcttgccagccgaagacgaaacccggattcgcaaattgctccagcagacattaccggctttagcgaatagaccgcttgtgctgaagagtctgtgctggtttgcggatacgaaagacagcgactttattatcgatttcgtgccagggagtaagggaagtgttgttatcgagtcagcggactcgggccacgggtttaagatgtttcccatagtggggagctgggtgagaacttgctagaggatgaacagaaggagcagaaggtgaagaggtggagatggaagggcgaggaaggcagacaggaggattggggggccgatgttagttggcgacttgcagagagtagggagctcagggatgtgctgccggggaggataaagctttagcttactgagctcaccgacgctactctctcatatcctatttat

SEQ ID NO: 5034 - DNA, 9229 bp, Emericella nidulans
tttagttggaaaattagttttaataaaattcggagcaaatttttggacttctcccaacaaagttttgggttaaaaccttcaaaccgctttggtttcgacatgggtttaaggtgaacaccgcctcaaaaagtcttttgggcccttctcaaaaaaagggatcgagtcacaagttttgggtcgtaagctttttaaaagcatttgcgcttcaccgggtcgcgcgaatgccacaatagctattgtgccgctcgacggcatcaacagcttggtgatttgtccgaagggttcaaataatttgagaaggtcttcggtttttgtgccatacgagaagttctttactaaaatggcgagatttccgcgctctcgttgcttgaaagcgtccaaatttacaccgtttgctttgaaataagcttttgtctcttggattacatgcgtttcagcatgggcctgcttgacagcggcatccgacgaagtgggatccaaaaggtcagctttggagacaccaattcgttcagcaacggaagacatgacggcatcagcctgtatgggttagcaaatattcacgtagtccgttagcgacttcctaactcacattcatatacagggagttccagctgaacgttgaagaagcagcctcctgttttcgcttgatctgcttttgcttctttaacggcaatttggacagctcgtgctcgtctagcttgtacgtcttcttctgcgatgcaggcagaatatgtaataagcgaccctgaaagatctttccatctaaatttctgtacgcttcaacagccgcgtcaggatcagcgtactgaacgtacgcaaatcctttgctggtcgtaaatcttgtatcgaaggcaacatgaatctaaagcaatgaaacgttagcaatagcttcaaggcaattgtatgagtcaaaacagaaataaagctgctatatcagataacgagaggcatctactaaaattctctcttctgattttcacatcacttgcttttgcatcggatgtccctatcagaggtatatcatcattcaagcagaagattgcactatgaagggcgtttggatagcgaaacatgaaagggtccttacttcttcaattttgccaaaaggcgaaaaaaccggctcgagttctgactctttcgtctcgtaagacaaatttctgacaaataaacgtgctgaaatgcggatgttttcgatgttcgtgtcaacttccgctgctgtgggcgctttcgtcaagtcgctctcagcgggcttctccggactctcagcttcgggcttctcaacgttggagttgattattggcgtaggattcgtggccgccgcaggggacgcaaacgtttcttgttcatcttcgtctagcaagcctagaaggcgacttgtttttgagcgcacgcagtcagagtcagaaacaggcgcctggtccttttgcgggtcctcaactcctcttcatgtttttcaggcgagggttgacatcgctttcgtcagttgtaggttgatagccagcaactactggaacatgagagctttcgtttgcatcctgacccagttttgcctttttcctctgagcgtatgtcagttcctcctgatcatcgacgtcgaaaggctgttcttgttcttgtgcatgtgagtcggtctcatcaggatcaggtagctgatcatcatttgcccacgttcgggtcttagatggttgctgtaagagggaaagatactcttgcgttttagaatccttgatagtatccccatcgcgcttacgcttgagattgtttcccaaggcatcgtcgggctgagctgttctactgtccttgcggtgggcaggttccgcatcaatctaattactggtcagttacaagaccaccttgactggtcagcaagctcaatgggaaaaacgaagtgcaaattaagcagagagaggagtgacataccggcttagcaatgtctactgaaatcttggacatcctcatatatgtcttattgaagtaagaaacagcctgctgagccgcctcagagcttttgaagcccacgaagccaatcctccgttttggcaggacatgagcattcgtgacatgaaagcgagtttcaaagtgtttcttgagttgatcattggttaatgttggggggaggccagagacaaacactcttgtgctctccatgtttgtggatagagggtttgtttaacaccactcgcaaatgaaaaagttgcaaccagaaaactttttggcggcttttttttttctgctttcatagtgccgaaggcggtgagagaaaagagaggtggtctgtgctgctcgcgcggagtttcctgcgcgcagccgccaaacaacaagtcgactgacaacgttcttcgagtcgcaagtctaattcgtcgcatactctcgctatcaggggcgtctctcaaaatcgattatcttgtagttattacttagttgctgtcaaaatggcttccgagaagaaggacaagctcgaacgtaagcgttgcccaccatacaagctcctctaagttcactaacgccgattccagcccaaatcaagtccgtcgacatggtaagagctctgatgctatgcgaatatattgaggctcacgaggggatagtcggaggacatgcagcaggaggctgtcgaagttggtatgaatatcctctgcgatttatgaggttcgaggctaattgtttagctatcgaggctatggagaagtatcatattgagaaggtatgttcttgctgcggacttttgggcccgatacatgcctgtcgatactaacggcacctaggacattgctcaatacatcaagagagaagtgcgcgccgcccaaccaaacctacgatggctcggaatcttacaatggaacagtttgactctcgcaaaggcgctacatggcactgtgtggtgggaaggaactttggaagctttgtgacgcacggtaatgccgcattgcaagtgatgccgagtatagacacttgctgattgatgcctaccagaaacgaagcacttcatttacttctacctcggccactgcgctatccttttattcaagacacaataagccagcggaaaacaacactcgatacctttcactcaagtcggaaggaacgcatatgctacttcaactcccataccactttgtcacgattccccaaccgcattgagagaacacctcgagccaaaatagtcataactccttagcatgcgacattttgttatcacaattcattcggtgttattattggtaaatctatgcctgaactatgacccagtttatctgtgtcaccaccgtatgcgcctcacgtcaaatgccatgtaaacactacgtatgaatatttctctatgatagtctcttgagctctgcgttaccaagagagatgtcaagctccataagaaaggcagaggaaaagggacaacacgtgccctgcgataatcataaacgccaagacccaagccacagcgccacacgtcaacaccccccttctttaactgctgccttccaacccaacttaaccacctagatatcacaaacgttctcgagaactagtccgcaagggaagccagctttatactggctatatatttcacctagagcaaagccagtcatcatggccatctgcatcactttcggaacgcatggtgagttcttccggaccctagccctccacccgttccataaagcccggagggatactccgcacgctgatatccaccgcctcattgggaaatgggtgtatactcaccagaggtacagaattcacgtccatgctggaggggtacgaaaatgttagagcttattgctataattgtaagttttctcctatttcacgtccttttgggagtatacacatagtcccgatttctgagacaaggacacggcgtggctgctgttcaacagttaccaatggatctggcactaaactccgtacaggcaaccattggaatggacggtgtgtgacacgatggtatgttgtcctgagttaactaactacgcctggggctaacgcatgtatacaggccattcttcacgatctgcttcattgtatggcactatcctgcctttgctaaaggcagtattgtaccgaagaaaaggaactgacatatcccatacagcccgtgatcccattagcaatgcacaagtacaaggaagttacatgctacacatgccgatttacccaggacttgcggtatatccttcccttgccttatgctctccttttttcatctgatcccctgcttctcagtacatgcttatattgttcataaactaacaagaatagtgatcgccccgatattaacccagacactcggccgcccccaaatgcaggctacggaccacaacctccgccgcaggcatactttggggggtatcagcagcagcaaaccccgcagcagcaaatgcagtatcctcccgtagcgtcgggggctacatcaccgccaccacagccgtatgcgtataagtgatgcgctcatggcaaatgcctctgaggcagtgttcgtcaggtcctcgaaagactggagtttactctcagattgatgacgatacctaagttactgttctatggtctgttggggttgatctctggagggaacattgctcttgtctttccagtttgtaattctatatttcgctctataaagttaatgacggcttggacgacataactgcttcagctagggtccgtaagaatgaattataatgcttaatgaaatagccatattctatataagctatcttatcatgaacgctggtcgccaccctggtataaaaacttggtacatgtgtaacgagtggggtataattgaatcaaacgcaaaacataaatgaatctagctagctgaacacacaacaacgcaagatatatgaacacactcattttgcaacaatcttctcgctcggtgtaacagcaccagacccagactcttcactctcttcgtctccctggcctaccagagcactgcttttccactgccttcccatcgcatcgagcagcataagcttaccaacccttttgatactgctcctaccctcccagagcgggaatagaatcaccccgaacgcagtcccaaagagccagatgatgcccacaacaacccagcctgtgaagaacttcttgctgaagacgtacccgctgccatacatgggtataggccagaggatcaagaaacaaattaccatgccaactgtgagacagcgggaaataaatgcggctttgttgagttttcttatttcctcttcctcttgctgttgctgtgaaggggacgagtttgtattggaagcgccgggaatgagctcgaggtcgacgtgcgccgccgcggcgacatccgagtcatcgactttgcggatggcgcgcatggattcgtagtcgtaattctgagggccgaagaggtatgtcaagactggcgagaagacgacagggctgagaagggcggcgacgttgcccgctagcatggggtagtttgctcctgtggtttcgacggtgaagacgccatactctgtctttgttgtaacaagccacgcaaccagggacattgcgaggcccaaaactggagaggcggctgccgcgatccagttctgccccttccagacgagggtcatggcgcccgggaacacggctgaggagatgatgacgcccatgagaaggtagagatagcccataccgataccagcgtagtgaagacctgtcgcaaaggcagccatcgcgattgcgaagactacgcaggagaggtgcgagacccagacgaggcgtttgccctttgcggcagggttgatgtaggcttggtagatatcgtaggtgaggatcgaggacacggcgatgagctgggccgagaaggcagaggtcacggccataaagatcataagggttgtgcatactgcgccactatatccgaggagttcgacagatgcaaagggaaggacgaggccggctgttacgtcaacggaggcaatgcggcgcgttccctctagcgcaagtgcagagagacccatcgttgtcgcgcagagccagggaatagcgaaccagcagagaccgccgatgacatatccagggaaagcgtggactgggtgcgcggcgatggccttgttgtagtagccgttgtccaggaagacagtgccgaagttaccgacgaggttgatgacccagaagataccgccatctttggagcgcatggtgaggtagctaccttcagcgttccctgaaaccggattgcgcagagcagcttggacgaggaggtcatagactttgccgggggagccaagacggtcgttgctggcgtaggcagagaaagcgaagatgaagatgatcacgacaatgacaacagtgtgcatatagtcggtgatgaatgttgctttaatgcctccgaaaagggtgtacagaaccacaccgattgggaggaggaagcaggctgcaacaactgggacgccagtcatagagttgagcaccgctgcgccgccagtgagcagcatggccgtaacgaggatgttggtcatcaggcagaaaacgatgaagacgagatgtacgacggtaccgtaacgggcacggatggcttccaggaatgtgtgtgcgttaggcgcgcgtctcttgagttcaatggcgagcgttgcaaacaagatgatctgaacggtggcgcctgcaaactgtcagtatatccttcgtgtcataccggggtgaagaccaacccgatgcatagaagaacggccccgaggtgccgtactggtaggccacggccgaagattgcagcagagtagctgcccaggtccaactgctcacgacagcagaggccaccaggccagacttgacactccgtccagctgtggagaacatctcagacgtgataatctcatgttgatacctagaccgttagtcctgctcgaaaccaatgtctgacaaaacttacctctttagggaccaggtgatgaagatcatgaccagggcaaaggcgaacccgagcccgatgatgatcccgtacccaaacccttgggtgaggggagcagtgaacgtaacggtctctaccccggcttcatcgggggcagctataaccgcaaccattttggataaccgaagaaccagtggagaactagcaacctcaacagaaaacaactgctctacttcgtagtacaatttcaggcagtctggtgtctgcagtttccagatctttaaggttgtgatggcgacaactcagagcagggactgacgggctgatataaggacttaaatctccgatcccgctgcgtcaaccttcaagcagtatcgatgaagctcgcgatagacaagtaattattggcgatgcaatgataaataagaacgaggctgatacaaggagagctgtcccagctcgtggaaggcatgataaggacgaccatgtttcgtaataaaggattgagcttggcatagctcttggtttctccatcattccttcacttcgtactcagggtctctgaaaagaatggcctggagcagcgagttaaccttactgggcaggatgtttcgttatcgtggtggatgaagaagcaaatcatcccattggaaaattgtaggcttatcaggaaagcttgacgtgatcgcattggacgggaaagccagctgataagcgggcccgacagttgaactggggacgggccggccatggccgaagcacgcattgaagagaagggccatggtcattctcgagaactgataacttgactgcagataacgttttactcgatactcccactaatcttttcgattctgtgctcccccacatgtccagagctccgaactgtccgactacgtgcagctgtctccctggaaatgcctatcagggttactacggctcctctggcacagggaatatattcagcacttatcaacctcaagccgttttggaactcgtcctgtctttctgctagaccaatagcaacagtctcttcgcccaagagtattataatccacacatcgaacctctccccccaaatgcttccactgggagttagtctacgaagtagggaggaatatcgtcctaatcccaagtagaccgtaggagggttggactcccaagaaggcctgcccacagtgcccaggtaagcatacaatggtgacaaaaagttcttgcaatgagttttcgccagttctgcgggcagttagagaggatatacctcaaaggcccaggactcaagagcccatagaatacgccgaatatgccatacgcgaagagcccacaggttacttgaatgattactagaggctacagatcgttaacattcccacaaaccaggacccgggtagcgaataccgcgtttgcccgtggcttcgagatctggattccttatctgatctcccttgtcatcggtgcatcgaccacatggacccaggacaagctgaccccagaggcttggagcgtggggtgtgatactatcttcgactgctccaggtttcgtgagttaactagtgtcgaatgagattcaaggcatatatttctaattacaatccagccccaatccaagcgtttccttgacatccatgacgggattaagtcgataggcggctgttgaggtgaaccatgcagacccttacctatacttcgtattcccgccggtagcgaggcaagataccagtctagaacgagatttgcgggcaaagcacactgagacaagattggcgagactactatacagatgcattgcttcccaactgtaactgaactaactctgcattaattaaagtcgttccgagcacctactcaagcagggaaaaatatttaacgcaaaaagtatgacccatactgcagatgggtattggcttcaaaagcactcagcaaagagaaatcgggtttgaataggtaatttccatgcactgtgcatcccaagctcaccggcgcatggaacgaaacagagaaaggagtagagggggtatatggtatccgaaggttcagaaatgtcgagtatatcgattggcgctccttgatagtcgatgtcttgcagaacggaaggtggacatgttcagcgagccaagtcgtcacagttctacacacatgggaaccattctgcttgaacatatgccaggccgttctgcccgcatccagctcaatggcacccagataagaccagacaccgaaaataagcaataggccgataacggctctgcagctcacgaggagaatttgcgagtgatcttggcaatgactgaacaagccaatgtcagcccatagctcaatcaccatattcttaagacagacagatacgtaccatgcagactgacaacagagaagatg

SEQ ID NO: 5035 - DNA, 6380 bp, Emericella nidulans
aacataaggatcactaggaagagaactcaggataagctgaactgcccacgataatactcctaatagaccaagtcgggccgaagccggctcacgcttattagtttcttgttcatcctttattttcccagttcgttattctcgttcagtgggacttttaaaaactctcttttccaaccagtctggggatggctccaagttactgcgtctagagtctcgaacgttgtcctgctcttgctccctcatacagctcagccaggttgcgagcgctggataaattatgtaggtctaaatctcctgtctcagtaatgtctcaccacttccccttgtcgacgattgtgcttgtgcttgttttagctgggtttgtttgtgtgctgcagctctggtttgtatacttgaacctgtctcatgctttcatctcgccttttctgcatctgactgtctgtcaattcttctgccaatgttgttattcgctctcgtgtgtcaggtcacggaacccatctattagtccgcatacccctcctaaatacgaagggctctacgaagtagacgcccatcgtcgtgtccggcgactgaccagctctacaccagtgaaacgactcagaaacgccatattgttattgcattggtctttgtgtctttgagacgatagggcttcgctattcgaatctcatttcgggcttcagaaacagcacagcctcaagtatctcgctcattggcgcctctcagcacattgggccgaactcggtgataagcagttcaatcaccaagtctgtccgactccctcgcttcttcgaaaccgaactctgattacacgatctatcaccgcggtcgtgcttcttgtgtttgctgcgagaacaagtagcctttacgcaaaaatcacaggtatatcttgttctagtagccaccgagcacagaacgctgaggctttggagacaaatcacacaccaactcagaaaattagagggcagaaaaaattccccggcaccttcttcagtatggcacataactcgtctagtatgattgactgcaggctctctgtcactcgttgtgccagttcgaactaaaactaacctgggacagactacagctggcaacaccgatcaccacagcctcttcacccaactacaatggctatggaacaacaaagttttccacagtctcatggcctgccttcgcatccaggataccctgcaggtatcgggtaccctccgcaccatccgtccgcatccggctactaccaacccggaccaccttcatcccaatatctctattcgcagcattcaggtgtatgacaaaaccgccatcatcctagaaggtatttcctgacaatggctcacctgagtgatctcgtgagtaagtgactaacgagcaatttgacaagcgcctctataccatactcgctgagcaatactagcgcaattcccaccagctctccacaaatgcaagaacatctgtttacatcatcgtgagtcccaatcagcagagattactgggaacgtataactaatatccagagttagtccgccatcatatatgatcaatcagtcggaatattatctcgcccaaggctcttcaatatcgtaggtgccttttccatatctaaccttctacaacggcactaacgttataaagcgccagtctaaataccggatcgttggccactagccctcaaccacaacctcttgtgtccccaggaacagtttactcgtcacccgattctgcgccccttccaacaaacccaccgccatatcgagttttacagagtccaaagaagccaaggtgttttgatcacggatgtaatggccgcgagttctcaaccttcagcaatcttctgcgtcaccaaagagagaagtcaggcgttgtggcgaaagcagagtgtccaagctgtggcgctgtcttcacgcgtactactgcaagaaatatccacgttgctcagggtaaatgcaaggcgtccggaagagatacatccagtcgttagaacgcgatgagtcaagctggaaaccagaaaagaatattatcactagagggcacccactacgaatcatgtgccctatacagacgaacaaccgctccaatctcattaccctcagtttataggaccagtcttccgcggaccgctacctttatgtcaagtggagtactactctttttaagggaagcatcaggaactcatccttccttcgcagtgcggcatattcggtgtacatttaggactgggaaaggataaccatggcgcagggctattcaggcattggtgttattgggtaaccattttgaattagaattcttcagaccattcttgctgggataagcccagtggctcgcttgttacccattttttatttgtactcggtaactttgcatattattgcataataccccaacggtactctccgtatattgtttagccttggtgtcgctgctcagaagatgctcccactttggcattatttaagacacattattttatctgatcaaacccccgatctagattgagttgaagagctgcggttcgtccagaatgtataaattgtgtacgactagagacttttagtaacacattgacctgcacctacctctcattccaaattaatctagcagcgctcaagaggtgtgatcctatagcatgccttatgtatgaggaagtaggagtggaagctatgataattattcgtacagtgggcaggtgcagctacagctgctgccaaaaggttccatctgaccgtaaaatatatctgtacgttgtctttgcctccttacttcttccagaacacagccttacagccttaactcttctgggaagtctcccctttttgaacctgtaagaaatttatcttctactcccaacatccgcgcctcctccctgagctgcatttattagagatgaattgaagtgttttgtttagcatcctagtatacgtagtagttgagatggactgcttacgtcacagatccagatcacctgacacagtgtgtcatcagagaccacgattgagacaccatcaaacgacgataacttgtgactcattcttcacaatgccatttctcttttgatcgcctccctttctgaatgtgtgtgacggttcctcctgataaaacaacttaatcatcggcagatattgctcacactcactcttgtttcgagctcaatctcagactgtctacttcggcctcaaagatgactctataccaaaaacatagcatacgtgaagaatttagacactgccgacatacatctcgactgatattctgcgtacgtaaaggtacgcggatacttgtttgaaactgatacggccgcatatctttctgcgaataaatcaatatcgttgcacgctctccttcggtagacgtgtctttacttgacacagtatggcctctgttttcacttacgatccggacccccctagggtgtcttccccttggtctacctcaggatcttcaaccccccaagtggttatagttggcaatcgaaacacggccgctcgcacccgctccagcactagcttgtatagtgcagggcatgatttcctttctgattatgggatctctaagctggagccagaaccgcaagaaggtcccacagagtacaaattacatcttctcttgcgccctcggcgtccctatacttctatttctacgggccaccttgtgggtgggtcttatcattcccgtgcaagcttgtctacatccggccccgcagccgcagcatcctcaactgaggagccgagcttgagattgcctcagagccgctccatagatagccgccagcaacgcctgcagcagttgacaactcagctactatggcgcttgcagcaatcgtcgccattccattcttctacgacggccaacctagtgcttccagttctaccggaagcaacgcccagactgggcgcgacttcaaaaccgtcacgccttcttcctggccttgaggaaagccaaggtgctctctacgaaattggggttgcggatgacgggacatttgtagggcttattcatgacgaactagaggagagtttgtccaatctacaagccatggctgccagtttgggttgcaaagttgaacttctccgcagagtagtcgtcggcaattgcgaatgggtcgaggatcaaggatccgaagaattaaatccgggtaaagtgcatactgagaacctctgggttgcggaggcgctggtaagcccagactgggactactatcgtgcagagccatgtgtgaccgaaccacttgagaagctgtccaaatcggacctcgctccaaatccaatgtcggaagggtacgtttctagcactagtcagatcagagtatctattgcagggccaaatactgttggcaaatcctcccttcttggtacattaacgtcatctgtcttggacaatgggaggggaacgagcagattgggcctattaaaacacaggcacgaaatctcatccggtgtaacgagctctgttgcgcacgagcttataggatacactccaacgccatccacagacggctttgatgtggtcaactatgcctcagggaacgttgcagcctgggacgatattcacgccgcctccaagggcggtcgtctagcgtttgtctccgacctccccggctcagtgcgatacttgaaatctacattacggggacttgtcagctgggctcctcacttcgtgttcctctgcattgctgccatttgtgaggaagaggtttcttcaaggccaggccccgattctgcagaacaagcgatggacatcaatctagctttatcgtatctggagctctgcataaaactgggcatcccggttgttgtggttattacgaagatggacctcgcgtcccgaggtggcctgaggaatattctcgccaaagtgttatctgcattgaaggtctccggcaagaagccagccatgctccctgtccaatccaattcagttgaggagggcgtagacctacagcatatcaactcggcagaagcggaagaagtgaggaaactcatagccgcaacgcatgattggactgcaacagtgcctattgtactcacgagtgctgttgatggctcaggcatagacaagcttcatgcccttcttcggaatctacctattccttccaggccacccgtaaggtacatcagcatgccgaagtcattgccagctccccaacacccatcgaatgtcttcgacgtcgacgaagtttttgcaattcctccctcaaaggtctattcagaacaacgtcaacagaaccccggtgtggtcctctgtggtttggtccgttacggctctatttccgttggtgatgagctagtcatcgggcctgtcacaatcaacactgcgctggaaaacggaaattgtccaggggctcaaaggcttggttcagaccgccatttttcgcaacatggctcttacagaagtcggccaccgtccggagaattctcatcctcattcctccagagctcatacacaggaaagtctgcttcaactgtccaagcactttggcagcatgttcgagttgttagcgtccgcaatcttcgactttcagtccagaagttgaccgaagaccaagtaggcaccattggaatcgagcctctatgcgccaccccttccgagcaacctccgcgcctaggcaagattcgaaaaggtgcgattctagccagtgagccattgtcttctggcacttgtccgttgttgcccattaccgggttcgtagctagtttctcgtccagcgaattctcatcttccttgtctcccccagttttgctgggtggcaatgcaatagcgtatattgcgaacgttcgaacaacagtgaaactgacctgtttggcccttgctggtgatgaaatcatatcctcgcccccatcacctacagaattggagtttttcagctttgacgcagactcgccaagcaagccgaatgtgaataaggtggtcagctcctctgacaccacaatgcatggtactatcgatataacgttctcgtttgttgtctcaactgaatgggttgaagtgggatctaaggtatttataatgccgggggcatcagctgcgttggcttctgcagaaggctctagctcaccttcgggcttggaaggattcgttggtcatgttcgcgaagtaatttacgctgaggaaggtggaatctgatagtttttgaaatatagtaccgttctatattgctggttatttatttttcaggtcacatccgctaattcatacggaacgatctaatcatatacttaagggtagtatagtacgtacagtagtatagagatgtggcacgtgcgccgcccccactacggttagccccattaaagcccgccgtgacaagacttcctgcacagcaaccgtcaccaaggaacttacatcatctgcgattccctatagattgatctgctgctgcatag

SEQ ID NO: 5036 - DNA, 5519 bp, Emericella nidulans
gtcggggtgtattgaactggtggcggcgcgttggggtctttgactgtatacagcatcgcatcaaaaagatgaggcccgacgacaatgttacacggcccgactttagacatcgactccttgggaggatttttgccttcaagctgctcccttttcgtctttttcggcttggtccaatagcgctcgaggataccgtcgctcagccatttcttcttcgaacgttctagggaggcaagaagaaccgcgctatcgtagtattagcccgaccaactgttcacagtatataccatttccacaatgtaaggagttatacctttccgcgattgattgatactctttaagggagaggtccgcgggctgcggcgaagggaggaccgggaggggctccccatccttgaccttcgtcgaaataggtggtacgacggtttctgaggcaggattcgctgtcggagctggcgatgaggcagtagcgggtgtggaagcctttctccttgtcgcgtgttgagattgtgctggtgacgatgctcgcgtggtcgcttcggagacccgtcgcttggccgcaggttcgcgacgttcacgggcggagagccggcgtttctcagccatggactctattacgaggggtagtcaatagttatgctggtgcgaatacccctcgaaaggatgaagagcatgtcgtagatgaggagtgatggagagagccgcaaagttaaagagatccgccgagacaaaaggatggtaaacggcaagcaaatcacaagtgtatgcctgaggcataaaggcaccaaccgtatcacttcctgctgcactatccttatctccatttccatctccggctcgagcttcagcccaatgtttatcgtttcagttgatcatcttggactagcggttcatttgctctgtatacttgaatataacacgtacttctcccatcaaggacagcttgacgcagtttacgttacatcacctttcttcttgtcgaattgtcctcaagtatgtacatgccaatgctgaccatgaataactggacttaattgcaaagtcaagtcagaatggctgcttttttgtcgaattcataagcttactctatatcagaaacctgtcgagcatggttgagttcaaccctctactgcgaaaagcctactggtctttagcagctgctggccttatatatgtgggcattgtctgttccctgacgtacccagttgtccagagattgtatggtggcatgcaccgagcttcctatgtccaaagtaaaatatgtgcagctaactggcatatctgccggaaacagcgcactctatgcgaacaagataaaccccgccctatgggaagacgtcaacttggtggaagcgttcggtttcttgagtatgtcgccggttctatcataaagaagaatacccaagactgagcttgatcccagagacacaagtccagccattccatctggtcacccctgataacgaaaccatctatggctggcacctcctacctttgcacctttgtcgagaacatgacggggagctggatttggacgagcccactggccccgcggatgattataccctgactccggcattcagactcctggccaatgatctaaacgccagggttgtcgtgagctgtaagtctcgaagctgaagtcagggctcagcagcaactaactacccgcccttagttcacggtaacgcggctcacctaggatctgctcaacggccagagacatatcgtatgcttctcggcctctcaacccctacaaaccccatccatgtcttcgcaatcgactaccgcggattcggaatgtccacggggacaccctcagaggagggcctcatcaccgacggcgtaacgctcctcaacttcctcacatcagccccgctcaacatctccccctcacggattgctatcgtgggccagagcctcggaacagccgtcagtgccgcagtggcagagcgcttcgcttttggttcgcctgatccaaccgccatccaaccagccctcacagaccctgaaccctttgctggcataattctccttgcatccttcagcaatctacccaatttgattgaatcatacagcctcaaggggattacgcctcccattctctccccactacgcgggtaccctcgcatccaaaactgggccaggcgccatattctcgacacctgggatacagccggacgagtcgcaaggctgacaggtgtgaactgcagcctagttcaagctaaccctgcttttgcagagaagggtctagatctggctatcatccatgctaaaaatgatgtggagattccctggtttgaggggcggcgggtctgggcagctgcaacgggtcaactgcagcaatattctcctggtgttctgacatatgagaaaagggatgctgataatgggccgaatgaggttcttatttgggaaaatagatctggcaagggtccaggggcggtcaagagggtgcgatgggaacgagttgcgtatggaggtatgtttctcttctttttggcgtcatcgtgcaatgacaacggtaacatatttggcaggccacaatcgtgtcgctacgttctcgaccgccgctctcgcggtgctaagagcatttgcggagtaggtccatcgttggttatacctcgggtccgcgatccagaaaatttagggctaagaatttgagcatctacaaatattagcgaagatctactcgtcttgagaggagtataggttcgtgagattagtatatacaaatgtaacataaatgaccctgcttttatcctaaactgtcgccgaaaaaaagccaaaatgggcaccgatactgttaaaacatgagacgaagacaagcccacagggtcagtctatcatgaaatagataatacatgattcagaaatcggagagagattcatcaaacgcctttacctgatatcccttggtgagagacaaggggcgtatatgcatacaaaagccagggcaataccagcttatttcttatgcctgtcagcctgggcctggaggtacttcttgacaagttctctcctatagaggcagaaggttagcataaacataacgttagcggagagggtcaaacatactgctcctgaggtggtgctttttcgtagtggctgaactccatggtgtactcgcccttaccctgagtcgcagcacggagatgagaactgaaaccaaacatgccgttcagactgcagtcggcgtacacggtgaactcatcgacaccaacttcggaatcgttaatggtagcaccgcgcttgttcagaagaccgataacatcaccctggaactcagcaggggcagtgaccacagtcttcatcataggctcgaggacggcgggggtttccctcctggaaagctttacggaaagcttgctgggtggcgttcttgaaggccatttcagacgaatctgtcatgtgtgtagcaccgtcattgatgaccatcttggttccgagcaccttgtgaccaatgagtggacccttctcacaagagagatggaaacccttttcacaggcgaagatgaacttctcggaaatacttccaccaacaatctgttcttcaaactggttctcctcaagtttaccggtaggctccagccatccaacaacgcgggcataatctccaggacctcccgattgctttttgagcagatggtcgaactcaacacgctggctaatggtttctcggtaagcgacctgaggaggaccggtctcacagtcgacacggtactcacggcgcatgcgctcaacataaatatccaaatgaagctcacccataccggagataagggtttgctcactctctgggtcgaacgagacacggaacgtagggtcttctcgctggaaacgggccatggctttagagaagttggcgtaatccttgctgtgcttgggcttgatagagagcgaaatgaccggttccggaacaaacattgaagacatggtgtagccgagttggccatcggtgaaagagtcaccagaggcacattcaacaccaaacacagcacaaatctcaccagccccaatctcagacacgtcctccatttcattagagtgcatgcggacaatgcgaggaatccggaccttcttgtctgtacgggcgttgaagacgtaggaacccttccggagggttccctggtacacacgaatgtaggtcaactgtccaaagctgctctcttccagtttgaaggcaagacagaccaaaggcaaggcgttgtaaggaacaagcttaacctgagcctcgttgcgcttcttgtcaagggcggtgttttgcacctcagatgggttggggagatagtcgataacaccgtccaacatcggctgaaccgacttgttcgccagcgcagaacccataaagactggggtgaacttcaaaccgatggtcgcccggcgaatagcgtccttgatttgcttctcggtgggctcctcctcgttcaaaaagatttccgccatgtcatcgtcaacgtccgccagggtctcgatgagcattcttctcctctcctctgcgagttctctgaccttttccgggatttcatctttgacgacgatattctcaccgttgctaccttggttgtagatagccttcatgcgaaccaagtcaacgacaccctcaaactcgtcttcagctccaatgggaacctgaacagctgccgcagggagcttgagcttggtgttgatctggtcgacagacttgaatggattcgcacccatacggtccatcttgttcacgaaggaaattcgggggacattgtagcgtctcatctgtcgatcaacggtgattgtctgcgattgaacaccggagacagcgcagagaatcatgacggcaccgtcgagaacgcgcagcgctctttccacctcgatggtgaagtcgatatgtccaggcgtatcaatcaagttcatatgatacttctgctccttgccatcctcatccttcttgacccagtcacagaatgtagcagccgactggatggtgatacctttttcacgttccaggtccattgaatccatcttcgctccgacactgtcacggcctcgaacctcgtgaattgccttaatacggcctgtgtagaagagaactctctcggtacatgtcgtcttaccactgtcaatgtgcgcctgcaggaaaacgattagttatccaaacgcgcttctaagacggaaaagagcaacatacagcgataccgatatttcgaactcgagataacctctcagcctctacaggatcgagattctcaatgattgcctcctgcgataaagaatccggtgtctgagcggctgcctccaagctggtcaaagcagaaaaggcgtcagtgaacagaagacggattaattgagaaaagacaacgagatgcttacacagctgctgcagtaccggaggcattcctcgtttgctgataacgccggttcaatactgactgatggaccggagttgcggaacggagagcggccgtcgacgcgcatcgtgcggtaaggaaggcctgagactgaaatctgacaggagtcctggtcaagccagagacagcacggtg

SEQ ID NO: 5037 - DNA, 3687 bp, Emericella nidulans
gtaaacgcgctcaatcattcggccgacatgccgcaccgttaaaaataaatcggctgcctcggggggtgttaggtcggagacacgggggacgactcggcgcggggagactaggacatggccgggaagaataggcttcagatttacaagggcaaagcttagaggcgtcgtgtggaagacctgttgacaaaaactaaaagttagacggtcgtacagaggagagttggggtagggtgaaacggacctgtggggtgacgaggaaggggccgaaatgaatcgggaggcctttcgggagaggcatggatggttctgaggaaggatcggtgaacatctatctaatgtatattcgtgaacagatatgagagattaagttgcaggcgtgaactttctaatgcggagaaaagtttaggtgttggtgggttggaggaggtgatgcggagaacggtggaaaaggcggaggaactatcccataagattaccagccctccacttgttggttgattgtacaacagatatgggtatcatcattaattctgtagaaaagtatattacatgaatataaatcctgggacgaccaaaaacatcaaccacctaatggaaagcgcatgttgcaatcgtagtttgagcgccgttcgtcacattaaaggataatttggtttccacatgtcagcaatcagtcttttttggcaggctcctcttccttctgtcttgattcggaattcgtatccgagtcagtttctggctctgactccgactttgtgactgccgggtcagattcggaagtggcccctggcttcgcgtcttccggagctacagcaggtgattcttctttagcgatgtccgaatgcggattctcgtccagttcttgtgctgctgaagacgcctcagctgcctccgaggcctcgtcttccggctcaacctcggcaacggtgatctgagattcggcactctgagtaggagagtcgacaggttcacccggcgatccgctagaaggttcagaaggcaactgctgttgaggtaacgctacctccaatggcggttgctgtggttgctgtggttgctcttcgttgtcctcgacgctctcgctgattgttgtaacgcgcgacccgatggaagggctagacttgtgtcgtcgagtggtggcaccagtgcttatcgacgcaggctcaacctgatctagaggaggtagtaatgattcattgtccttgcgcaagattgtcaatcgacgcccgtcaccctgttcctgcacatgctgtggttgatgcgcgtcatccccctccgcttcaggaggcacagtatagttgtcctccggaataaggtggtaaacgtcgcaaacagttttgaaaaacatataaagtccatcatgaccctctacctgccagaatacttctcggtgctgaaaccaagcgtgcgcgaagatgcgatatagcctccggaagatattggtgaggtgcctcaggcctgcctgcggtccgcctccagactccgatcccagggtgagcctgcttggaaagtgttttggtgacgtaagaatattggtggcccaatcgagagtgtgacagcagtagtcaatggcgcagcaggccttgggtggatcatgaacggcgcaaaggtactgccattcggacgctcgcatctcggggcaagtctgtgcggagcagggagggttttccgcaaagaatgcgatgatgagattgttaactttcatggttaagaagcggcagagttcgtacagccatagtgatcgctcaacaccttccggcggctccgcaagctggcgggcaacctctcgttgaattggaactactgtgtcagagtcctcgggacgcgtgtaatggttgtagagcgccttcagatgctcttggagttggaaaggagagtcaagctgtacagaagcacatccatgtcagtaggctaggggttccccaggcgattgggtaccgacttctttactgacctgcgaaagggggattagcggaggaccagcggccatctcgctgcttttcgagcccggtctgatcctccttgtaggtccatcatctgtgcctgacgaaacacccaaaagttgtaaatccgcctctgcgccgaatgactctcccacagagggtgacttgggtccaatctgcacctctgtgaacggaggaggactgggcagtcgtggagagctcgacggggatactgccgcagtagtcatagtcaggaaggtgaatttgggagaaatatattaaagcgagtgacggaaggacaaagagcaagggggggagagcacggcagagtgaagcagcagacagaccggacggaaccagccttctccaactgaatggagctagctccctaggtgagtaaagataaactcggaaactgccgggcggtgaacgacccatgaccctcacagccctagccctatctccttcccctcttggtaacgtcattggtttgcccagatctaggtgaggtcaagaactgcccggcttttgtgtactttgctgctgcagacacagtagcacacttttcaatattgtagtggccatctcattgcctcaaaatggaagacgatgatgctccccctgatttagtggatgtttcccagctcccaaagtctgagcttcagtcatcgtctgcggaactgcccccgcagcaacgcgtgcctattacactggtgacgggtacgaagagcatactgtagatccattcatattttggcaggtgccacattatgcaatgactgacaccgtgctctgtcaggctatctgggcgccggtaaaacgacgctgctcaactacatcctcagtgagaagcatggcaagaagatcgctgtgataatgaacggtatatgccatatgcaacagctgtctatacaggcttcctgctaacatgaaattagaattcggtgactgtaagtatccaagcgcttaagccgactggcaaactcaaactcatattggcagcaacggacatcgaaaaacccatgacagtcaaccaagacggacaagaggtaaccgaatggctcgaagtcggaaacggctgcatctgctgttcagtgaagtaagtttccatatttgtccctagacgaatacgcagtggtgtttacatcaggttgcagagactccggggtaatggccatcgagtctctcatggaacgccgcggtacattcgactacattctgctcgaaaccacaggtctggcagaccccggaaatattgctccgatcttctgggtagacgacaacctcggcagctccatctacctcgacggaattgtcactctcgtcgacgctaagaacatcctccacctgcttgacgaacctacgccggaggaaacagtggccgtggagaacagcaaagacggttctgatcacgaccacgatcacgctcactctggaccagtcctgtccatggcacatatgcagatctcccacgcggacgtgatcatccttaataagacggaccttgtcacagcggaagagctagagcatgtccgggacagagtaacagccataaacagcgccgccaagatccatgtcacagatcatagccgcacgcctcagatcgagggtgtagtcctggatctacatgcgtacgatcatctcgatagtctggatttcagccagaagggccacagtcatattgatccggtacgtccatccagtaacatgatacacacaagagactaatatatacaataagtct

SEQ ID NO: 5038 - DNA, 4001 bp, Emericella nidulans
taacctcgtgttctggggtctctcgtcaatcgggatctagctggagactggaccgcgactccttttcgcccgttacgatctgtttcagaccggtgcgcctccaatccgacctatccaccgctgacctcgaaacgtctctcgcatcttcagaaaacggcctgattccaccggataatccactggtatacgtcgcacctcagcacaaccaccagcatcagagaccagccgcatctcagatctacaacggcgcgatcgtaactactggttcctaggcgtgggtccaccaggcgaattcgtcgtcagtttcgtcagtttcgaccagggcccatcgctccacgctcgacttctcttcttttctcgcatggtgtctgtttgatccagcctgagcagcaatgggttcgactcagtttgggaatttcgacgtgagtcgccgccaaatccactttcggcatccgtagagaatagtactgacgcattttatttcttgtcggacaggatttttgtcgcgattccacgcttccagtctgcaatgtatgttgctctcgtccgatcttggcggattcgcgcaaatagccttcagcagctaaccctatctccctcagctcttcgtttcttccaatcaacctcctaatgagatttatggcgggtgcgctcttcgtggaattgggctcagtgacggccggtatcttgcaaatcttggtatggcatgttcttcggccattagggcctcttgctcatgaaaatagggtctatattgctcgcgttcatagctattcttgtttcattggttctgatatggcgctcggaccggaaacaagcggcggttggccgaaggtatgaggatcgaccgacccagaggaatgcgggaagctcacagacatggacagagaaatgcagctcttcttgctgggatacattatcatcgagatttgcgagatcttctccgtgggcggctttcccctcagaaatgatgtccgaaaggttcgttccccgctgtttattaaaattcaacggtctaatatccttgtagggcttttcggctgctcacgtcgctgcgatcactatgacatgttgatcctcctcttgaatgcgctagtcggtttccaattcctcgatgatggaactcctgcttcaatcggtcttttcttgttttccggtttgattttcttcattggtacgggatacattgccctggacacagctttcgattggacgggcgagtttgcgacaaacgaaggcaacggctatcggaatatcgccctttatgtactttaccagctcttccccctcatctgtctggtcgcgttcttctttctggaaacgttcctcgtcgtccgtatcctgggcgagcttcgcccaatgcgtgcgtatatccctcaagctggtttctagtcctggttgactgactgtctgcagtgtatctctccgcagccggtctgctgttcgccatcggacaaatattcaactatgtcatcagcactcacctctgccaggccacagacggaaagatcaacggcgccctgttcgagacgctcttcaccctggtctcagttgtcatggtctggatcttctggagtagcatcacagaagacgactggccgacgccaatgtcacagccaatgccgggatacaactagtacggcccagctaacaaacataaaagcataaaaaaaaatcagtccgaccagcctaacagctatgggagagtccttctctcgcccgcccgagtacagtaccatcgcccgacgatcctttcgcgcaatcttttgataccctcaactgcaactatgctaatcacagaaggaccggctagtccgacttcgacctcaataatctaaaccccagcatgctcctctttttttctcgatgtcccccgttcatgttcccacgattgattgtcttggatgtgccaatgtgccaatgtgcctctgtcgaccacgatatctttgccattttgattaccataacccgaagctacgccatgagctgcgttgcagttttcggagtaaggagatgagttccttccagactccataccgagtttatatctactgtacgtttttagcagcttttcttctagatacctatctcgcgatgtacgtaatagtgactcaagtttttgataaataaccaatcttctgcattttttgatcttgatggctttcgctgtgctatgactcttcgatgtcgaaacatgtactccaagtaggtagggtgtatctacgaacataccctcctgactagggttattaagcataatcattacccaggctccggcgtactgggagcgctaacctgttattgtcagtaggtggggagtcctcgagcactgcccatgaggaaaacgaaatagtgagagggactgtcatctgcttcgccaaagattaactaagaggcagaccataagtatataaccacagtctatacgaggcatggatgcgccgggatagatgcccctgatgcaaataagattgctacgtggcacttcgaagatatatcatgcgaacagtatatataatggtatgcacacgcaaagtccggatgcatgccaggcaacagaatcatttgaaccgataaatatggcaaggagaaaaggtataatatagtcccgccaaaagcaagaagaatcaatatccacgcctatgcaaaacagaacaagaagcaagagaagtaaacctcaaaaagctcagagtcgtagccctgtcaacacagattatatccgccccttgacatcaacgcaaggcagcgtccattcccgcctcccaattagactccttccaccacttccgtcaaagcccgtcaattcctccgacggctccgaagcgccctggtaacctcccacaagccgtctttgcgtctcgtcaacggccgcacccgcaagagtttttgcagtgctattcagggtttcaaaaatgtatcctgctagtgactcgctttccgcgccttgggcgggggcatcgtagggcgtataccggggggcgaaccagtcagcgcgaaggttgaggaagcatcggtcggaccagttgcaggttgaggcaaagaggatgacgagcagcgcggagcagtaaatacacggtcggtggagaatataggtaagggtaacgaaggaaatgaggaagagcggggaggcgttggttgggatgaagagcagggggagccagctggattttgtcagttgcgtttccttcatggcggctatttcaataaatgatatttgcatggaggccatatgattgcttacctcctaaggcagaacatgttgagcgagtcgatcagttgatcctggaactggacgatatactgagtacagcagaagggaaaaccgctgatgttgccagtttcgaaagatcaggattcaggagaacgctgacaaaagagaatttacatagaacagattcagaaagtgaatggaatcatataaacaaagtgcccttagcaggccatttttagtcgcaaatactaatcctttgaatttttttcgaatccgggggacaaagacgggatagtgatgtagatagttgattcttcactcattgcgggatcaatggacgccactgtaaattaccgttaccgtatgatcagcctcgctccagccacaacttgaatcttcactggcttcgttctccgacttctccttcttcccttgctctcgcttctctgtataatatcctctcctttcgcattctgcttggtttgttccgatgcaattggtatttaatcctttagctcgtctcttcttccactcctttttattcgcctgtatccgctgactctcgaaagagagctcttgcggtaacaccgagcttagagtgtcacctggaggtcgtcttctttcacggcgagcgacagaaatgtccacccctaatgatattcaagctcttttggcgagcataaggcctcgtccttcgccgtcgggcactcctgcgcagaattctggcatgccgcagacaaagaattcccagcattacccgcatggataccggcctcagcacccggctcat

SEQ ID NO: 5039 - DNA, 1894 bp, Emericella nidulans
tcctcagatttgatatccaagtttcttatcatggtgtccgggctatgcctgccgtcgcgtcgggatatccatagtgagactaagatgccgggcaatagacacatgcaatggagcagaattatctcttatatccccgcgacccagtttactccggactttgtacgactcatagacaccccgtagcttgcccgcagactgactccagtctcagcccggcaagctggagtcttcttcatggactccactctcacatgtccacaggctagtcttcctcaataacgactccaaaacacacttccgcctcccgacggccccgtgatctcccgtccgtgaatcattcaccccgtaggattaacagtctagacggggaagtcttgaaaacgctagctaggaacaaaaaaggaacgtattggaaaacgtgaggtttagcatttgcagttcttgccgaaccagcattatgccggcgtagaaaacgtagggcgagcggaaccacagcactataggtacctctttcaaagttcatgcatgctgttatccatgtctaaccatttcatactctgaccgccatatagttatggtgaaaacacgacgcctacctgagaatttaaccagatttgaagtatcatcagcgtgaagatagtagagcactagtgcgactaaccaagtcgagccgaagcttgacgctcgggtctcagaggatggcagctgcaggtcagaaacacgacacaggagagatctgctgagacctgttttatctccgttgacatctgagtgggtgaacggatcttcgggacggatgggtggatatgcttcggttattgctgaggtttaggttgagtcaccagatcttggtcatcgagcgcgcgtacgctgatgcattcgtgtgtttagtaaagaatacccctccctagcgggaaaatacaaaagtgagtaatttgaacgatgggagattggagtcattgtgcgcatacagaaggttaaaatcccgttggctttagagattagcttggctctgcaagggaggtatgataccgctgccagttagatactacaaatagttctgaatgaagtgtcaatatcatatccctcagtgggagcagaacaaggaaacgacaaaggggcaaccatgtcatgagcccatgattttgggatcaatcaatggggagtggatggtgccctggccctgcttgaccagattgatatgggaatatattgtcactagagccagaatgaccagaaataagcggaataggtaaaaagaaaaagaaaaagaaaaaagaaaaatccctctttctttgtctatctccagaaacactccctcttggtcatgtctcgatctatattttagcttgttacttcggaatctgcatatgttcagctgcttgcggtacctactactcccctactataacatcccgcattacaatcagagagaaccttaggtggcgacttgacgagaaatttaactttctcacctttgccaaagcacctcgaaagtaacccttcacattgcttctaggccctctagtatcgtaaattggctttaccaagagtccagactccactgcccaactacctattaagaggcccatcggtacgagaatgtgatagagcaagtttaagcttagaactatggcttgcgggcgaatgttggtgctctgcagaagcggtttagacggagcagggccacagtgcctcgatattaacggtccaaggaatgctgctgctgagacctcggctggaaagtcaggcggagacgaggccgaagctgatatagaaatgactaatttcagtatttgatgccgtttgtctgactatgtaacggcggcttgacatgcttgaagtcctcccaagcggacaagataacctttctagggttcgaagcagtgcagta

SEQ ID NO: 5040 - DNA, 4150 bp, Emericella nidulans
ataaactgggattcgtaactgcacctgatcgcgttgtcttctgcacaatgattggcagggttctgggcgagatccatgtatattgcgaggccatctcatcgtggcgttcaaaaagtggagctgaaagattggggagtggacttgctcgagcacgtgctcttgaccgcagcaatcagtaacaaataaaacacccaacgctatccgaggcttcagctccaatacgaagcagatcgctttacctgcgaccccggactccatcgaggccgaacgatgtgacgctgtcatcctggtccatgctcctcttaatcgggaaatcccgcacgagattggagctcccccagccatcaacttgctatcagtctatcacgtcaagaacgcccaggccgccaaatcttactctatttgtttccgtcaatgatttttgtaaattatttgcatgtgatatctgctgcgacatccaatccgaaagggcccaatgcttcttatttcctggaggtggttcgatacctacaccgacgcactctcccatagccaagagcatggcccagaacgcagccatatctgccttcagagaaacttatgctgcctcaatgaagcaacaagtcaggcctggtcactttatccaaagcgaccgcgttttcagcaccaatattgcgcacaaaacgctggaagatgccagaaaagaccgacgggccagcattgaattcggctgcaaatgatggccaatcacctatgcgtcggatcaaatatcgaaaggactgaaatacgcagctacctggggtggctttcgagttcgtccgaaaggccttgaacacagattagaagactttgagctcgcacaccaccgacgaggaacttacgtcagaataggaaacaggagtgtacccaggagaagcggtgccattatgaaatgtttaacctagtcgatctgataagagaaagggtttttcgcctaccagtactgtcgctgactgaagcaattctgattaacctgtgcctgggttctacaagagtggtaaacaactatacttgctcaacaagcaatgcggatcatggaaatatcatcccattaaggagttggatctagatctactttacgtttctcagattcctgacctgctgtgtattccatacaagcaaaacagtcactaagcagtcgagagccctagcagctgtcagttgcacgttacacacctcgcgaagattcttctcctatgattctaaaccaactgctatctctagccgctagggatggggccgcagaagctgtccctgctagggtatgctcctaggcggcgatagcgtcttcgctgcgctaatctgttggagtccatgccatatgcttcttggaccaaacctttcgccacaaagttcaaagatcacgaaactatcctacgaggattatgtcggccacgaaatctacaacaattccccccccaacacaggggttttcgtatctgcttgcaaactgcaagacgctcttacggcgcaccgcatcaaacttgagaaaaaagccgcatccacggatctggggcgtgataagctttaccggcaatctgattgaggacgctcgatcccaggaactggctaaggaagccattgtttctgatgtattcgccagcttgttgaggcaactacgttgcaccggaacgtaccgctaacgccgcggccgtttagcccacgcggagccaatcgccaaagccaaaagggatttgtccaggcactattgactaagttgcccaaagtatttgtcgatccctatagggactaggtgcacataagccgctgacccagtttgagtatattgctgtcagggatacctgagaaagtgctgggcagctagtttgcgaaagatacaggctgaggattttgtctcctggtatcttgaagagtgcaagtacttccgttgtgcagctggaggcaaagtcggagtcggttgatagtgaactaatagagagaaggctgtacttcgccctttcctgcggttggacgggatatgagagacagtatatccctgaagacaatactgttcaaatttattgctggagtgacggtgaggttagatctgcatgctctattagaataaaatggacaaatgtacagttcagctttgacgttggtcatattaaaccagcactgaaatacacaaacgaggaacaaggatataacaccgtcctgaaaaatttcttcgccggtacgccatgctgcccaatgcctttctcttttactttcctgttttttcccttgacttgcagagatctggttctcccacaaaggcctgcgcctgtcctaccctaggacagtcatccatatccagttgagctgggtgtctcactagaggtggaaccagagttatgatttattcgcggttgaagattgcctggtggaatgcaaccccgtgtcgctaactcaaacctacttaaataacccatcgataactggcatatctgcctgccgtctcactcttccggataatcttgacgacttgcccgcgcctgagccccagatacctcgcaacgggatccgaaacctggattcttggcagctgcgattccttcagacggtatctctgcaagagcttgctcttctcctcagggcttaggagcacatgttcgggacaagttcaaccggtgtaatgttcacaagtagatcctgctcctggaaatgctcgcagattcggccgtggatgccgctaagcaaacgaacggcagatgcggagatgggcgtctttgtgatgaagatgccggtatggaaatttccctcgtcatcagtgtggttgaaggtacggacatgctctgtgccaataccgctgtcgtccggacagaattcaatgtagattgtcccgcagtctggctggggatcgcggtttgagggggtcgggagaggcgtgtattttgctttcatggcttcggtgggacgggcttgaatctttagcttctcgcggctatgggataactccatcagtcgtgttcattacacaaagagcaaatactggtgggctagagggtcgcacctggggtatcctttttcaccgacgtatttcctcttaaattcgtcaaggtcaatcttgacttcttcctctgtcacttcatagccctattggtcgagattagtgccctgcgactggagccaggcagaacgcaataacgtacgcggtcttgcagcatttcgaaaactgttcgccatgtgcgccagacgcggatggtctcgcgctcggcgtcgtcggcggaataattgtattcgtcatccatcgcgatggaaagatgagctgagaaaagttaaataaaggaagagggcgagcgcagatagttctcgctgagaggtagtgaagctcggagggttgaacgctttgcgtcgaaaaatcgggcgagcgctaagagcgccaacggtaagcgccgccaatgagacgccagaaagccccagaatcctaaaggccagacacatcttccaccttattcttttctctccttccccccatcctctcttttttccctgtctttcttattttctcattctctatttcctccccggctttgggattcttcttcggggattcactttgctttctcccgggctccaattctccctcgagtccgtcccgttcggttgtttattgcttgtctttccccacgtaggtccgtttaattatggccgctgctgtcaagtccgagggggcttccgaacccaaagtcaggccgaccaagcctgatgaggagaccttcaaggccaatcttgcccaggctgagaaggagcatgctgctgttcaggagaaattggtatgcgcccttttgattttatgctttcgcacagtgtctactgaattgtcacgtgggactatgcttattacgctcgcaattgctatacatatgctgactgcaggtagaaccaaatcaaggccaagattgaagccgcgaagccaacaaccaggactcgccggccgcaaagagacagcaggagcttcgcgctgagctgtcctcgattcgtcagaagcagcagggattcaaggcctcaaggaccagcacccaggagaagattaatgccctcgatgcgacgctcaaggctcgcattgccgagcagaacaactcccgcacccgcatgtgcttcaagaacgtcgaggagcttgaccgtgagattgcccgtctggagaagc

SEQ ID NO: 5041 - DNA, 3828 bp, Emericella nidulans
ctgtattgtggtgcaggctgcgactctatatagggctggaatctggggcaggaaaggggaaaatcaggtgatgacgtcagggtgaccgcagagctgtcactacgcaatgctccaccttaagcccattcaacgtctctgtttctattaattgaatgagattgtgtccagggacatgacatcaaccggtcacacaatgtgagtcattacacggaccatcgtcatgaatgctcttttacattgaatggtagccaatgctggacctcgtcgcaggcagcatcattaaggaatggtcgacactgtacgacgatcgcgatacgatgaattcattgtcctctaagaagactattctgtctggcacgatccggccacttctaggtctgtcgatctgcgtgattgccggtcggatctgcctggtctcagtcgcctgagatgctatagtgacgtgcgtgaaaaaaaaaaggtaaaaatagaaaaaagaaaaaataaaagaaaagaaaaaaacacaagaagaaaaaaagaatattactcgagacactcaactatgaacgcgtacgggctgcatctttctggtggtcattgctaattattctttgtgacgcagtaactcttgggatggtatcacgttggatgtcgttgccgtgctgcagtttccttgagctggaacgtccgtcttcattcctgcggccggattcaagcggtccgctggaggcaccgacagtgtgcctggcctgaacggtaaacacaccgcgtaccgactccatctcatccggcggttcagaggcgatcatgacgcattgtcctgattcgatgtgggcgctttcccaatacgattgtttattgtctgcatccacagacaggacctcgcagctggctgtccctgagactccattccattccgcggttcagcgaggactatgacgagggcggatcctgaagttcgaatgcgatttcccgtctcgaaccttggtaatgcgcagaaacagaggactttttgtcagtctcttgcacaatcatcagattgatctgtccgaggtgcgaccatgaatggattacgagtctgcctttgtcactagccggcgattgggcctgcccttaaaggtaggcattttcgactggcgtcagggacacccacagaactgtgcctagtattctgtactgacagcatttgcgagagaatactaatgatgtttcgccgaagaaaaatatacaaacttggtgatagacactatggattataaggactctctaacttgatgtttgcgcttgtcctccaagaacgggcgtcgcgcgtgcaccagcgagtattgcaaaatgttgatctgaccgggtgatctttgatgggctctcgctgatgtacggtcctggcaggaaatctgtgcgcaccgtggacagtcattgtttcttcccccagccagcggtcccaagttgggtgtacagctttccttggtacgtctgaaactgcacccatgaaaggcgcaggtcgagacctgagctggtaccggtttttgttctcgcacccgatcgatcttccttgtctgctccacgtttgtctttgggaccagagtttggtccgctgcggttgttacgccatcttggaagcaaaagaaggcttctgggcgctattgtctaagaactctagagtctggcagacagtgagagtatggtccttggagaagccatggaagagaccactgcatcagtgacagtctctgcgcttaacgtctcgatcttcatgagcacatttggtcaaagtcatgtcgagcagttgcccacagaactcaatagacggctgcgcagctgatcgatgacttttgggtgtcacccttcggaaatccacttcctcgaagtgctgagccaaacaagtatgagccatgtacgccgctcccagaggtctactgcatcatttgggtgagaaatcagagtcgagattgtttctaaagttgcactgcctgacttcgctcggagtgttttatgatcaagcagtcatgaacctgtacatccggcttagtgaagaaatcctcactgtgattcaacactcggtgggtgctgccctcgcttaagattccacttcaaatcagacagccagtcaaaatctaagcggatcgatttccagtacctataatcagtgagtgttggcaacaatgaaactagtttcacgcatacgctcccgatagacagaaaccccataaggaacgagcatcgatctagagtctgagaacttaagacggataattctgtccaagctaagggacactgtatagcattaacagaatatgccgagtggtgtgggaaaaggacatctaggggttattttgcttcataactccccaactattgaaatgcttgacttcaaagccaatttgtaaattatatcattacagcatattataaccataatttctccagcaagcactcgacctgcctccggccaaagctgtacggcagtcagaaccggaatacgtatgtctaaccatttcaaacgccgtttctccatgacaatgctagtactcctcttgccgggcatttttgcaccttttcgctcaaacgcagatctgaagaatccaacagggtatcgcatccaggtttccatagaaggcgccaccggtgattctctaggtttgacctcaatcgatgggcgacggcaagtattgcaaaatcctacacaactgtccagagaagggcaggtcatattaacattcggtgccgcccatagtccttatattcttgttaacaatgcactgggagcttagcttgaacggtcaacgatgacaatcgccgtcgcagctacataatgacggattaggtcgaagatctgggtttcaacgaagcagcctcaacggccttggagcgtccgtgatattgcctttgtgccttacctaaacccttactccatggaccggcgctttgcattggtgagcaggctagatgcaaatcaaaacctgacgctgatatgtcaccgccaggtacatcggaagctacactgcgaaatagagaacgtggagctatttccatctcaatccggagatttggattgccagttccaggcccctttcttggtcgagggagtcgatgcaccagagttgaaatgtaagaagacagagaatttgacatttcccattttacattgaatagtcttcgtcttctgcgttgtgcggatgccttggtacatattcaggagatatggacatcaagagagtatacggcctgtaccctagaacggcacaaagatcagacctacagacaaccatttaaattgagacgcttgacttttgcgctggtgcacttatccacggatcagtaattttctagatatatggctccctttcccaaaagctctaaccaaggttcttgaatctctacttcaagatgacgtggcgatctagagctgatgatgctgaccaccgacactcgcccattgaccttatgttctgtcgctttcatatcttatcgcaaggacaaaatccagttacgatactcaccagttcggaattctaggagtcagacaagatacagacgtagccgtccgaagatgaccccaactccacgaatcagcgaaacaatcgcacaagaccacgccgagatcaaagctatttacgaccgtatcgtatcatcgacctcgcgcgacgagcagatccgctaccagaacctcttcgtctgggaactcgcccgtcacgctgtcggggaagagctggtcgtatatcccgccttcgagaaacatgtacagttcgtgggcgctggtctcgcgtcaaaggatcgcgaggagcatcaagccgtaatggacccctcttccagatttgcgcatcctcctctcttgatagcagtagatta

SEQ ID NO: 5042 - DNA, 4263 bp, Emericella nidulans
aggtggaagtattcggagacaggatggcgccccagagatctggttcggctggaggagactggatctgcaccggctgggagagggcgccgtagtaatgacaggtgtatgaacagcactgtctgttgtaactggtggtcctgccttcgttgctgtagtagctgctgtcgtattcgtcggtgttgttggtgatggtgctgtctttggctgctcaacaccaatgacgcgagtgcgtccagtgcgcctggaaaccatatactcgcaaggcagaccacggcggacgcatcgactgcatgtgggcttctccttattgcacttgaccttggatctggagcacgagatgcaactctcgcgcagtttgcgtgtcccttgcgttccccccggggccgtgggtgtggattgctggctgatcgctgggggctccatgatatttgcatatgatacaggcccgcattgcggattgaaccgcgagatctggatgatatatatcagtgaagagaagatggggagtaagctgtactgtgtaagctgtacttggggtcaatattcccgcagggattacagggctcgatatctaccgactgacacaagaaataacaattcaactttactggctatgggtttcaagggttgcaaacttagcctggagattcgccatgaggagatacgactccagagaggggatactgcgggctagaactggttgactgcatgagccatacgataaccccattagcttgatccattacttatcctaagcgaaggctgagcaccgcaagctgccctgtcggggtctaggagtcggcagccgctgggctatatcaaggcttcgacctagggcccgcaagcagtgggctttcctattcgagacgctgctctccctttcccaccgcatatctttgtctttgctgtacagactttttagtaatggcgactcagccagctggctttttgcaacagttcgcgcttcaggcaagtctttgtgttccccccttgggatcgtcctgcttccagtcccggaagaatgaccggtgctaacaaagtaaagacgcaactcctggccaatctacaatggctatgcgagtttcaagtgttggcctgcattcccctggacggagaggtggctttcgaggaggtcgcggatatcagcaatgtccctgtggaccagctgcagcgagtcgtacgcctgatggtgactgcaggattcctcagcgagagacctagcgggcacgttgcgcataccccactatcagcctcctttgtcacggagccagagctgctagacgcagcgcttttcctggcccaggttgcggttccggcggcactgaagatgccacgctcaacgtgccagccggacccttatgatcgtggcctctctccgtcgctgattgctcgatcagagagtagggcaacgggattggaagatagacctgatcctgcacaacccaaggtgcaacgccagtttgcagcctatcttgctcgagggattcttgatgagcctttggccgttgatgaggtgcttcgcttggtagactggggtgccattgggccggccaccatcgtggatgtcagcttaccatatcgtcgatccagatcatcccgctgacagcatccagatccatcccccgtccaccagcaccatcggcatgattgctgccctgggtcctgccgcccagttagttatccagacaagctcgcctggtaacggccagtcgggcccgataacgggctctgagccatcctgggtgacataccagctgccaccgtccatcagtaatcgtgtctcggtgcattcgcggggggccggcgccccccagacggtcttaggtccagcggtctacatcgtccgcatcccgtccccctcacccatgctaccttggacgaaattgcggagccaaactgtgatggagctgcaggcccatctccaggttctccgcactcagcccacttcccgcctgatgatagcggccttagtcctgccgtcgcctggaacagtcaatcaggagacggaatccatggtgcgactgcgcgacatgtcgctcctgcagttgtctaatgagcggcagcctaccaagacagagatcgtcgagattgttaccggcatcagggactcagggggctgtttagtggtgacacgcgagatacacacaacagccagtgctgcaattgggctagaggtgcgatacgaaccgtctgctagaaagcactaaggaatgccacgtcggaggggtaccgcatcatggactacgctttgacgcccaacattatagcatgactgcagctgataaaaagctaaacggcagcaagtgattggtggacactggattagctttagtgtgcattttcctgtcttggctgccgagaagccctactgcaagtccacgacgctgtaaaaggtttgtcattgtgagggtgtgcaccaggattttttgccgcgctagtaatatttgatgccatatcatatgatataattaccggctattagacaactaggttattggttgagattgatcttccagagcaaacattaacatagccattttctatttttaaagcttccagactgctactaacagatcaaactagtttaaagagggctgaaaagtacatttccgcaaatatgcctgcttttaatttgccttcgaactgtatgcgccccttcgtgcgtgcagtccttgaatgccaatgccttatctaaacgatttcaagtatatatcctttcttattgggcccagattaaagcagctaatatacccgatattcttagatcagacatttatacaacgcagaacatagccagaaggtacacaccatgcccataatcatgctctgtacttgaaagctaaacttgactaattgaaagatggcgaataatccagttatcaaaggatatttctaagctgtaattacttaaggcagatacagtgggttaccaacatattagagccattaagcatagaagggctgtaagaattataattcttatagctggaatggcagtagggcagacagatcagggccagctttccgcatgtgaaggcctaactctagggtctggaagaacctctagctttatttgtgctagtttatcttattatgatcttctttcttacgtgaataatactaccacagtcttttgccgggcattactactttaatttcttagtaaagcaataagctgtacagtggcagtactagcatccatactagcgctgcaaagactttggtgcctacgtacttctgttcttcaacacaacccacagcggtttcttgtcccacaggatccagatcccctgcaccgccatccagtccatattttccatgcgccgccggtccagttctacatcaaagtgccataagaggtggaccaggaacagccgcatctcggcaagagccaactggcgtccgatgcaattgcggtgaccaatgctaaatggctgcgaggcctcccgccgatcattgatgaactcaccttccttttcccaccgttcgggaataaactcgtctggacggtgaaagttggtgggggagcgacaggcagcaaactgtcggacggcgaccgaggtctgtaatcaatcggtcagcgagaggcccatcggctgaaagagaaaagaaggaaaagggcaggatgagtggctgcagacttacccctcccggaacccagctgcctgcaagacgggcgcccggtggtggaacaatacggttgctttgcataggcactgcaggatataggcgtagcgactcgtcaaggaccgcctggagcccctggatcttgcgtaccgtttgtgcataaatgactgcggccgtgctgaaccgagcgcggatacgctcagtgagctgctgcagatactcagggttcgtgagaagcagccaaagacacccgttcctagtggttgtcgacgttttgttccccgaagaacgaaggctcttgcattgttgaccatcttggagcgcgaaatttgatgctcaccatttgagggtctgccagcaccgaatcccacagttctcgcgcgtgtcgttgcagctcagtcggcatccaccttttttgtgaaactggtcatacccgttaatatcagtacctgtgggcgccagactaatggtcctttcagacgtcctctaaactgtagttcggatggtttcctttctctaatggcgatctagttactcattctttgcagccacgtttcatgcattctttctttagttccatacctatttgctctcctctatcttgctattttctagctattccggttttcttaagat

SEQ ID NO: 5043 - DNA, 7174 bp, Emericella nidulans
tgttcgggctgttcgggctgttcatgctgttcaagcagttcaggcagttcaggcagttcatgttgttcaggcagttcaggcagttcaggcagttcaggcagttcaggcagttcagttggcagaggcagtggcagaggcagtggcagtgacagcccaggaaattacctggcaatgtctcctgcggtatatgcaacgcctcaactaccggagccatgcatgatcatccccgtttcgttcagcgtcctcttaaaaggccagaaatgagcgccagatttagtaagagcactgtagctatgctccgtatcggaatgataaccttcctgtcgagtccctagtctcgtccagcgctgctaccactatccactttttttctgtgctctttgatgtcatttcacagccttatttctgccatttgtgccatttatgccattattataattattattatcctggattttttttttattttatttggtcatttccggccaaggtgtatcgtcctgatcccaccaaccagcctaaacccccctttcccacgcagttcctcacagaaccgccagacgcaacagaacccaatcttaatcgtcttaatcttaaatatatagagagattggtctggcagacggactgagaaaagactcccgcgacattgtccttccctcatctctcctcttcgtcttcgcttcctcgcccattccttccttccttcactttatagacctaatttatctggattttcccggtggattgctgctgcttgtttcatttttcattttttattccctggttctgattcccaagactccaatactttctaatcactccttactacatattctatctatcctaattaatcctcgccaacactttcgagtgaatttctccgctggacgtccgatagtggaatcggccacgacgacacgagaccactgcaaccaaccaacaacgactggaatcgcgaaacaatatagactgcagtcctgatccctagtgccgggtctcgacttaattcggttgaaacacctgcgctgcccctcgatttgagagtcagtccatacagtcgacgctcttactgcatcggaagggtggagtaccgctgctgaaacgagtgccaacgatcctcacgccgacgccgacgcccactcccacctctccagccatcgcgcactcgtcttgatcgatgcgcgactttctgtagtcgaatcgacaccgattactacccctcgtccgtcatttccttgaatggcggcttcgctcgcccgctctatcctccagctcagctcccgctcccacatcttcccgatccccggccttttgatgcgcctgctctagggctggtcgacttccccagaagcatgactacggctgttgagtgcatgacatcgatcaccgtctctcagaccgccgtcatggatccctccgccgacaagaagcgcaacaagctgggataccatcgcacctctgtcgcatgcggtcagtggccctccctcccccatcgtgccccctccattgcctgttgcttatcctgctccagtccactgtcgacggcgcaagatccggtgtcttgttgccgcagacgacgcccagggccgatgcgaaaactgcatccgtctgcgcaaagagtgccagttcttcccggtggaccaacaaccgccgatcgagaagaaatcccgtcccaattcccgcatcgaaacgatctcgaatgatccgtcgacggcttcgtcgtcgcctccgactgtctcgggagaccagacagacgcttactaccactaccagcatatgcccttgagcgccggccaagacgtcgcggcgttcaacgccgcgccgtatgcgaatccaatggctcaattcgcgccaggtgggtatcatcagatggaatcagggtcaagtgtctcgccactgacgaggtacggcacaggtgtagatgcgacatcgacccccaatccgatggacccatccgtcccctgggacgagttcactacgttgccctcagacccgcagctgctggcgacgatgtctgccgcggggaagcccatggtcagcgtcaacatgcctcaccaagctcatgtctggagccagcctgcgaccccgatcgccgcaatgccacctaatacacagctcccaggcgcgcccaccgtgccctcacaaccacagcctttgagcccgtcatcgccctacacagtgcagcccgacggctccgtctcggtctggcaaatggcgcagactcccactcgatcgatgacgttccctgcccagccgaacatgcccgcgcagtatcccagtcccggcggcttcgcacaacccatgccggccgacctcaagcggcgagtgaccagtcccggtcaagggtaccctatgcacccgcagagcccgccggccgacctccagggcacatcggttccggttacatatgccgcgcagccgacaggtataggataccccgggtggcaggatatgagtggcgtaacaccggtgaatatggtcccatacccggtatacacagacgcacagcaagcacaggccgtgtacggcagccctctgatggggcctggcgctggacatggacacccggggcaacatcaataacatccgtgggacgaacaacatccaaaaatcgtacttagccgaaggaaggggacgattcagcgaggagcgacggtttcaattcggttctgtttggttccattatacactatcaccatctatacccgttggatatcttgcattatgcatttctttgggtttcatacacttcgtctggtgggttcatctatacactggctgggggttctaccagctaagcattagcgggcgcaatggggttggttcagtttgggtggcttttttccatatccatttccattttctgttcatatcattcatgttctgattttcatctgccttgtcggattagagttgcattatgtttagatctccctgtattggatccatgctatgccggtctctctttccttgcgggtttccccgtttgatggcggtcttatgagctagagtggaatttcctttgtcagcaaggcaagatgagtcgttagatgtatgctactgctcctgtaccttcaaaccctatctacaccatgcaaagaaacctatctattctgtacgaatagcaccagatagcgagtatctactcatccgagcaggtattgagttcccctagcacgaacatgcaatgtggcaggactatctggtccctatatatgtaaaggacgtacctgacatagtcaagtcatgaaagacgttcgtcatccactcatgctaatcctatctgcttctcatctagatctaacctcaaggcccgtacaaaattgtgtcgtccgcgcatgcttgagtcgtccgctgcatgcgcaattgaaggcgatacagctgaagagtctctagtcccagaacatctacgtcgattctagttagggtccagtcccgcctagagtaggacttaggacaaaaaggtaggaacgtacgtgcgaagaaggcatccaagtgtactgactatacgagggtgccactgtcggtacttccggcatactgtgagtgcctccaaggtcatggatgctacctgcttgactgcctaagctctcgtggtacgccggtagataccatgtaagtaatggaggtactggcttaaccaagctaaaatctcaacccagttcagctatcccagctcaatgaatgtctgggctcctgatgtcgtacaggacactaggtattgagcactgaagccgcagctgggagtcttgatagctagttagagaagatcagttaaccgcctacggtaagtaccagtagtagtatcattcacagttcagattggagcagttattctgttttattcttgatctcgacaaggtacagacgagagggccgcgaaaccggacaggggtgaataaaggatagtgcagataagtagctctggacgtacgtacatgtcatcttcaaagtcagaaatagtctcgatagtcgtcctctccgtccccgggcatcatgcttctgatctgtatcgattcagcttagattctacaccagtcgggaaaattagggccacggtgaatcggcataaggcgtcttgagcaccgtcgaaagaaaccggcactattgaacggaatctaatctagctctttggaaagctttgcggtgggagttgtaggtaaatactatgctctatcttcaacatatgttattctacagggcactacactctcaattgttattgagacgtatgggcgatggccaggacgggataacctgattactacggtgaaatttttcactgctctaatatccacgggctctctatcttaaatatgctgatatatggcggagtgaaccggcagccatcttccaatcaaactccgtagacttaaatcagacaaaaggcatggtcatgtccgaaataagaagcgcatctggcacctgcaatttatcccggctacagtgctcgccatctagctctcaggagattggaccgggaattagttagtccaagccatataggagggcgcatgatgttgtctcagctttatggacctttactcttgaacagatcttccttgtctgatctacaataatggtagttgcagggtccaagcttcatgagcacctgtatctcatggatcttgtaccgttcataaacagcaatattgagcagcagatgggtgatgacagtgtattggcagacaaagctgggcaggcattctggatggttgtataatcatttacatagatcacctacttgataagtgatgaatcgcgtatccattcatgaattcaggaacaggaacatatatatacctagttcgtttggctcggcctggttacatcatactctcttgctcacaggtgctctcggtcccagttccttacccatcttgagacaaagaaaagcaagagcatatctacaatacgattgttgggcagaacctccttgtcacctcatgatggttccccgctgaatccgtcgagagattaccgcgtcgctatgaagtcctccagtgttcttaagacgaagctgaatcgtatgagtatcggtagagcatggtggacctggctacaaccacgaacgcagtgcatgttgaacatagcctagtcaaatgccaggaatcaattcttccgatccgttaggtcgagggaatggatagataaccaaaaatggtacaagacatttagaggtataaatccttttagtgcccaaaggtggccgcgtcattatgcttagtgcgccgaatcagtgattgtagagccatgcagttcgaagtcggactcccgtctgaagtccagatcgacgcatatggtgattgagatttgtcgagtgaacaaaaggttaatgaccgaagaagctcttctgattaaccggctaggctgctgctgattctcaacgtcttcctgctatcgcgctcgtcaatatattaaatcttgagcaccgagtaggcaactcaataatagcgcaattgaaggagggctaatcaggaacaaacagaaaaagaacctaaacgcgatagaacctctaacgtttgctctaccaattggagagggcaggttcagatctgttgatcgctgcgtcggatccgacccctgcttatcttataataagcagggatgctatgccgggtggaagacggaatgaccacgtttctccgcggtgaaaggccgcgataaggaaccgacagaggcaggtgaaaagccttaagagaaggagctctcaatgcagcgattcccaacgaagaaacgaggtggttttgcagtattgaacaaagtcactgagctcgggacgtctggggtacgattgcggagagatcaacccaaccgcccctacgcagtctgattgaaatccatctcggcaccattggtagcaattcgttaggccaagattgaaattgagcatagataaacatgcaaagcatatcatgcacgtaatcggccctgacggttgcctccaggtcctagcaagggtcaaagggactaatctgacgtggatttgctgaggcttatcttgacgccgccgttagcaaatgaaggtgttgtgttgaaccggttatctcgataatcacgtcttcaagacgaggggccgatacgcggctagatagatacgtccatcgctcgcagggtttgatagtgattacgctgtgtcattctctttctctgggactgcggttggttagcgttgcttctctgacagctcggcagcagtacaaaaccagggacaccccccttggattggcgagcgttggtgtgagataccaggaggggatctcttcgtcctcttgccagatccctgcgggacgtaaagggtgagccgtacatataaggtcgcttgatggcagagagacacgagcgaccaccgtcctaactcagattgacgcccttcagcaatctgctttctcgaccgtctccacggatgatccgccaaaaggacagtccgctgtctttatactaggcaagtgttcacacatacgctactatctccacggccttcggcactccaagctcccacggcagctggtcagcatcctggactcatcaacggcgccgacggcatcgtaagacgatctcggtctccggctaccgttacgagagcgcttccaaaggcgctgagggctatggctcaccacgccagcgccgtccgtccagcgccatccgtccagagcccagctcagagctcacacccggttcgtcgaggtgcgcctgcccatgcttattactatattgctgtcgtctgcagcgttctgcggcctactccgagatccggggcagggatgtgccgtatttcgtttagtacccggctaccgagctttttccccatacccgccgcagccgccagaaaacatccctgtactcgatttcgaaaacgctcctggtcgcgtcatcgaatctgcagggtgctcaggtcaggcaaataatgtgggagtatcttccgtcgagtgatcatgaaagagaaatacgctgttggcgagatgcatttgatcttggaatgaagataatgtttgtgatgacgatactcggtagtttactggaatgattcttccccatggacagcagatggtccaagtgacggcccgcgtcagatccactccatccgcatacggggaatacggttcaagctgagccaacccatcatgacgaaggattaatcatcctgctcctgttggtggacgttgaatct

SEQ ID NO: 5044 - DNA, 4317 bp, Emericella nidulans
  unsure (1)..(4317): unsure at all n locations
gacatggtcgtgtgtggccccttgggaattccggccaaaaaaaaagagcagtgaccacgtggagactggcaagcaccggttaaactggaccacgaatgcctccaatcgcgattgcagacacgaccagatagttgtttgtaatatattccttctagataacttccagcaccggagaaatcatcggagattgcgtcctgaagactcgaatcgatcctgcgcgacaccttaatgttcgcctagacctctatgcatatgaaacacactcgccccatttggctcttgccgagtcttcagagcccttgtagtggctgtaagtgggcgagtccagggccggggccctgggacttatgcaatagcttggatgaattgttgtccacgttatgacgaacattgtaaccctgatccagagaattcatttcttttaatctctttcttcgttctcgaatcaccggtggcgtattgttttgtcactaagacagtgtcagagacttgatgctcatttgccttattagcccagccagaccctaaaagaccttcgagaagggagacaattgtaaggattgtcgccctcttcctgtgaacagagcatatgcagtctgttcaaaatcttgctcctgtcagatcatggcatacatatcggccagccatggctcgttgcagccggtgttcctcattgttatgagcattctgctgttcctctcggtcgtcaccgtctcattgcggctgttttgtcgggttttccgcgtccacaaaacaggcattgatgactacctcatcgtggcagcaacggccgtgaccatcgggatgggaatcatgaatggattccatgtcgcggtaggaacagggtacgttgcgtttcctcactgctgtctagttcctggttgacgcgtaccagccagcacctgaaatacttggacctgtcggtggtccttgtacccacgctcaaacattggtatgcatatcaaatggtctatccgatcaccgttgggctcgtcaagtttagcatcttgacacagtattaccggatatttgaaattagaaaattcagaattcaggttattgtggtcggggtatttgttctggtctataccattgtttgcatctttgtgaatgtgtgatatttgtcctgccctgtgtatccattagagattgctgacaagccgtccaggcctttgaatgtcacagcaagccttggcgggcatgggatccctcatttcccgagggctgcaacaatcttccagcgacatatttttcgaccgcggctataactattttcacagatctggtgattctcatcatgccaataccgcagctgatgaagcttaacatccacccacgaagaaaatgtatgtttagcccaagggagcaactgagagtacatctgacaatggccccagacgccttggtagccatctttttgacagggacatttgcgtccgctgcatcgatcgcccgtctgaacgctttgtacaagtatacagtcacggaagatgtttcgtacgatgccattctgattcttctctggacgcaaatcgaggtgaacgtcgccatcatatccgcatccgcgccctcgcttcggccgctattcaaccgtatcttcaagggttcctcgtacgaccggccacgaccgtcaaactccccgtatccgggatacggcacgtacggacatggcgaatcacattatcgacggacaatcacgcacggtaacacccacggagcgatcgaactcacttcccgcgatgacgacgcgagtcctgccgccggtgtacatggggtgatccgatctagctcgcgagctcgagcgttggttaacgacgagaccagtagccaggagcatatccttgaccagaacacaaacattgtgaagacggtggtgattgagatgaagagcgagggtaggagataatctgtgcgaaagctcgggtttacataagggaagaaatgggtgcgtgtccatctaagtggctggtgtttgggttaggaaaaggcgttgaggtttctgcgtagggaccagggtatgattgacgatctagaatatacttgtaattagtccaggaacatatatcctcttgaaatattcgcttacctttctatttttcccatccagaccaggagaaccctgttttgatgacgggtgattcgcgctcaatcgctatcctaaaaggaaatagcaagctgttgagcctgaggattctgagaattgaagtcatccgtacgatataatgatccgccgggagcatccacagatcgaccatcaatattttcgttctggtcttgggcgatcgatcggatcttgcgcggaccgtgggctgcggagggagtgtggtgggtaaagtgcgggtcggctgcgaaccgaagctggtggccagagtttatgcgggactgtgtactgagcagggacctggctttcagctcgatatgcagaaaatattattatattattaggagagattacggggcaattagagccaatgctagatttctgaactagagtataagagtaatgtagatccgcaaagcccataacttttcccggggtatcatatccagatgtcattaaacaaggcaaagtctgtcgcatactatcaccgccatgaagaaaaccatcttgaatgccgtggtattggtgggagaggctcagtgcgcgtattgatattccgatacctagcgggcgtagaggaaggactgaacgtcgaaaaggattccatatggttatcctggttcagctttctggaagacatggtgtcgatcctgaaaagatttgtgtaaccagatataccttttccacctctcgttgggcacgtccagcattactaacgggagcaaacactccatagtatatgcgaatcggtcgatttgcccagcaactgtagtcgcggactgcgaggtgacttgcgacgagtaagtcacggcgcgcgtgattccgataaagcagagactcgcgacgcgaatctcggttgtacggagaagataccggaaaatgagtctggtagaggagattttcggggagactcgataggcattatggagcagacgaatgagaaaaaaggagctccaagtttcaacgagggcgatcgatgtgaaatatccgacatgaaggtagccgatctggtgctggtacggcccgccggaatggacggtatcgacaccgctgacgatattcaatatccgatagaccaggatggtcatacgaagcgatgtgatagccaccaggaggaaccagaacatgcagagaaagatagtgcgcgcggttccgcgaagggtatggaccaggatctggtaactgtaaaaggagaggcctgcctcttggatctagaagagaggactaatgagtcgagagcagagggctcgaaaaagcactgcgcttaccagccagaagaagtcggcaaagccacttgctacggctctgttggggatcggataatgggtggcatagaatgcgtagtaacaggccccgttcgctattgcacacgaaatggacaccacgattggaatataggtcaatgggctggggcgactgatgaagagagcccagacgccgacaagagtggcaaagagcccaatgctgctcaagatggaccagctcaattcgaagtatgtggccatggtgagatgaggattaggctgggggtacttgggatccatctcgactggccaaccccccagcggagcatctgctgcttggggttgatgatgggagtcttcatgcgttgtcgagaataaaaaggatctcgggagaaaacagaacgatgaccatcaacgaaaacgatgactgatatacgaagattgaactcctggggaaagcgtctgccccctgcggaggtgaaacactggtcgcgtgttgatcacaccccccacaaatctcattgacggactaattccagatcgaggtcgtcccgttgaatcagacactacgaaaaactgaatcgcagaaaccttcttctccgaatggaaatggtctccggcagaccttagctgccccgtactctcgaccgagttcatgtggaggagggggagacgaggatttgatcttctttttaggtnacccatttcaatcgactctgtaacactggccctgaaagtttttcctaccacgctgattggcgcccctcaattcatccctactctctggacgggctatttcaccgncatcctcttcgtccttctccgcccgctgtactactccgccatgtcgtaagttctcctaagctttttatgacatccataaaaatctctacattttccccttaccaggatcatcccccctaggtctttggtttacaaatttttgccactctaatggtaatattcattccc

SEQ ID NO: 5045 - DNA, 11734 bp, Emericella nidulans
aaggggaggcctcataatgcctcaggcagaagcttacagcatgtggtcaggatattttcattggctaatactatcatccagggccatacacactatgattgtcgtgatatgtgcagcctctcttaggcacgcgcggacagcgaccatatcagatgaaatacggatctttgctggacacacgattatatagcccataaatcagcaaggaaacttctcaccaatcatcgtttagccgatctcgtggtccatattgcagatgaatccttttgcagatttggtggagtggaaacctctcgtggcgttgactgagatgacgaacccttggtttcttgatcttcatctgtcatagcaggatcgagcgagccaagaataaagcagcttttaaacacttgggcaaagccgcgaccgctagagctagtaaacgaggtgcttggtcttgaaaataataacatatagagccgtctgccatggcaaatcgatcatgtaacgaccatgaacatactcttacatattcaggaccacgcactccgtcagagttataagtccgctatcaggcagcccacagcctcgggccctatgtcccgcctgatgccagccgagagacctgtgctggaggacgaaccgccagagccaaatatatacagaacctagtggctccatgagactcaagggggaagagtctgtgctcagaattatgcactgtcactcgttagggctgataacactggaggagacattgaagcaagactcacaagattctcactgtgaagtctcccttgattttggctcggacttcaacttcccgaggcatgtcgatagtaagtatagttttaagtagctcttcaggctcgatatcgctatcctcttcaccctgctcgtctgactcaggcttgtccgagtccgccctgcgagagctaatcctatgggctactggactccctcccttgctagtgctggcgtcttcctgtgcttgtccttctgattgaggttgatctggctgcttcgactgatctggaccagagctctcgatatatgggtttgagagtgagagctgtgctatgcggtgctggagagcgtcactggtctctggggtagagtcatccttattatcgtgcttggaatggcctttcagattgttggactccattatttccctagaggaggtgctggaggcttgctatgcgttctggatctgcgatgtccagtcccggattcatcgtgtctgaaatccgaaatgattatgaagtcgcggctggctttaggtcgaaagagggatgacatgacgtcatctcaacagtagctcggtctattactgtaccaggtttatttgtaaatatagcaggaatattaatattaacgtgtattgaccctcgaaatacaatgtacatctaagcgctggtaaccctgcatagcacttgccagaaaagtggacttaagtaccgtccaaggagctatgattatcgaagcctatcttccctaacaaaacagctgatggaacaccagaaccactcatcctcttcgtcatcaaagtcaaggtggctttgactggccttgagtatgcaatacctggccatgactaactgtaacgcaacgcaaacgcagaagtacaacgctcaaacgctcaatttgatgctcagttaggccaagcatcagggtttcatcaggaaataaaacttttaactttgacagacacttacctacggaaagccttgatccaagaaagtcagcgttcagcccttaatatgacgctgaagtgtacgtacaaggtctgccagagctcgatatccgagcatcaaccatgagccgttacttcgagatcaaaagacccgtcagcatcaaggaatcaccgtcagctaggctcaatcgtaacaaaggcaatcgactggcaacgagcaagggacggggtctttgaatattcattcattgatagcggccatcggctagtcagtcttactaacaattgagagtagtggacttcccattatccatgataccgcgtgcagcgagagccagagtattactaccatacagctagggctagccgcctggattgccctagccctaggtcatactttgctccattccattctgttcctagaacactccaacgttgccagaatggctcttggtctgatctgaaaacatggggaatgttactatggacggaaataagccaatacatgcaaaaatgcagtcacgggtattgagacagatatggagcctcacgactgtttcagctgagtttcgttctatctcaagtaggtaagaattggttcaaaaagccaaagggagtaaagcgttggcttgccaccaatgtacagacaactgtcaagaacattcacaaaccatatacaagatatgattatgtttgatggctacccaagtgaattaatacttcattcgtttcgttattcaaccagtcgattaagtaatagctcccctaccagaggtaaccacatccaaattcagatttatccaagaattcaagcttcaaatctcaaaatctccaaggagtaaacatatcagttgcgacctttctccatgtcatcgatgacacccctctcagccctaacctccccaacatcctcatcgttctcgacatcaaaatcacgtcccagccgctcaggcccgaaaaacgtaacaataatcacatacgcatagacacagcccatgaatatacaaatcaccttgccatagtcatacctttcttcgccctcctccgtcggcggtagcgggaacctctccccgatagtcgattcgatagtcgagctcgcggaagacaccagattacctaactgatatgccgtgccgacagtaaatgtccggatagaacctggcgagagttccatcaggtggatggggatcacgccccacgcgccttggacgcagaactgctcgaagaaggcaggagccatgatcttatggctcgaaataaaggtgtatgggtataggagggcgccgccgacaatgctgattacaataatactgaatcgacgaccgaaaatttgggagccccagccgcagagcgtgccgccggttagggcgcccaggttggccacgacctgggtcactgttacggcgtcgcgagagaagccgtactggcgctggactagcgtcgggtagaggtcttgggagccgtgggactttttcatttgttagcgtggtcctgaataaacgtgaggtgtgggcaagaaagtaccatgaagttgaaaccagccatgagtagaccaaggtagataagaagcaaccaatgcctcttgagcgcgaccttgccctcagatataaaagcagaggtgacgttgcccggcatctcagccctgagctcctggcgctgccgataagcattcgtctcgggcaagaagagccggaaaacgatcgccagaacaggaagacaccctgcaaaccaatagaacggtctccagccgtgggaggttgttcccacaagtgcacgcgcaaaggcagcggctaaaagatatccgaatgcatagccctgctgcagcagaccagagacaatcccacgcgcttccttgggacaatcctctagcgccgtcgccgcaacattcccatacaatccgcccatggcgatgccgaagagggcacgaacagcgagaaactgctggtaagtctgagtgaaaccagtgccgatttccaatgcgataaaaaggaggttgttgatgatgaaaggccacttgcggccccatcgatccgaggcaataccaaaggtgatcgcaccgacgctgcggagcatgagaacgagagtaattccccaggaaatatcgctaatttccttgccgaattcctcggcgagttcagaggtagtcagggagacagtgaagaaatcgagggcgtcaagcgtccaacctaggaaagccacctttttaagttagaagacggaaatgactctattcagtagacagaataagacaaaccgcaaagaacagccactgctgtctattcagcaacgtcaaagctttgaatgggtttggggctttgcgcataggaggctttagtgttggaacgcggtctttcaagtactggaagcaagctttgaaagtgagaggtctgtgctcctcgggggcttcaatatggcccgcctgggccttaacctggtcatcagccatggtgggagaaacttgctgggctgcaggaggataggagcggggaaagtgtgctagcgactggaggaggaggggagacgaagcagagatttataagcgtggaagataagcaaccccgcagaggttggtagaccaggtcaggtcactggttgctacagtccaacagcccgagtactacctaggtgccacgaggcgccgatcagtccctggggcgccggttcattctgcaaaaagcgagggttgaggcagcgactagaccgtcgcaacagttgcgtctcgggattcactgtcttggacccgtgtccgggctgtctgcagctgagctgtccgatttatctctgagtttgcgtgtaagaccaacaatatggacactggcagttctgctggcagttctttgtgtcttctccagactccgcatccccacgaagagccgtcatcgggggtggggacagctgtccagtccacaccccacagaagggacttctcgcttgattccaattcaatgaataaaaatacctggaatactgatatctcatcgtcgaaataacactgtatcatcttatttgaaattgactcaaaatcttgtaccctcgtataacgccccgctagtgccttggatacactggatactactatgccgagccgccttgacacatcttggcttcccagccaagatcaacccaaagcttcgcctgacactggacaacgcagcctcaggaccctctatacatcgaatttcatggtggcatgggaatacagtgaatttacgcatatatctttgttataggtccaaccttgaacttgtcgcgcaacctccctccaacttcgaagtctttcctcggccgccatcgacgttcaatcgaattccgacatcggtgggacctggataagctcggacctgcctcatccggcctagccccattcggggttacatcgccttatcttcagactctatgtagactccaagtggtggaagaagtgaaagtaattatgtatttatgcacgctctagcatcggtacagccatctatatccagatccaacaatatatacagacaaccctaaccgattaaccactgttcagacaagtctatgtaccgcggttgcagcaagacggaaatgagctatacggcagtgcagcaaagaaaacattattagtaagaacgctcccgatgaactccatatagaagctgatagtgctgttagaagagatgcaaggcgtcatggtcatggctttttcttcatatggcttcctgattcaggcgtgctgggcgtctcatccccttcaactatcttccaaaaccggtggagggagaacccgctgcggaagaaataaatgctgacgagccagccagcaaggatgttgacgaggtgatgtgagatgtaggcataggatactccgtataccgctgagtagaccgcaatacagaatagaaggacggaggtgacgtgtttgaatctgcatgggtcagcagatgtattgaccagacattgaaaagagacataccgtgtggtgaccctgggaatcatagagccggtggtcatggtttccaccaaaatgataaatggcatgatggacagcacgttgtgatgcgacgaaaatggcatgaaccagtgcacaacaaggttatgtgcccagaccaggagaacgagtatattaatcgggaggacccagagcattaaaataaataccgagtatgcatagtttgcaaaattatagtgggcagtcgacctctgctgctgtcagtacaatccatcggggaggctcgactacgtacagtctctttggcatgccactgtgcccgcacacaagtcgccagttgcacgatgcacgctactaagtacgcgaactggtagggaattgcggttgatacaaggaccaagagaacacccatcttaatcatacgtcttctcggggaaggtgcaggaaagacaggaagatatctaaccagtcagtagggctcagaaatcaatggctggataactcaccccttttcatcacgcctgatatacccggacttgctgttccaaaggccatagacgacggaaagtatttgtaagacaatgagagcgacgtagttgagcaggacacaaactccaacacagatgaggccgaaaagaggaactaggaaccaaaaaaatgcgtcctgggagcccagaaggagatcattcttcgtaaaatcgataggtgtctcggttgaattcgttgcccagtggaaaggatcgtcaccggtgggaagcttggttgacgtggcaagagaagatgccagaagcgacattgctaacaataaggctggcatagacgaacgcaaggcgctatccaaaccttcggcaaaggtaatgaaaaacccagtctcgtcgtagacttgaaactgctttctcagggtcaaggaaaccacgagtaaaggaaacgcagcaaacacggtcctgtacctcatcaccagttctcctagactgctgacgatgtcgactgttaaagtgatgtcgacggtggaatcgcaggtcggatcagtccatagctgaaatgatactccgttttggcttgtttgccgaagaggaggaggcatatacggcgccagtccatgcagattcacattcaccttgtcaacattgacgaagaacttggattcgtgcgggtctgcgatcgactggcgcaagaggggcgcaaagagttctcgcgggtctccggcttggtgatgacggacgacacggagtttgtagtccaacaaactcgagtatagagccgggattctcacctctgtaagcattggcctgtttgctggcagacgtactttcagtccggcactcagaagtccacccaagcctatccgagctttgattaaagcatctgagctgtccgaaaattctgcaatggcccaacccttcataggcacacgggctttatcaacaactgccacaaactggtgctctgcaaggtcttcgaggtcgtactggagatatgagaaaggtctagcgcggtcatacgcgttcctcgaggtgcgagtcgatgcgggaaggtggatttcgtcgacagcggcgttcttgcacgcaaggcgcgttgagccactgctgtcggacgaatccatattcaacgcaaagacagatgaagctttcccattgtgtagagggaaaacgctgcagaagaggacctccaagcttccttgttctcctgttctatccaaacgctgatccgtgaggagggtgaacttcttgcccgagactccttgaggagggactggcaaaaggtgcacgttaggtcccgtacggtgaccaagctcacgaagcacaagccgctgaccttgcgcaaggatcgtgttggtgtgatcttcaagtgtaaccagggtgctcggctctgcaagctagttagcaactcaacacgagcacttgaaggagagaaatcaccatttcgcgtgagcatcctctccgacaccgactccaaccctgtcaaataccatttcttgaagatgcgcatccgctccgcccttggtttggtctgactagcccgccgcacatccacaacatcgaataaagatttgatgatggccttgcggaattggtcgcaccatgtaatagaaaggtgatctactccgatccatacatcaggcatcgtggaggtgaagaccgtgaagccgtgagtctccgggacaagagacgaaatactagcgtaatcagacgggacaacagtatcccgagaaccaccggcaatggagataagcgtcacatgccacaaagggttgttgtttgcccatgtctgggagtacgcctcgcgccagtaatcattgatttgcttgtaagtgtggacaatgtccgaatcgaacgagaccggggctttggcgtgaggtgcagacattgtgatgatggtgtttactgagttctcctgatagttcgccatagtcaacgcggtacgtgcaacaattcctcccatcgagtgtccaataagtatgacggagctgggatctggaagatcggcatctcttcgcgttcgccgagggtcatggtataacgacagtatgtatgccaccgcttcattcacgtattcggcttgatccagcaaggtttgtccatgaaaagctgccatatcctcattgaagtcgatcatgaagaaatccaggcttcgggttccggcccttaatcgctcctggtcgtgctggaccacttgcgcgtaatgtctcgaggcttcggcggctaacgatcgaacttgacggtagcttcctgcattgccgggtaaaaacaggacgggggcgccgttcaactaagaggaagccaaaattagcatgaaaataaatggccaagcatgagcggcttactcccaaattctcatggttgtatggatccacaccctcctccctgtacagaaagaggttatatttactcgcaaaccgcgtatgctccgtatcaaaccccaccatgcgcagaaaggttgggctcatcacgggcaccccgcaaccatcgcttcccgtctgaagagcggaaaatgaacggacaatggagaagaggaaaacgcaggcgaggattgtagtgagagccgtcaaaatagaacatgaccaaggactgcgaaggcgggcaagtcgcgaccggtgaggcgagtcgggcgacgcctcgatagcaagacgctgcggagttatcatgacggctgggtatcgaggaggatcgtgcgatgcccaggtcgtagtggccgaggagagcgtcctccacgtactagaatttctcgagcgcggcgttgatttgccgttggtgtctcggcgaagatcgatactggtcccggttctggctatctcggggagcggcttctctgggagttcacagccaagactgggttcactgcttcgcgatgccaaggagtcttcggcgtcatccgcgtcaggcgaggagccagacgagcgtctgtgcatttgaagaggcagaacctatactcatccaggacgcaggggactattgggcagattagtgattgcagaccgattccgctgtggttggttcctgacgaaaacggcaaggggtacaggaggtcgactcaggaatgcgcttgcgcacagaatctggggctgactcccagcacctggtcaatctcgcggaacgattggacagcgatcttgacggccgaactccaagtttcgtgctctctggtcgttgacaggggaaaactggaggcagctggagcccctaggcgtcttccagacgaggtaacgagcgacgggccgaccggagatgtgcgcaacgcaaagcacacaacaataggcgagaaggaggaatcaggggagagaattgaaaatgcggcaacgcaacgagcgagcgtggagaagaaatcaagatagggagcgcggaggagcgcgaagccggatttgtcggcgagtcgtcgtaattcggccaaaatctcgagcgagtatcatccaatgtttctggttgcgttggtcttggcggcctgctatctaaacttactaccatgtctgcatagacagctacgtataaattacagcacaaagaaatgcctatatcctttgaagaactgctttaattttaaaggggagttgattggctggttgccttaatatggcgcatcaaataggcatatgtattctcatgctgcacctaatcatcccaacaccatatttaacaacagggctggcggccgtcaagagtgtcaatgactaatcactcattgcccacacacttctgaactcagcaggttgattatcctgcgaagcctgatactctgcacctgtctaaacaatacgagaagcctagaaaaatggtcatttacctcggatctgcatgtaaagttcatactcaagataatccagctcatcgtcgatagccagatgaggtcggcccaatgacttcagggtcatatactctgaatgcagcgcattcggcatcccttcacagcctggggacttctacaatatgagtcgcgatttccagtttactgcttctagcctttgaaaacaagccccaccctacattattccctatcaactggcgttgatattagtccagtttgccgtttcttcttctctcctttttaacagtatcgcctagtctgcttctcataacacagcaaaccctacccctgactctgaactcgtcatcatcggagatccctattccttgagctctacccagtactccgtccctttagagggcctttctcgacattcaaaatgcggttttagcttcaaccaataggacagatctattcattattgttcccagggtcggtcctgctgttttcgttgctcgctcgggatatcacagagttgaagatctcccatgtatccaatacaaatgcaaaactatggttggttagttcactgggatctataaggacttataactccttgacaaacactgtcatagtccttgtgatgccacccaaggttcatgacgttgcccaaggttcacacaatgtgctcacccaaggagtttattgagatgtgcgcgattcttcttgacttagaatgaacacattcattcttatggtaatgtagtagcagataagcagtataatgcggcctccttctatatctggaagataaatggttagacccagctgacattagcagctttacgtgggctcctggaagaagccaaactaggccttgcccaaacacccgataacctacctcctatgtttgcggagttcagatggtcagatagtcagccgagattggctgctgggatagatctgtagcttcacggaaggcagcccaacgtatgttatctcttcaatcggtcgaaacgcaaaagcgattctgttgcagggagatacaggtgtacgaggtgactgtggctggtactgggaacgaacggtttcgcacaaactattttcatttcaccgccagggacgaattactaggattcatgtaagctgtagcaaactctctggtgtatttggtgtgtacccagggcttatactgtccgctgagcaacttgctttgacgggatttcgtcagatcgctaacaggtggataaagagccccagagttcggacagaacgagggatacggaatgattgacacatctgtatatggtacgatttaccgcgacacaaattcgagccggtctccccatatagttctcgtgctcagcagaaactcagtatgtttcccaagctgaaacgagcattgctgcaacagcatccgtttgaagcctcaggcagtaaagtctgcaatatagtatgggcagtagaagtgggcgtccagcgctggccagagtccagataccaagacaggcttcattcatttgcggaatctgcttgcaatgagagcagaagttgattgtgaacatgattagacagttgtggtcaggttagcatcgtgcccgcaccttatagatgtactgtacgtcgtacccacagcgacacattgcactgcagatttttggcacatttattccccagcgcgcgctgaaaatcatatgcaggatcattaagaatgcagagacttcaattatatgcaaactgagcagatccgttgagtggcataaatttgctatagatgaaatccctctaaaacgagttctgcgaggtgatgaacgggtgtacttggactctgattgagtaggcctgaagctgccctcttcctctcagatcgcgccatcatcgacacaaactcccat

SEQ ID NO: 5046 - DNA, 8160 bp, Emericella nidulans
cgttgcaacggaacagaacccgcaattccgggcttttcttgaggttgaaccgaggccgtgggctgttttcgcccataaagatggcttgttgggtcgtcgaaaatggactcatcgaaatgctcctctgtagctttggtgtctagttcaccaaattccccatcgtcatagtagagatcatcctcatccggaattgtttgtaatggaatatttgagaggttcttggaatctcgcaggaaggtcttggaagagtctgtagaattatcgaccgccacagatgcatctggtgaaagaggccctgtagaatcagggttggattcttcctgcttgggggcggcaggctgattaccttcaatagttgatgtgttcggctggacagggctagcgacgactggggacaaattaggggcgagccacgacttattcaatatattgcccgggcccgaaaagttcttaaattcgtcaccttcatcggcatccacattgactccaggaatctcttcctccaggccatcaatgtcatcgaacatgtcattatcataatcatcctcaaggtcactatattcaccattcaggcgcgcttcggctttgcgcgcggcttccttttctttatgcttctcctctaaaagtttctcctgtgttgaggagccgacgccattcatgtcgaaactgaaccgggaagcgttgcttttgaaatgttttggcagcccagagggctgctgcgggagttccatctcaaaggtatcagagtctcctacacttttcgttgtgtcaccacccgccaacttcgcttcatgactcgattctagctgcccctcggaaggcggtagttcctctggtggtttctcgctatccgtgatagaagagggcaatttccttgcgaacaccggtaacgtatgcgggtcgtgatctcggttcgaggaatctgttagtagggatgattgcagataggctttgttttcaacctggagaacccttttgtcatcctcaaagtgctctctgaatactggtgaatgatcactgtgcctcttcaactgctccggtagaggtgaataggggctcctctcgtcagcagtatgttcaggctgagccgggggagatgcacccggttgaccagcttgttctggtcgatggccaggagcagcagataattgtcgtcgagggcgcggcgcactaaagtcatggacgattttccctcgtatgcgcgggtcataatcatctggaattggaatgatggttctggagcctctattcacctcgtctgcacgcaatcccacgacctggtgcgagcgtcgtttggccaaaagtgacagcggattcagtagttgaagcatagttttacctgaccctttctgcggaacaggttccactggctgcgcatcccgatcattttgccggcgactagtaggcccctcaaaccgatattctttctgcgatgccgagtgcttatctcctggggacacgtccggggaagttcgaaagcggcgatgaccggttggtgccatggcgggcttggtcgaacttgaccgcttcgactggccgtctacggccgtgggagtcaaacgagctttttcagaggccggtaagggtgaactaggcttagattcgttctcgtgggtccggtctgatgttgcagggtgtagcgatggttgtgaatgattagtctgagcagtcagaaatggctctgtattgcgctcttccgggctcgatcgcggtcgtgtatggttgtctgagaaagatggcgcaactgcaagcgtgccacttgaggttgaaggcgccggggcatcgacagtgggaccagggaccgttgaagttcctccatcagatttcgaaaggtattcgtttggtgctccttctgcggtgaacttctcgtcaaaagtcgcagtcaaagaagtcgaatcaggaatcagcggtagcagggggggtgctttcggggtgggctgtgaggtgggaggaacaggcgaggcattcgacgatcggcggcgccagtacgagagcatggcgaactgcgcttcggggttttcgctggctcgcagcagtctccgtctgatttgattcgctcaggactcagctggtgcagtttccattttgctatatgctcgtgttcagtctgctcgaagatctgcggagaatttaatcaagaatacgtgcgtggggcacaatgccaatgcagccagtcgaaaccacgcgccgtatcgacggtgactaaaataggaaccaactaggttatatctgaaattctataacaaaggacgtgaccttctcacaatataagaatgttttaaggagaaaagcaagttatgataactaagcaataatgccgaaaatgccaaattctaagcggatgctctgaggcaccaggaatctaggggaccctctattaaggagtaattcttaatgacagctgaaaacggctaacgctatttcaatcccacgatgacacctcgaccgctttaagcttcttaatattgtggcatgcaaaaagaagtgtgttgtgagcaattggaattaaatttggagtagtttcctttctcatgttatacgtaggctgtcctggtggacttaagagcgtgggaataaatattgagcttcagcaaggccgtcgtcgaatccctcaggaagtagttaagaagttcagtaggcggaccgtcattacttgtgtgaactataatgtacagaattcagttattgctattttacagtattccaggccgaaccgtcaatgcataatgcttccaaccaatacacgctaagggaactccgaaacacccatacagtgttgtcaacaggacgtaaaataaaacgaaaaggaatgtgactaaacaatgctctgcctccagcggtcaatgacggctctctgcccaggatcaatcggctgccgcattgtggcttggcgtaggttcggtggcgttgcgtaacttagatttccgttgcccaggattgcgtccgtgtagaatgtattagggtgaaccatcggatggtcatggggaccggtcaaacttggtgcctgatactgtgaaaaacctcctggagtcattggtggcccattactgactggtaattgctgcatggacatccgatgatcgagagagcgctgctgaatggcgccatgaggaccaggggcttcctgcatcagggactgttgacgggcagtggatgggcgcggcgcatggagaatatctgccatactccttctgtaacgaggaattttgagacctgaatttcgcttctcagcagcttctttcttaagacgagctcgtctctgtgctagggtttcatcttcctgggacggttcatccttagtatccttgttttcttcttccttcagatgatcgaactctgctaaaatctcagtcgtaaaatccgtatcggccttggatatattacgctcatggccctttagccgtctagcacgttgaccaagggtttccccttcatctccactgtcatcagcatgatccggagtgagcgcggcgggattcccttgcgagtacatagtcataggacgttggtcaataggcggaggtagtggctcgccccgtaatcgcgcgcgccgcctactaagcggctcgctctcttccatctccctcttctccatgagacccaggggccgtacctcgtcagtagcttgcgctttttcggggaaaagcatgccaagaggaacgtcttcatcatcatcttcaacgttaggatgagcatcaggaggttcccaagcgagggcaacaggcttctgccgccgatgttcgctctgtttagctgctaccgcctcaagctgaagaagagttgaatgcatgccaccagcattagctgccgttcggcgcctctgtttgaggtcatgctttctttgttccagttctgcaagtaacgtagctggcggcccggtataatggaactcttcatcgtcggtaccctcgctgccttcttcgctgctctccgagttttcctccgaatcaccttcactatcagaactggactcactgtcacctacgcgtaaatgggctgtaccgagcgtttccgcggcagatacctccgtggtagggtgtaagctgtgcgtcgcgaaagaactggaccggagctcctgtaccgagggttgatgtcccaggttaagggcgctttttggtcgcagctttttccgttgcccagacatgtcttttgagagcttcccatgtttcgagctgctatacacctctggacccactggaccggcgaatggatggtctgtaaaagcagtgacaggggctgtagtggaggcatcaagtatactgtccagcgtcgcaactgctgaagtctgcgcgggatctaaatcaagcgatgcgctcggctgttcgaagaagacactggcacgaaggtgaggcggtaattctgatggcggtctcgtccgtctccgatcttcgctggtggtttggttctgatccgccagccagggcgcggatttccttttgtcaggcgagaccgcatccaggagctgcgtgcggcgcttttctcgctgcgcttggtcaggtcgctgggaaagcttcggcggcagattgatcgtcataggaacaggggcaggatagtacaccatattctcgccctcctgcggctgtttgtatggctggggtcggctggcgagtggaggcctcgtcaacgacacccgtcgtgcaggatccagccccttatccatcggaacgtaatggacaccgtcaaagtcattgaacaggactctagcctgctggtatgtgtcaccggatgcagccgacgacggtcgctccatctcgaccgctctcatctctgaattgtatgggtcgtgtgcgtactggttgaaatcgacggtggacaaaggaacggcgtcgggaagcggaggaaggtaagcatgagcgagaggtagagtcgctgtagtctcgggatattcttctagcgcaggttgttctgagacttgagccaggcgagtccccgactgaatagagtcgcgatgagagattgcgtcctgaggaacatagttagaagcagtggccgagcccgcgcttgaccgtcttttttccatcttgcgaatctcgctcccaatatctgcggagctcaaacttaagcgttcagcagcattttccagcctttcaacattatgaacgtaggctccttgcaaggattgaagcccaggggtcggatgattgagaggaacagagcgttcggtggttggtgtttgtagagtctccgcgtggtgatcggtcgggggtagactactgcgactattggagtccggccccgttggacttgggtgatcggctactacctcgtagtcgtcttcctctaccatgtcgtaactggtcgttgtcagcgatcgaaccaaggagcctaggctccgaaaaccgttgttttggtccgtttctgcacgttgcagatgtttcccagccccgatatggtccgcatccaaagggagttgctcaaacggagcatggggctgcggcgacggtcccctagagtcgtcagaatccgatggcaactcatgctcgccctgcgcgacagcgttgtacgccatctttgaacgatgttgggcacacagatgcacaagcaatggccattcaaaacggttctgatttgttgtcgtgtgaccgcggtcctgacggtctaagcaaagtaatccctaaatgacgatggccaaagctcgctaggctcacagataaggcgcccaacggtcaacggaagttcaagggatcataagggattatgcaaagtgagggatgagaaaagggttgaatgattttgcgaaacgaaagacgaagaaataaaaaaaaggaatggacgcccggatgaagcgagataaaacgtctacaataaaaggtcctttattattatcaatattgctctaaaggataatgacggccctcgaagaaaaagtccagaaacctggaagaggagtcgacccgtggaccatggacgaccgttgccggtcagatctggccaaagttccagagtcctgactcttgcgggaagcaacgactgctaattttggataccactgaggggcaaaacaagcccaataccggaatgggcgccgaatgcatcctggtgttgtgtcttgcttccctctgattgatcactgatacggtttactactcaggagcggcccaggaaggactcgagaaatgcattcggtctgcactgattactactatttcgtacactgcattaattcgtggtgaacctgacaatggcatccagcgacccctcgagtggagaatgggatacgtttgggtctgagatccacgcccaaatgttccagacacgaacgtgcgacgatcatattcaggagccttgaccgtgcgagaccaactgccgaggtgatgtttctttcttagagagcaagagcgtactaccactggcgtcaaattcggaacgaatctggtgagctcggttaaatctttgattcggtgcggaatccagtcgacagtgaagactccgccggaaacagtcgacgtcatagtatttgtactcctcaaaacgaccgttgtggaccggatcgcctccagacgttcaggcaccgagacagacgacttccgatcgagtttccacagtcggaaatacaatcatattaccgcagtcggtagtcgggcgatgatcccgcggtcgacccgacttgttttcagctgaatcctcgcatcgagaggccagattatcctgctccgtatcatgagataccgctctgtacctacctgcggttaggatcctcgttgatgccagattatgaagagtgtcctcttatgggtagcacggcataaataggacactgaataaacgctagtgccgttactcagtcatctaacgtgcatcttccgcactgatcctagcttttgtctcggttcccaccgacacatatttgactaagcggcttcatgtctctcgccgtgattcctaaggctgaattgtgatgaacgacattggcagaaggtgcagtcggaacctagtagaatgaatctgtaatcaatagaaccgtaccatatccagggttcagtcccatgcgccgtgcacccacgttttgctcagttgacagtacatttgtcttctgaactgtacttggtatgcgggacgggaacatgcttacagtaacgacagccctttccttcccaggccagagagccaaaggtgacaggccgggagtctgacagtcacaaataccgcttagatggcttttgatgcaagtgtccgcaagttgccggtttagacgttcgtattgaattgggcggatattgttcgcgttcacaggtctcctagccagcagaaccagttcttcgttgatacccccttttatagttgctgtatatgcaagaaaaagtacttatctcatttctatggttatgtcaacctggaaatatgactgttaaagactaatctggtagtcatgacgcctttttgacttagcggtacattttcccaatagtttattgtcaagcacttcagtttggtaatatgctccatattctttgaatgcgagataagcatgcaatatgattggtgggtgcttgccgattaaagccacgtgataccgcgtagcgtgacgcgatctctggttgcttccctgcgacatggtcaatctcgaaattgaattgcacctattgacatgctaacagaccaacatgtcttattatgacatcgattcaattctaacagatgctcaggtatggctgagcctctatcatctcttaagttttcaataatgaaggctgaacctcgctttttcacagaaattgccatgcacatttgaactggatgtccccgggcttggcattctagaaggcaatccaggggagagtgtgagtttttcctcttgggtgggaaggaacattcacgactgatgcaaatgagcagataaaagcgggatcccggattgatctcccactatggctgggcgaaatgctttctatcgggtaattgctcctcacacctcagctagtgacttgacttgtcgcgacttgcatgtctgattttcaggaagagcacgactagggacgtctcgactagttactcttgatataccgtctgcgctctcggagcgcgtgatgaatgcgttaaaggcggaccctcggactgtcgacctgcgctcgctagcgccgaaaaattatcggctgagtgaaagagtcctggagctttttaagagcaaggggtggtcgataatatagcaacgtggagcca

SEQ ID NO: 5047 - DNA, 6786 bp, Emericella nidulans
atccgcaaaaacacccatcagctcgcggaactcgtcttcgtatagctcctttccggagaaccgagcacgctcgtataaggccagaaactccaatcctatctctggcgggtgtaggattgagagcgaaattaggtggttgatgtagctgcgcagggacattgtgccggggcgccggaggatagcgacgatgcgagtgtctggaatgcgggtcgcttcgtcaccttcacctgtttgagtctgatattgaggatggactgtgaagactggatcgggaggcgcaagggaaacggctttcgcttcgatgagatggggcagttcgcggatgacggtgcggtagcataggcttggttcaggcgtctgcgcgtccccgtctgacgttccctgatccggtgcagacgccgataacgatgactccggcgctgaccatcctggatgttcgatgactccccacggcgggttcgaggggtcgacatcgtagtcgaatcccctaagtaaaccttctttttcctcgttgtcaccagcaccggggtccgcaaaagcttgtccgttcccatccacatctcttggcccatttgcaccgctaccccgacctagattccttggtcttgcccccctagcaataagtgcgctcctccctaacccctcaacaacaagccggcgcacacttttgcttacatcttccttctcaactggtatccaggctttagggattcctcccaatacgctacgattcgtgtagatgcgcgtcgcgtagatcagaaccgcaagcaagaatgtcacgacgtacccgcctgttatgatgaagatattggtgaggcggtgcgtcacgtagcattgataaatcgcatcagcgggtgtcaggaggatcagacacaaaaggattatagaaaggagggtgaagacagtgtaatttaaaaggcgtgtgatggtggtgccgttgcgaatgcgagtcgctagatttgagtttgggagtgcagttggtcgtgatggcagcatttcagttgtttaggttccttacatctcatctgggactgagaagggtgagtttcattgtgcatgtaatgtcagtccgtttatgtgacgcttcttgcgtcgtggacctggttaaggatgacagagatgcggacggcttgtttgccgaggtggctaccacgtgacttatagtttattgcatcggagtataaaataatgataatctctagaaataaaatatctaccgtctataacctaacacagtgtaatggaaacgcactaatcctcaatagcctgctcgtccattgctgtaggttcatagtgctcccccctagcacgacggataacccgctcaataccatcaagacccatcttaagcacctccattttcgggccgtaacttaagcggacaaagtgatggcaaggactgtcgaacaggtcacgtcttttcgccgggttcaagtcgaagaagatccccggcacgacaatgaccttctcgctaagaagagcgttgaagaagttcagaccgtcagatatgttggcttctttgggaagcggcgggtcaagcgaggtcagatcgagccatatgtagaaggttgcttgcgggacgtcttggatgcggaagccgatctcgcgaagacgcttgaggacgaaatcgcgtttctcgcggaagtggggtttgcaaggccttcatttcctgatgtacgagggagggctcgaggcatggggatggcggcttcttggaaggggacgttggcgccaccgtcgaggtaagagcctgcggagccgagggcgtcgatgaattccttgggcccgacaacccaggcgatacgcagcccggtaggcggaaacgttttgtgagaccgtcgataaggagaacgtctatcttcgtcagtatttctcagaaactgtcaaacggggccatcataccgtctttgttcacgtcaacgacattcgcggcaccgctgatggtcgtcccgtcacagtcggtcgtgtagttgtaaccgccatagaactcgtcaagaatgagagtagcgcggtctcgacagatgtcctgaatgtgggccaactcgtcaccggagataaagtgcccagtagggttccgcgggttagaagtcaggatgaccgacgttccacgagctatttcctccgcgatcttatcaggatggatgtggtagtgatcttcctgggcgagcggcatcgggatgggagcaatgttcttgaacagactcaacatttccgagtacgcagagtagtcgggaatggggaaagagaggtatgagttgcccagaatggccgcaattcggatcaaacccgcacgtccaccggggacaatgcacacattttcccaggtatattggctctccttgccttggcggtagtgttcattgtacaagcgggctacagcggcacgaagaggcttgataccagccgttgggccgtattctcgagcggcagaggtgatgggaatagtttcaggacgggggaagctgccttcaatctcgtcgtcagcttcaggagcaccctggccgagattggcccagcccgaagggtcttctaagaagccgtgttcagaggcacgttcggtacaccagacgacaccggtagaggcacgggatgcgtccaggcccgcatggggacggtgaccttcgtgggcggttcgaaattgacgatgggtttcagactggagttctgacgatgggtgttagtctggaaaaagaatagaatagacattctggaatattatccggaaaagcaaagaagccaagacacgcaccgttgtttgatagctccttgcccaccgagaagcgtcggttggaggggcgcaggatgctcacgcggcgtccggagaaggacatgatggtatgaaatacagaactcagaaaggtgagctgaaattgtctaaagagatgcgaggtgtgcaataataagtgagaaagaacttggagaagagaaagtggatattcagagaagcgacagcttttatagacgaacagcaagcaccttagtgaagaaccgagtcagggacaaggacagctcagggcatcaggtctattcaattctagtcgcgcatcgaccgcattgcccagtagtttttcccgttgggcgtccagctggagcagaaaatgcctcattgcgaccatctcctgagagactcctgagtcctgaccacgtcgttgtgctatctaagccttcccagatcgtagcaagaaccttgtcaggatccttccgatcggctgggcccgtccgactcggagagtatccgagactgccaggaatggatgcgaggtcttgtctggagttcagctttacagacattatacagtctctcaagtctctctttgcgccaaaacataacataatactgggtatttttagaaagccacgtttttgcttcttcaagctgaggccagcgccgaatcagagacggcgctggcctcctgaaaagtataaatcaaattttctctccaccgcctgtccgcctcaattgcaacgtcacggacctatacggagcaaatcatctgcagtatctgaagtatctgactttctttttcattatcttagctgaacctcttcaaatgcaataagcaagtctaatccgttgtcaaatcaacaaaagtcaccgcagtttcagcccgccgacaacaagaagatccagccctaacaatgcgagaacactatacatcgcctcatctgggaaatctgcgggaaaacgtgcagcgttatacatacatcatgcaatcatagtccgtggacttgggaatgcggcagaccgccaaacacgaataaatgggaattagatgaaacaagatgaaacaaacatcatcataggcatgaatcccttggaaggaaatggtcaaacatcgaaaccaaaaatccatcaaatgttcgtaaaaatggatatgacttcagacctccaattatagttctcttccgaacgctgtgagagttgaaggcgcagcttcggacagattctccagccaatccagttgggagtaatgagcgagcgaaatgcaaagtaggaggtaacgaaggccgtgtctcttccaccgtttcggcccattgaaacaatttcggaagagcaatctcagcggaagctgagaagctgagataggaggggattagagatgggtgcaaacggcgtcgtctagttctcgatcggttggcagaaaagttggatctcgccgacttgacctcgtgcaagctcctcacgatgctgttctttccattccacgaaggcgagttgaacggcctcgtcgctgtcgattgtcacaaagtcgccgtcctcgtcttggtaacgtaaacggaccgtcttgctgccaattgagcggttggtgaatctggcgagtttggcgtcaacccggtcggtaagcgtacggaatccgatattgctggaaataaccagtgttacatagttctcgtcaaagttgactttggccttcaattgggtcggcatgaacggctcctcctcgggttcgtggcttaatggagaagttggctgatctgaaagaggcgcggccgctcgcccgtcggagtactgaggctcatggaaggcgtgagaagtattcgttcgaatgggaagagattgattagtcggggagttattctggctccgattgacgggcgccttcatgttggccatatgagcaggaataggtggaacgggcacattgtcaactgtttgcattgtgtgaacacccatgtaccgacgcgattcaggattgtgatggtgaatgtccgggctgctcgcggacgcatcctctgggacgcgctgttcgatgattggttactacctgacattggaggcagggacgggcgttgagcactgcgcccattcggtggtgcgccattaaaataacccgagttagaaccgtccctagatgtggcgcgagagagggcaggggctgtgtatgggttattgtcgtcgccccatggggtgacgggggttacctggcgattgtaagggtatccaccgattgtgagctcgacctggcggactcggtaggagagaagtaagagttgccatttctctctcctggcgacatacttccaccagggaactgtgtgtgtactgacaaagtcgagtcaggcattgctgggtaacggggtcggctagtggaaagtggaggaccagagctaccacttccacctgtcgcagatcgggttcggagacttgtactcgaagcattgcgactcataggaaattcggagaagaaagctgcttctttcgtggactgctcttcaacatcatattcttgctggtaagggtttgggatgttgctcaaagatttcatgtaggtaaattcggaatcggatgtgccggtattgcgagcactgcgttgctccgcttgtatctcccgttgtgtattgatgtccttgtaccatttccgcattgtatcttcattctgatagcggataataaagttatccaccacaccagggtcccctttccagaagatctgaatgcgataagagcctagcaaatccttgttaccatgaggtggttcgcactgctaatgaacttcggcttacctggtttttgaagccagacgatatcggtgacgttcgccatgtagatgcggcctttcagcacgagccggggcttgcccttgctggtattcggcttatctttactaccgccgaccaatcttgatttctgcttgttagggtttatgtccttgcagcaaagcaggattcgttcaaagagatagatgtggtactgtaatcgcggacatattaacaagctgtcatcgcaagtcggactgtggagtgtaacatttgctcacctatctttctgaatctttattgttgtcgatcttgattaccgtcaacgtgccaaatcatagcagttcaccgaatgtctcaatcttcagggctttccagtcatcaacacgttcgtccagttcaacgaatgcagcggcaagttgctccttgtcaatggcgtcgttggcggcatctaggacggactggatagagtcgatggcgcgcgaaatgtcggcttgaaggtctgggtcctcgatctgcttacgcagttcctggtaacggataatcagtatcgaatcaaattcaagtagctactcagagatactaacagatagcatcagaggatacttggtcaagcgctggaatggcttcacgaagaaaccattgagtgttgcaggttgcgcgaccatctgttggagatcgggggagcgcggcgcagcctgaattttgtcccattccttctgacaggtcttatcacagcgcatctggtttgcgataaatggctcgtactggcggaaagcttcttcgtgttggatgaacaattcaccccaattttgctgttcttctggtcgcgcatagtgttgttcgagtctgatgagaaaccgctgggagaaatcaagcaggttgttcaaattcaagaagatttgatgactggcatcaccggtgagagctccagtatcctccaactccttcttgagcgcttgcaagttctggagatggtgaacatagtcgcgctctgtttctagcaactccttcaagatgtgttcccgcttggtgagcttccttcctgctgctggcgcggccatggcggtatcggacggtttcttcagctggccttgaatctctaggatgtccagaacccgatttaccatctttatgaccttggtgaatccgattgtgttctcgccgtacaagtctgttatgagaaagcattcttgctgaggaaacgccatttcttggatggcggcctggaggaatttaaaagtggcggcctttggacgcctggcctcgggaaccttcgaggtgtcgatttccaggggcgcgcctgga

SEQ ID NO: 5048 - DNA, 5108 bp, Emericella nidulans
gtttgaatggaggtatccgcccatcatctggacatgcgacggagatcgccataagatttcctccagcgaggatgggtcctgagtgcctgccatcgaagttgcggtttcagtcttctatgctgcgaatgaggagtcaaaataatacaatctctaatggaagacgtagttctgcagaagagaagctcggttcgataccttgctctccgcgactatgaggccctgtttgcacagtttgcatctccagtctgacgcaaataagtataatcaatcgaaagaaaataggttaggtaaaggttcaggcatcgcgcgattcttattctgcgagcttcataaagccttgggtactgattcaaggttatcataataatgcaaacaaacgccaattcccacgctgaatgttgaatccgacccatctatcgcgtctaaatatatccagttcacaactaatcgttcctagacaactgttgaagatcgttgccatgcattatatccgccaaatcccagaaaatattcatgttaatagtaataccagcgctgttttgcccgtacgcagcatcatttcgcgtgcgaaggcataaatatgccgcagacagtctgtagcttggtgagcatctcggcccattcaccgtcggcgctgctcagcatggttaccgcgcctccagcaccaattcgccacttttgaacgtcgtcattgtcgttagatgatgtgaatgccgtgcgtattaggacagaaaagcttcctcctcctccaaggtcgagaaatcccataacgccagagtaaatcccgcgcttccggccctcaattgaggaaaggtgcatacaggatcgttcctttggagctccagtcatggaccctggtggtagacatcgctgcaatgccgtgagtccatatcctgacatattcgacgactgcagtcgtggaaggctctttgcagcatatcccggtcgatgtgggtcaacatgacctttgacatgggttatcatttgatatactcgaccgtgatcctccactttgagaagtttctcaacatgaacgttgccagcaccgcagatgccatagagatcgtgccgtacgagatccgcaatcatgagattctcagccatttctttggttgatccaagaatctcccgtgccctttccattgtcatgctgtcggactttcgaacagttcctttcattggcttcatctccaatgtcgagtgtcggtcccagttgagaaagcactcagggctactactcacaatcttgctatttccaagtctcgcaaaggcactgaacgcagcaggattgtacatgcgcagtcgtttgtataatttccaagggaactcaatgcggccgatgggaacatcgggcgatggtaaagtgatggatgtctcgcaggtaaggcacagctcgtacgactcaccggccctcagttcgtccttgcaagcctcaacctgatttcggtaggcattctcgctgggaaactggatgactccccggcccaaaactgaatcaagaaactcgtcgtcggaggcagaattctttggttttggcagaatgtccatacaacagaaacgttccagtgtttttgaggcctggtctaaccagccagctggtagattgtctgcttctctagtcgattgtagaattactcgaccagtctcattgtcaacaacaacgctcctgtcagtccacagaaggctaacatctggtggatcatcagcactggcgctctcctgagagcaatggtcatctgcgatgcttccactttcgtgtttggggtgagcaaggcaagccagtccaagttcgtaggaaaaatagcctaggaaccctccccagaagggaagctcatagttccccgattcgacctttttcatatccatcaaataccttaggacgtcccaaaactgagaaacagacatggtagcctcaagtctcatgtccgaatctttcagtgcgttgcacccactggaggagacggattggcgttgcattgatagagagtgccgctgtgagtagtactcaagcctccagcttcccggacttggcacagaaataatgctgtatctgccattcgactgaaacaaaactgtcggaacgcccggatcgttgaataattcgcatagcccttcagcatccagctgacatgtatcaaacaatctcgaggcgcaattagcggaagaggacacactccaattcaccattgtgaaagcaacatttggcaagcgagtgtcttcacatgaagatcgaatcatatctatagatagactcccacagccatcacgatgacggcttttgttgtatttgatggccatgtcccaccacttgcggagcagttgactgcatgcttctcggtcagacttgcaggactcaggatgaaactgcacaccccagaaaggcttctcagtgtgtcgaacagccatcgggatctgcgtgacagaagaacaaagatcgtctgcttggatagagagccaggcaagtacgtcaagggccggagttggtgaggcagccccgtcgcatgaacccgactctgcttgaccatccaacattgcatatagcgagtgatacagagtgacttcgagattctgtagattctcaaagatatccctctcagctgttgtaattcggtgaacctgcccatgcagaggttccggtaatcgcccaataggggtgccgtaatgaagacataaactctggaaaccaaggcaaatacccaaaacaggcagcatatgcgagctgtcaatgttccagatatctgccataataccgacatcttcggggacattgggatctcctggtcctggtccaagaacgactgcatcgtagtgttgaagacattccagcatgttgccatcgggccattccgcatcaatcatcatcaccgtgactcgagccccaagaatctcttccaatcatagccgccacattgtaagagaaagaatcataagcatccacatacagtatacttttctgacgaacaccttggcccgcttccttgtcccggcgagctttcgatgctgcccaatcaccaaggagcggtgccatcacggatatcgccctgaagagtatgctgagttaatcagaccgagaagatgttaaacaagttaggagttaaaacgaggatagcgtatataatgatgatcgacgaagaggatcaggctcttctatatcagaaaacagcggatcgacaacactaaaagatgactggcaggtggcaccaccatccttatatctgatgtgagatgggcatgataaagactagtcttgaaataaatatgttttcgaaaactctcagaggctgacagagaattgatgtttgaaggtggcaatgcggcgaatcgaagatttccagatttccggggggaaaagacgaacgtagtggagccttcaatctactaccaggattgtcaccgtcgggtgatccacggttcgactacctcaatttgttaattctcataaaacaatatttgcaaagtcgcagaaaagtctatagtctaccctatctgccaatttgacaggacaaaacatggtcttctaactacaacgctgtcattgctcaggattaggcctcttggtagcagcatgggcgatcttggctgcaattctagtgaagtattgactcacaaagctctctctgcagcggaatgttagcgtctgggcaatcacagtcgttctgaaaggctgcaagggtctcaaacatacgtgtaatagctatgtgcagaactatggtccgcaacgaggttatgagcaagctcgtgtgaaagcgtgacccaccaatagaccatagcttcagcccggtctggagtcggtttctggagcaatgccttctcatgtagttgctggaaatagtggtaattgcagaatatactgccagaccggttgaacccgatggcttttgagccggggtcatagaatatgctcacggtgtcaggccgtagagcaaaaacatcggcacaatcaagcaatatagacccaaacaaattcagaccaacactgttcttggtgagaaacgcagacctttctacagatctggcaacaagaatattgaccccacacggaagtgtggcagcgaactccaggtcgtggcctggtttctcgtcgcaatacgacttcaattcattgattcgatcaacttgcggtctggagaacacacccgatgcgccatgagaacggctagattgtatggcggagtgcaagcttttttgtaattgaagcgcagagttaacagccaccggagcctcagggcgaggcggtttcacttgttcagtcggaagttgtggaggagaagctctaggaggatcaggtaacgaggcagtttcacctcggaaggggttccaagatgaccggttcccctcgctaaaatgcttcgtaaatgtagagaataggttacgcttctccttgggagactgtgtcggcgaatttggacgaacatcctttgacgacggagagtcgggaaagaccccgggcattgatgtcgcgtcctgagtttcggctatctgatctcgagcttcttcagccagagccagttccttctcccgtaaacggcgacgttcttcctccagctgttgctggcgtcgggtctccgcgatctgagcatcgtgtgccttttgctttagaatgcggtcgacattctacagttacatcgttagcataccgctagaaaccacgggaggtaatgcgtctttcatacgtagccacgccctctgagctccagcagatcagttttcaaaagcatttccagggtcagagccgaatggagctttggtcgtgcaagaatcaatgaggaaagcgcttgactgatttcgtagaaatcatacttctctgggcatatccgcatgatacactctcttgaaacttctgtaactattgcctttcgctcctgtgtgtaggatataccacgatttcgaagtgaccgtgtgagtgtgatggactggactacttgcacgttgaggttcttatcaagccatcggctgtcatgccggatactatgagcgggctgatcgtggagaaaaagccttgagcgctctttaatcaattctatcaattagagtgcaagacgttgatcagtagccggggccccccagtacgcgcgttcctgtggcggactcgtgacaacggcgggccg

SEQ ID NO: 5049 - DNA, 3358 bp, Emericella nidulans
tttggcgtctataacgacagggcatcttgcgggaacacgataccctccgatctctttggggaccgctgtacattcaggaagggagaatgctgcaaagtcgcaatcttattagagggctgcaagattatttgttggtaaaggggaaataaggaagaaactgaccgaaagccggcgacaagcgcatggcctccatcacggcgaagttcataagtgtatcctgtttcgagagatattttccggtctcggtattaatatcgatgtcactatcggtgtctggggtgtgagtgcgagtctggatatgcgtctcaatctccgctcgaagcttctgctggaaagctgtattgacagctagatgctcgaacagagtgccgaggactgcggacgtgacgtcgacgttggcgaagagaatttcatctaaagtgtgtaggaactggatgtatcaacgcgtcaaccgtatatcgaggatagggtatttcctttgggtgggccgtacgcacctcctcgagtttcagatcacccttttcaacaccatgatatatccgctcggcagggcatgccttcgaggccccccgagcagactgaattataccaagattgaattccatccatctagaccggaattcttccattcgtttggcggctgcacggtcaaaccaacagcctagccttgtcgccagacgtttgttggcgatcacgtcatgcaggatgacttcgtggaggacatttaggtccaataaggcagagaaaagctattgacggtcaggtcagctatcagcccatggcccataaaaacaaagatgatcttaaatcgaaggaggtaggatgtgtgagctaccttatcatcgaaaatctccccatacacaaactccgccgcaagccggagcggcaaaaaacgacagggcttcttgatctccagggcgaacccttttcccgttcctgttccttgcaatggcagatcatcaagccaccggtcgatgcttgcgctcagctctgggatcgcttgccgcgctgattgaaacgagaacgcggggtcgaagtagcgacggatcattgaccatctttctcctgctaatgcgccgaccgcatggccgaggaggctgcaggctgcgtcttagtgttcacagcaagctagttattgtagatgcggaagggaagggagcgatttacccgctaaagtaatttcccatattcagatacagtggcttaggatgatctgcaactcccgtatcagtaccccatccaacctcagggacctggctggggttcagggtgccagggaggcatacgcttagtatcacccttgtagaagtcataaatgtgctctggcttggtcaccaccagctctcttgctcgaccattgcggatgataaacggctcgtctccagcgagagccttgccctgatcggagagctgcttgctgatgaccatttcttagctagatcccgcccatgcgctgcgagatatcgaccgcgatatacaacagattcttacctgaaagcgaacttcgccacgcgggcgtctccatgaagctcgcagatttgcctgccgtattggttggtgattctgttcgctcggtgcctgcggattttgagtacaagcaggacaaatagtattaggacaaacaacttgaagacctgaggactggccctcagcctctggttctcctgatcggatgcctgcgttagagtattaacgaaacccatttttggagaagaaggcgtccagataggtacgtgtctaggatggaaaacttcacgcgggaatgcttataacgaaggtgctcagccaggaggctttgatcttcaaccccacgacgcacagaagatgatggactggattcagtcgcgggaatggggtcttatgattttcgccgaggaccgcgacatgccctcgatcatgtttcgaaaggttacctctgccattgcgacgcagagcaagcttgggttgactgccacactcctacgtgaagatgacaagatcaaagatttgaacttcctcattggtcccaaactatatgaggcaaattggatggaacttgcagagcaaggacatattgccaaagtacaatgcgccgaggtatggtgcccaatgactacagaattttataccgagtatatgcgggagaaatcaagaaaggctgccctattatataccatgaaccctcgcaagttccaggcgtgccaatttctcattgactaccatgaaaaaagaggcgataaggtcatcgttttctcagacaacgtgtacgcccttgagaagtacgcgctcaagctgaagaaagcctacatttacggagggacgcctcagaacgagcgtatgcgtatcctcgagaacttccaacacaatgaacaagttaacacaatctttctctccaaaattggcgatacatccctcgacttacctgaggcaacctgcctcattcaaatctcttcacattacggttctcgccgccaggaagcacaacgtctaggacgaatcctccgagccaagcgccgcaacgatgaaggctttaaggcgtttttctattctctagtctcgaaagacacggatgagatgttctactcctcaaaacggcaagcgttcttggtcgaccaaggctatgccttcaaggtcattacccacctgcagggtattgaaaatctagaggggctagcatatgccacaccggcagagcgccgcgagctattgcaagaagttatgcttcaaaatgaaagttctgcggacgtcgagaatgtcacagacgacctcttctctgaacggtctagtggtaacagggcccggcaaagcctggcgtcaagcggagctgtctacgcttagtgggctggctggtggtgaggacatggcgtatatcgagtacaacaagagcagaaataagcaactcaaggagaaacagcatcaccctctgttcagaaagctggagcgcgagcgccagaggagaaagaaagagatggagaatttcaatcgataggctgctgtttacatattgtgtacatgtggcagaatgcattaagcaacttaaatgcaaaacatcgcttaaagctgatgatactggtagtttaccgctatccgtaagaaagctcctgtttactcgtttcaatgattgcagttaaatgaacgctaaacagtgcttgttacctgataatgtaaagcccagttgccacatacgtcacgtggtgatagagcgagtggggcgatccccaacagcttcaaagatcggcttcaagaacattcgaagctcatccacccaaaacactttctgcttgatacatcctgcaaactatcaaacaaggctcacactatacaccttcgatctgccaatctatctctggatattagtttcagtatggcagcgaggaag

SEQ ID NO: 5050 - DNA, 3453 bp, Emericella nidulans
ccgtatgcgccgtccgcttcaccgccagacgtaccagcaacaatggtaaggcactctccgcaacacttcctcagcgcgttgaaacggcggcctccgcctcgcatgtactccgtcgatcgtgtgattagcacaacaaggtcaccacctgtctcacaggcacacgtggatccccggggcccaaccccgccaaataggctagacgatcccctgacgatgagcggcggccggcatccaaccacgaatgggacgaacggcagctctggcgccacgccagtccgtcgctgaagaacctcctgtcctaaactgaggccgcggcgcatatacttggtcgtagagagatcaagggacgtgtatgatatttctttcgcatttgtgtattctgttctttcttctgtcctcttcctctggtttctttttctggcatgggaaaaagcgggacttgggttattgtttagcatgatcacactagaatttttgttttaccatcggggcatgaaaagagttggggttctgatgagatctatatctttttcgcacttttttttcgcacttttttccttctcaccttttttaccctttttaccatttctttttctttccttttgaccctttcctctcgcttttgtttcaagtgaatctgccgctttggtctcgactgggatgtgcatatgatattggagttcacgagcttattggtgctagctcgtctgctgaggcttacaatcgatcaaatatgaaacaccggtctacgtctgtcttccgtattacccttgaaacagcgaccaacgccgtccagcggccgatcgtggatggatcgcgctggaggattgccaagacggtcctgggctaaatcctaaatgtttaaagctgcggcagccttagcgcttcatttcataatcctctcagaccgaggtcagtgctcatgtcccgtcccgtgttgtgttgcgagtagcctagtcggtagcctagactgcctagtcccagtaacgatcccgataattgtgcgtgtatagatgtctggcgacgaatcaggcaaaagtggcgagatcgtcaggcgttgccacctgcagcgccgcgggtgcgaagtccactgtctgttctcagttctccctagggcactctaggggacggagccctccgtatttcgtgtccgcgatctgggcgacctggggagaattcataattcagtcttttatcaccatcacatcatctggatcgccactacactgatgcacaaaattaactggatcaattgacaaactgatcaaactgaccaaattgatcaaattgatcaaatttgattaaaactttgagccaaatttgttaattttccaaaattcacgttctcggctcggcctgtaatgttcgaatctgtaatctaatgactgtgacgcagttgtcctcgataaacacctaaagtaatttctttggtgactgatcagcgaccgcgtccactatgccaatgttacatcatcgcggctgggggcttagacctgcttccagaatccagctagaagaagtaatttcagagctaattaccccggcaggcatagattacgccgtgctccgtgtgccgtcggtaatttaccgtcacggaagacgggcgacgttctggaaggctggaagaagctgaagaagcacagcagaagaagccgtctggaaagctgaaagacgcctatctcgactcaaggtctctgctggccttgctcgacgtttgttggactgttggactctgttggacgtcgtcttggacggtgttcgtcactctccgtctctgcgtagttgactcgctcaaacctctacaatcctggtaccgttcctttggtcttatcccaaacccatcctaaccctcctaaccttcgtacccttcctacacccatccttactggccccttcgctcttcttcccgttctcttcgctctcgtcgcgctctgggactctgaccctctagattctctcctcccttctttcttcttctcctcatccctttattcgaccgtctgctcgccgccctgctctgcttctattttcgtcccgggcctgacggtgctcttaatcattctgcgcccgtccagtgttactgactgactctacatctccacactcatcgtacaacttcgtcgacttttctcccgatcgatcttccctctccacccttaccctctgctgctttctggcgttcagtctcgtggcttttttttttctccgtctggccctatcgctggcccaccatgacgccctaggatccctctttctgtcttttgacatcgtcctctccctcaccagtctagtctgacggtaccactctggaccattctgtattatctgtacctctgtcccctctgtactctttgtacccatcggcattaatctgcttcgctacctacccaccccttttgcgtatcggttgttggtggtctatctatcatccgtgactcgaggttccctgggtggcagattgatcgggcgcatttcgccccgtgggagactctcacagtcctcagcagtcacgcccgcaattgttcttttcttctcactcctggctttttttgccgattcttttctggctcgtcatctgggacgaccgtcaatgtgagttcacactgtaccctgtttcgtcattcgagcctcgcgcccccgtccagtctggtctcgcctggtcgacgggccgtacaaagaactgcagctgcctcagataggcacttttgtgtatggagtgcgcctgcgtttccccccccttgggtcgtaatcttggtggacgaccgcaccaacaattccattgtccgcccttgcgcttttttccacgccggttcgacgccagttcgtcgccaatggtccctcgcctgcacctcattcgttgcccctaccctactctaccctactctaccctgcctcctgcttgcgccgcctgcgtacacttcttggaccacgaccctagactggaacagactctgacgcaatgcaagaccctgaatacagccctaaaaatcgtcgcttcactcaaaaaaactgtcactcctttgaccgatctcgcctggtttccttcgcctctaccatcttgaccgtcttcccgcatcatcattacgcaccattcctcgcacgccgttcgtttctgtgccgcttcttcatcagagcctgcgctgcctgggactctcgagctatgagggccgtctagactgggaagagtgttgtcctcctgctccttcgtatagataccgctgtcgagtgattcagctggctataggcgccccgagccatgagcgccccggatctggttgacacgatggatcacatcgactgcgctgcaatctatatcgattctcgtatccagtcagagcgatgggtgtatccaggctctccgcgcgaatccctgatattccccgacgaacccgagtcactccggtcggatgtcgaagtcctattgggcgtcgctcggcgaagtatgtctttctg

SEQ ID NO: 5051 - DNA, 5494 bp, Emericella nidulans
gtaggtaacgccgtccagggtggagaggttatccaggtcgagcagctggacgaacttgcggacgtactcgccgcccatggaggtgatggagagctcccatttgccgctcgtggagttgtaggtggaagtcgcgtcagacaattccgaggcgatctgccatgagagataggcgcgttcaccctgcgtggtatgcaggccgtcgtagatggcttgggcaacagcgacgcccttagccgagacggtaccgttctgcgccggctggtaagaggttgagctgtggtcgtcgcgcttccggttcctgccgtggtggccgcgcttgctgaagccgaaaccgagcgaggtagacgtctgcgcggcgcagtagtagggggtgccgatgatggaggtcaggttgaagttgagcatgcaaaggtcggtacgcgcgacgacgccatcagtgcggccgtcaagcgggtcgcaggcggcgatagtcgcattgacgatcttggccagctcgcaggggggcggggcatagtccagggtgtgctcgacgacagaggagaagatatggtggacctgttgctgggcgtagcggaaggccggggcgccggtgataacgccgtcatactcctcgccccagcgctggacctgggacataccctcgcggccaccgtccgagcagccctcgtagtaggtgtagaccttctcgtccgagccgataccgtagaaaccgcgcgtgagttccttaccaagcagggtcatctcgccgagcgcctggtagccgaacatatgggtggcatcccagtcgacgctgccattgcccttgaggacgatcgagtcgtagtcgttgttgaaggcgtcgtacccggcgtcggtggcgccagagacggcgccatactcaagaccaccggtggcatccgagttgagggtgtagccaccgccgccggcaacgtagaagcggttcttgaactctgtcggactagggaaagcgtactttacgatgacggtgtcgtccttgccggggtgagtatagctgactgtgatattgcagtagctgtacgaggtcgaaccgccgccgcccattcccatggcaccgcccatggcgccggacggggacgagctggagctggagctagcattgtaaacgcttgcggtgacagccgacgggatcagattgatgcccaggagggtgccgtcactgggcaggatgttcttaacgtgcgagacagtgcagacatctgagagagaggcggccgaggctgtcgaggccagggccaaaagagcgttgctctgttggcgcatggtaatgactggactgttaaagtaacgagtgacaaggtgagtgctgcagtacagattgccatgatctgcagcagtctatataaactaccagccatggtgggagggcaggaacaatagcatgctgcctaggtggatacggctccggctcctaatacagtccagtttagggccggctccggaactcgtcacgcaattgcgtggcctctgggactggggagccttgtggctgagcttgtaacggtagctggaaggccaaaacagggctgcttgagcagtcgaaaatttgtcgtcagagctggcgcgaaagggagggtgggtacgcggatcattgactaccgtagtagcccagcccgaatttcgaaggcccgaagtttctccagccggatctgccaaattttatcttttttactgggattttcttcggagattgaaaattgataacggccgtggtgggttaacgccgtcactgaagaactgatgtgacctagggactgcggtctctcagccctagaccctatccaggtctaccaagtagacatagaaacgcagccagcacagtctccgccgccacgaagatcgttacgccgtccgtttgacaagcttagagtaagcttagatgcaatatatgtcgatcagcatacgcttttcccgtatagagaatgtggttgtgggtggctgtgggaaatttgtgggaattgtgggaactgtgggaaggccaccaagcaacatcggacgagttaattcattctccttgccaaggatctagagtatcatatcattctcattagattagattagattagaggggtagacaaggtacggtctgttgaagcatgtttgggttcttagcaaactgacgtgtttggcccgctggtgtatgaggtagaacagcagatgtctccttgagtgtcccaattgggccctctggttgtttctctccaaaccaagcacggccagaatacgagaagactgtcagagattgcttgacggctggtcctgtgcatgtcttctgagcaatcacccgaggttgtcgaagagaatcccagtcattgcacaactgctacccagtccaaagagaagggaaaagaaaaagagagagagaacacttgggagaagaaaagaaagatacgtcagtaaaaaaaaaagactcaattaaccatccagagcctgcacgactctggcccactccccgaatccataaggccccggcacagtctccccgtcaaacagactcgccagcaccacgcggtccccctgctcgccctcccaaggctctctgccatgctgcgcaatgacattatcaaagaccagcacgtccccgtcctgccaccgatgcaggacgcggatctcatccgtgatccgcgccaacgtcgccaggtactcctccgggatcggagtcccgtcgccgaatgtctgaacggcgacgttcttccgaccagcgccgcttccctttttcgcctcaaggctattcttgtagtacgctgctagcccagtgaagagcgtggggaggttggtgccaggctgtgtgcggatcacagggaggtggtgagttagggttagcacttgcctttggccgtctgcaccgtcgctccattcaaacgtcgtatacttcccgcgtccataccgagcaatctgcgcctcgaccttccttctttttgcctgttcgtcgtcttcatcgacgaactccttcccgaacgcctgtctcagcgtcgacccgcccacgtactgcctctcaaccgtgtacgtaaccgaactcttgacccccttctccacgagcaggtcaataaactcgggtatctcagcgcgcgctcgatggaacagctctagactcgatgagatcggcgtctcccctcccttcttgggcgctcgattcgcgtagaagaagacatactctggtgcgtgcgggacctgcggcgattcgttgtggttatagatgcgcacctccttgggcgcttcgttcgcgggcgctacattaggggctagaagtggtcggtcaacgacgatgccgattatctcgtgagggctataaccgaaggcatgggcgaaggcgctgaagtcggaagcagagtggatggggaggccgcggaagaggagggttccgtgctgtgcgagaagggacgtaaggatttttgtgcgctgaagggacttgaccgtcgcaattgccaaattcagagtcggtttaatagatcccgatggctggagggcgagaggaatcggcgtgtttgggggatgaggagggccgaggatgcgctggttcgtggaggggaggctgaaaggttcgaaggtgaggaccgaagtctcctttgtgtcttcgaggttgagggagaggagatccagctgctcgacagtggctgtcatctttcctatggtaagtggttttattctcgcttttttcatgaaatagttgggaggaggagtgatcgttgataagggccttgggctggattgcttgctcatcttccccgcacatcacgaatctgtacgccccggtcggcattggaatctcgcttacaggggttggaaagggtctaatgtacatctcttatcactcgtcgacgctgaagtaatcaatccttctttgacgttatacgggaattagctaaagttcatattgctcattctcccgcctgattaccaaccctaagttcggcagaaatacataccccacgacagtacaactctgctaatctgcaccactccaacacttcatccccggtaattctgcaggaaaaagagtcaagatggcccaagacaagctgaagaatatcccagagacccaggtctctcgaccctcctccccttcaaacccgccctcctctacccagggcgtccatagccgacgcatcccgatattctttcgcagcacgctcttccaaatactcaccgttggcctctgtgccttttgcgcgccaggtatctggtcagccatgaacggccttggagtcggcggctcgcagtccccgaatctcgtgaacgcagccaatgccctcctctacgccttcatgacggttacctgcttcctcggccccttcttgaccaacctggtcggctttcgatataccctgtcactgggctcaattggatacccactctatgcggcggggctgtatcttaacaacaggaccggcgcgacatggctcgtctatcttggctccgtgacctgcgggatatcagcgggcttcttctggagcgtcgagggagcaattgccacggggtatccggaagaccgcaagcgggggagatatatagcgacgtggtttacgttccgcaatttcggcaatatcattggcggagctatctcgctgggaatcaatgtcaaccttaatcagcagggacaggtggggtaccagacatacctgggcttcatcgccattcaatgtctagggtgcttgattggactcttgctatcgaatccagaaaaggtggtcagagatgacgggacggagatcgcggccagtaccgacactattcattggaagacagaggctaaggcaatgtggaagagaggcaaaagcaagcccattcttttgctgacacccctattctggtactttggctgggtccaagcctacccgggcacatacctcgcaacgtactttactattcgatcccgagcactgggcagcttcctctctgccatcgtcggaacaatcgcaacctggctcggtggctccctcgtcgatattccctggacattgaaccgcaagcaccgagccctggcgacgtggaccctcatcgccgccctcaacagcacaacatggatatgggccgtaattatccagaacgaataccgccacactaaccctgtcctcgactgggacgaccagaggaccttcggccgggggttcggcatatacctctttgagcgactgagtgtggggatcgtcgaaaactacatatattggtgtattgggaacctttccgactcgcctggtgagcagatccggtatagctcgctgctgagggggattgagactgctggagtggcggtgggatttggggtgcaagctgtgccgacaaccttgattgtgacggcgggcattaactttgggttatggttcttcgcacttcccattagtttctgggccacattaatggttgtcaggaaatttgaggaggcggcctggaacagtgcggttcggtaggttattagcagatcatacctactagtaggtaagctactaagttcgtatgtctgaacgatgtgaggtat

SEQ ID NO: 5052 - DNA, 5956 bp, Emericella nidulans
gctgaagcgcgaagcaggttcagcacaatttcttagatgccttcaatcaccagcgaacctctcttagcgatatccagcacgctcttcatctatctgagcgcggcctcttcaatacaaccatgatctacaagcccaagccgatgatggatactcacgaaaagcgaagtctggtgattgaaagcctcgccggcgaagatcctaccgaatatgatgtacaggttaaaattgtgagtgacgataaaagtctatcactagaccttgaatacgccaccacttttatcgacgaaccgtcagcccgacgcctgttgggtagcttcggccgcgcattatcttctattgccgcaaaccccgacgcaaacatcgatgagattgatgtgataccaactggtgacgttgaagtgcttcatatctggaactcaaccgtcggagagactgttcccggcagtatacacgacaagattcatgagcaggctctttctcagccaggggcccaggcagtgtgcggctgggacggggagctgacttacgctgagcttacaggcatgtccgaccggcttgctcatcacttacgaaacttaggggtgcgtgaggaagtgatggtggggctttgttttgataagtccatgtggaccattgtgtccatgatcgctgttctcaaatctggtggtgtaattgtgcctcttggggttcagatgcctgtccagcgtctgcagcatatcctgaacgagatcacagccccagttgttctgaccatggacaaacatgcctccaaactcagggatattacctctgccaacgtcctaactattgatggtggatttatagcaacactacccaacccttgtcatccccccagcgagagtagtctgacatctgaaagtgcggctgtggtcatatacacctcaggttcaaccggtacacccaagggtgttgtcctcacacatgggacaatctgcacaagtatagaaagccatgggccaaaacttcaaatgggtccaaatactagagcattacaatactccgcttatgttttcgacctcagccttctcgatatcctgtctactcttcgcttcggcggttgtgtctgcgtcgtctcggaggaagatcgtgttgataccaacagtcttactacaaagatggaggctatggccgtgaactttgcagtcctcacgcccacagtcgccagtcttattgaccctcggacagtaccgacgctgtcgaccttagttttagccggagaagttgttccacacagcgccgtcgaaacctgggcaagtcatgtcaccctctttaatgggtatggaccagcagaatctaccattcttgcgactaccaacggcccgattattgagaaagagcaagcttctagtgttggcacggcccttgctggcgctatctgggtggttgacacacaagatcacaaccgtctcgttccattgggcgtagttggtgagcttctcatctcagggccgctagttgcacgtggctatctaaatgacaccgagcgaacttcacaatccttcatcacggatcctgcctttgtttctaaatacggcttccattcctgggctggaaagcgaatctacaagactggtgatctggtcaggcaagatccgactgatggttcaatcatgtttgtcggccgagcggatggtcagatcaagatacgcggtcaacgtgtcgaggtcggtgagattgagtactggcttcggcaacacttcgacacccaaactgtcgctgttgacgttattggtgcaagcacaggcgacgtagccttagtggctgctatcgagttgcgcaggatcggttcagcaacgaatgtgtcttttctggacgtcaaccatcagctcagagaatcattcctacagctgcaggcggcccttctcaaagcattaccctcatacatggtaccctcaaagtacattcccatcaagaacatgccaaatacagcctctggtaagctagacagaagagcacttcgaaccttgatagggggcctaaaagaggagcagcttgcacagtacagcctggctgatggtggcaatgtcgcgctttcgactgagaccgaacgccgtttggccagagtctgggtagccgctctcaacacctcaaaagaattcggcgccaacgctcatttcttccgcgttggtggtgactcggtcactgctatgcgcctagtcgctttagctcgaaccgcacagcctcctatcctgttatctgtcagtgacgtattcaagcatcccgttctctcggacatggccaatacaattgctaattcagaatccactgagaactgtcaatatgacaacgatgtgccaccgtttttgctgttgccctaccctcaacatgagagacaggcacgtctccaggagattgcctcgcagtgcaaagttgaagtcgacgtcattgaagatgcttacccgtgcacacctttgcagcaaggtctcatggcaatcacagctcaacaccctcaggcatatatcagtcggtgggtcttccgtttggaagacaccatcgatgagtctcgcttttgccaagcttggagaacgttggttgaacttaatccaattttacgtactcgcattatacaagatcccaaggctggtggaatgcaagtggttcttcagcagcaaatatacatggaataacgtcctgtccgagctgcgcgtcttatatcgcaaaggactctgcaaagcccatgggcttcgaagatccgttggtgcgtttgccagttgtaaccagcagacaggcgcgattcttcgtttggactggcccccatagcacgtatgacggatggacagcccgaaagttgatggaggctgcttttgcactctactccaataatcccgcgccgtctttccatccattcactcgctttgtgcagtatctgcagtcaaactctgccgaggagacccgcgactactggaagtctcaactcgagggtggcataggccctagcttccccgggtctccgaagaacggttctcccaggaagctcagaattcaaagttgccgcattcccgccaataacagcaatgactttactctctccacgctcctgagagctacatgggcactaatcctgtcccaggaaactggaagccaaatcgtaggcttcccaacagcgctttcaggtcgcactgctccagtggatgggattctggacgtcttggggcctaccattaccactgtgcctattcgcgtttctgttgaccctgcccagagcctctcggcgtacttggcctcaatccagcaacaagccacagaaatgctaccgtttgagcatgctggtcttcacaacattagccggatgacgtcgttgcctctcaacttccagcatctttttgtcgtccagcccgcagttgaccgtctcgaccaggcaaactccggcttccaaggacttacgcctgtgccgtttgagacatatggattccacaattatcctcttgtaatagagtgcagcactaacatgaccgatactgacagtgctgttgatttgcaacttcaattcgaccctgctgtcctctctgtggagaaggcaacaacgatcttggaacgctttacccacgtatttggacagctccagagcgctgcaaatgaagcgacatgcgaggtcctggtaagcgacgttatcttcatgacgccggaggacctgggtcggatccagaaatggaaccatttcgatgaaagaatgaccatggctgatggctgtatccacgatctcgttcatcaccaactactttcttgccccgatgcgcaggctgtccatgccttcgacggacatttgacataccgagaactccatcgtcttgccacccgacttgcctaccatcttgaaggtctaggcgtaggtccccaagtgccggtcgctactattttcgaaaaaaccaaatgggtggtggtcacctacttggccgtactaaaagcaggaggaacaatagtgccagtcaatcatcagcatcccaagcagcgtatgcaggctttggtgcagagcatcggtactcgagtcatcttgacctcacaagaccctggacgcctccaaggtcttgtcactggtcctgttctaaaggtcgatcaagactttttcacgcagcttcctgattccgacaaccctcacccagttgtacaagctacagactccgcctttatcattttcacttctggttcgacagggaccagcaaagccgtggtgcttcaacacggtgccattgtttcgagcatggtacaaggccacggctcactctacgcaagccccgacactcgagcgatacagttctccgccttgaacttcgatatcagtatcgccgagatattcacgactctttcctttggtggctgtgtatgcgttatttcagaagatgatcgtgtcagtcgcctcgcggaggcaatggaggaggctgctgtcaacttcgccatcctcacacctacagttgctagtcttctcaaacctgaacaggtgccttctctcagaagattgctacttgtgggcgaagctcttcgccctgaagttgctgagccatggagctccagtcacgtcgaacttcacaacgcgtatgggcctgcagagtcaagcatcctgacgactttcagccagcgcattagggacccagttcaagcacccaatatcggctttcccttggcacatagtaacctgttcgtcgttgatccgtccaattaccacaatctgcttcccgttggcatggtcggcgagctgcttatcgaaggacctctgttagctcgggaatatcttggggatgcgaagaaaactgccgaggcgtttgtgaccgacccagcctggctacagcaatacgatctaggccccgtttccgggagaagattctacaggactggagatcttgttcagcagaagttggacggctctttcatttacattggtagacgggatacccaagtcaagattcatgggcaacgtgttgagattggagaaattgagttctgggtgaagaacaaactcccagatgtacgtgaagttgtggcaggcctgtttaaacctatttacgaagaggatgagcccctcctggctgttgcgatggaagtgccatcaagctctgttgaatcgtccggcttgctatcactgtccgacgaacttcgcgaagcatttggcgaactccgccgcaacctccttactgttgtaccttcgtacatggtcccccaactatacctgccattcgccaaactaccacttacagattccggcaaactcaatcgtcgagcaacgtgggaaatgattcacagttgcgggtcatggtcgcagtatttcctggtggatgatattaaggcagagcccgctactgtcaccgaacgccttttgcaaagtctatgggcgacggtcctcaaggttcctgcctcttccataggcgcaaaagacgactttttccgctctggtggagactctatctcggctatgcgacttgttgccagcgcccgtgaggacgctcatatttcgttgaaggtggcggatgtcttccgtcatccaatactatccgacatggccacactgatagatcgaaaaacaactgtgacaaagccagcatattgcccgttctctacaatgactgatgattatgccatccgcgactccatcaagcctctcctctcagtacccagcgagataattgacgttgcgcctaccacggacctccagtctctttcgattgccacatcgttgcgaccctctcgtgacctaatggcgtacgttagtattgatggaattggcagccctaattttgcccgatggagagcgtcttgcttggaggtagtcaagaagcacgatatccttcgaacggcttatgtcgtgtacaaaaatcaactccttcaggttgttcttcgagattacgcccctgctgtaacccactatcagacagatcagtctatcgaagaatgcaccaaagagttcatcgcgcatgacatgcatcgaccaccccaactgggttac

SEQ ID NO: 5053 - DNA, 7113 bp, Emericella nidulans
  unsure (1)..(7113): unsure at all n locations
tacggacgacgactagccccagattctaaagccaggagaagaggacgaagaggatgaagagtcagactcccaagccctattcgtcaaacagccagcctccaaatcccgcaaagcaactacgaaaagcacaacgcagcgctcgcgccaaacaaagcgtaccgcaccgtcccccgctccatcgtccaacaccgtcagtcaaaccactacaaccgcacgtcgcagaagagaaggcaagcaaacacagctaacgttggactttgttggttcgcagtcgagtcagcatgctagggggtcagtgacgagtagcaatacgaggtccatgagaccgaatcggaccacgagggaagtaagcgttcttagtgaagacattgatgatagtgacgggtttgagccgatgcccagtagtaaccggcggaggaggtagggttgtgtacttttcacttatttgttgatgtgcgaaggtatgtgcgtgtgaagctgcaatcataatacccccctcacagtgaaatatatcaagtatgtcatttcttacctcgttcgaccaatctctatcaatgaagggtccaaggacgagctactgctagaagacaatatatgccaagatcactttgtagaccataatatgaatgattgatgacctccacctacccaattaacatggcttcgtcagtaaatacatgctaatattacctaaatcctacctatcttcctacacacctattacctgctcgcgtctccgcggtttacgactagaaaccagagcatagcccataccatctacttaagggaccaggaagtagactacaaagagcaaagagcctcttgaactttagcctccccaaaatccctaaaaagagttacactagactaaaccccgtaaaggaaaagcactcctagtcacagcccatttgtcatcacaacctccccctgttcaaaaacctcacaggaagatccacccacctagccctaagatactccgcaacgttcttccccaaaaagtccaccgttgtcgtactcgagaccccgcgatccaatagattgcggaagagaaagtgcactgcgcggagattttccagctgaaagcgctcaatggacaaatttcggctggggtccggttttgcgaactcgtcgccgaggagatcgacgatgttttcgagggagagcagccggcagagccacgtgtattcgtcgctgtgccgcacccagaaaccgcaatttgcatcgggccctttgtcgcctgagcgggcgtggacaaggcagccgagtgggccgcggatggtggggccaaatgcctcattttttacaggttgacgggcttgaccgctgtcaacaccgataacgggtgaggagaggcgggacaaagaaaggggcgggatggatctggctgttggggttatggattcgcatggttggcggtccgggtaggctcttgtttcaggcggaggcgggatggtgaggaccttgtcttctttgaagggaaggtggacgcggtgctcaatgtcctcttgagggaggagtgtgacgtagtactcaaagatgggttttgggaagccctgccggagatctaggtggaaggttgcgcctgggtagccctgcatgatgttgtcggtgatgtgccggaggaaggcattgggggctatgtcctcggcattgcgtgcttgtgctatgacccggaaggtgacggtggcgctgtcttggttttctgggttgtcaggagaggtgccgagggtggagaatttaagggatgtgtaattggagctgtagggtagcaagaggcgtctaatttgggcttctagcatgcgggctttggcgtcgatgtcaagaccaacgaggaaccaggatgcctctgcttggaagcctccgcgagcagtgatgccgactttggtggttggaggaggtggagcggagcggacgccgtggagggtcacgcggttggtgccgatttgttcgaagcggatatctgttaggatagctgtaacgtcggaattgaaataccatgggccctgaatctcgtataagagctgagatgtgcaggtgtccaccgtaacagcgcctccggtggcatatgactgcatagtaatgacaacctttccttctgctgatatctcggcaataggatagccaatgttcgaccagccgtccttgccaatgtgctctagatccttgaaacccgtgaaattgcccccacaaacatagttgctgcattcaatgagatggccggcaacgaaggcatttgcgagctgatcaaggtcgtgtctctgccatttgtgccaccaataagccgctccaataaccggagatgcatcagacactcggccacagagcacgatgtcggctccttcagcaagggcagctgcgattcccaaacctccaaggtagcattgcgcaaagatgggctcgaatgaccagtctgacagcacttcgttggtgtagatattcttgaaggacgactttccggatgccagtgctctttttattgtggataggacttcgtcaccggacacccaagccacctaacaccagattagagttagatacaaaagaacaggagacttcgccaacctttagatccagccctttggcacgaatcatatcagttaccacctcgtagagcccctgggtgtccgcattacccgcattaaccgccagcttgataccgtgctttgccagatcttccaaggccggctgcagcgctaaaaggaaggatggttcgtaccctggcaagttatcagagccacctcctgatgcatctaacttgccggtagctttgtccaggtcgactcggcgtccagccgcgactaccatattggcttcactcatgaaatcggcgattataacgtccacagggtctagggggtagttgcgggcaaattctgcaatagcatggcgacggtctgatgcggagccggacgcacctggaaacaattattaaacttggattgtttagctagacgattgaaatacctgcgattcgaaccgggcgagagctcatggtgatgataggtatctaggacgggcttgcaatggcaggtttctgagatagaatggtcggccccgtaatcgtagaattgctgtgaacataaacacggtccatgctcaataaagagaggcgcaaggacgatctggaatgattaaagaaacactggatggttgtcagaatgatgaagcgcctcggctctcggtgtgagagcaatgcggggtcgaaagtcgttctcaaggacggaagaatcatggctgaagggcctagtggatagaagctctagacaaatcgatttttgagaggaacactgggacgctcataaagctcgtaaatgatagagagtcagaatgctaatgggtcgaataaaaactaacatatccagcccactggagaatagccattgcaacaaatagcaacagagcagatgttttcaccaattcaatctcatcccgataatagcgagtccaattgctcaacttagccagatgcacactctggcccttgtcctgcaacgctgttcgcaggctaggcagcccatccaaactgtggctgttccattctttctgataggcacgcaattcatcaccttccaccttctttcttgcccagctgcccaaagtatctcgatctttgaagtacggctttggcttgtttgtttcctcatcgaaagctaatgatagctggggaacaccatatccacatgaggtttgtacctgttttgaatcccggtgttagtggtctctcatctctaaaaatggactcaagtgaaaaacaaccttgaaaacgtccaatcgaataatggctcgcgctcccaacagcgtcttccctcccatacgctcaagatatggcccaaagtcagaatcgctccattcaatcacagagccagtacagaagaagcgcaaaatgcggggagctgcatcgaaagagcagaagaggatggtgattcggccattttcgcggacgtgactaatggtctcactaccagagcccgtggcatccacgtatgccgcctcgttcggtcccagtatggcaaatgatgcgtctggtagacctttgggtgagatgttgatatggcggccacggagaggagcagatgccgtgaaaaacaccttctggttcaaggcccagtcgcgaagttccggagagatcgatgggtagaatttgggcattctgaatgctttgggagaatagggaagaatgaaaacataagatgaggtgcgacggcagttacctcgtatcacagcaaaagcggaggcggtctccgactccggtgagatgagttgagtctaggaaacggtctgcaggtgatttcatgagtcaccaagccacccaagtctaaagccatgtcgctatacaatatcatagagaaaaaaagtcatcccgtatatactcccccaggcatattcccaaggacacccgagagcccaggcaatggtcaacatagatggacccgtcatacgccatacgcatgaccctggaaccatcttgcatacttcttcttgggacatcgtcctggggcagtacaagtgggaaggggtgctctgtaggttcggcctatgtcgggacgtccctgaagtctgttatgcagccgaataatatgaatcccatcaacattgtagaactgtccgcatggtttgcggttccgcgattcatccgcagcggggtttgagcttatcgacgtcttgtaactcttgcttacccttagagaagactccaaccgcaccaaggccaaagtttaaagggattatccggggataaggaaactangcctcgtggggttgagggggagtcagcaatgtttagtaatccgtgtgggccaattgagaaacgaggaccacacaagacaatgtgcaatgaaaccttggtggtacaccagcatagctaagtatccgcgggcagcgaacattccgtacagattctcgagacgaaccgataccgcggatccatttttcagcatgtcgacccaacttgcaaatacaagtgtacgaaggacggcgtatagtaacgaaaggactccgagccaagcaaccgagaatgacgtctcagactctgcgagtgaggcgggctccaatcagggaacttctgcatggtcatcaaccccgcatgatcttctcatcacgcctcttggttcgtaattttcatttttgcattacggcctcggttatcatcgcaggctccaccacatagtctcaagataggtccagaatcagtccgctctacggggggtaaatcgtaaattgcaattcgcattacggtctgggttatcgatcgcggggatcctcaactttgtttcagaaccagggtgctgtaggttgtagatcgtaagtttcatcctgcattacccgcctcggttattatcgcgagctcttcaacgtgttttcagaatcatctaggctgtggaggcagtgggcaccgcggcgaaggggacggaatgcagttcacctggactggctcttgaagaccagtggggcacttcggcgggttgctagcttgctacatgtaatttccatgggtaacagctatcctcaacaagagcggctccgcttgacctgttcccctcctttcccctcttttgctgcgaccactggctcagtgctaccaaagccagagcggtattattaaagctccctcgtcctcccaccgagccagcatttctccctactccaactctcctctcccaagatacccatatttcccgctcaccatgtctgatttgttcaccaccatcgagactccggtcatcaaatatgagcagcctctcggcctgtatgacgttttctcgcctcctgattttttttgtgttgtgtttattaacgatcattgggttgtaggttcatcaacaacgagttcgtgaagggcgttgagggcaagaccttccaggtcatcaacccctccaacgagaaggtcatcacctccgtccacgaagccaccgagaaggatgttgatgtcgccgtcgctgctgcccgtgctgcctttgaggggccatggcgccaggtcaccccctctgagcgtggcattttgatcaacaagctggcggatctgatggagcgtgatatcgacaccctcgccgctatcgagtctctcgacaacggcaaggctttcaccatggccaaggtcgatcttgccaactccattggttgcttgcgatactacgctggctgggcggacaagattcacggtcagaccattgacaccaaccccgagactcttacctacacccgccacgagcccgttggtgtttgcggtcagatcatcccctggaacttcccccttctgatgtggtcctggaagattggacccgctgttgccgctggtaacactgttgtcctcaagaccgccgagcagacccctctctccgccctttacgctgctaagctgatcaaggaggctggattccccgctggtgtgatcaacgtcatctctggctttggccgtaccgctggtgctgccatctccagccacatggacattgacaaggttgccttcactggctctactcttgttggacgtaccatcctgcaggccgctgctaagagcaacctgaagaaggtcactcttgagctcggtggcaagtctcccaacatcgtctttgatgatgctgacattgacaacgccatttcctgggccaactttggtatcttcttcaaccacggccagtgctgctgtgctggatcccgtatcctggtccaggagggcatctacgacaagttcgtcgcccgcttcaaggagcgtgcccagaagaacaaggtcggaaaccccttcgagcaggacaccttccagggtccccaggtttcccagctccagttcgaccgtatcatggagtacatcaaccacggcaagaaggctggtgctaccgtcgccaccggtggtgaccgccacggcaacgagggttacttcatccagcctactgtcttcacagacgtcacttccgacatgaagattgcccaggaggagatcttcggtcctgtcgtcactatccagaagttcaaggatgaggctgaggctatcaagatcggcaactcgaccgactacggtacgtctatcttttctggtctttgccgatattttgttgctaacatacgcacaggtcttgctgctgccgtgcacacaaagaacgtcaacaccgccattcg

SEQ ID NO: 5054 - DNA, 8355 bp, Emericella nidulans
agcgttgatcttccactgtgatggaatctttgtagattcgtaccacttctgaagatggtatttgccgccaaaaatgaagtagggtggtatagcactgccatccgcgcaaatacactcaattactgtgactgattcacgtccttcatgacttggattgcctcgagctgctcgttctggatagcgcgtaacaacctttcaaggtctgccttggccaagttggaaacctgtttcatcaaagttgtagatattatataaaggtatatctcacattgcaatctcaagccgatcaaaccaggtagtttgtaatccaatgtcaactgaatcaagccgttttttatcaattggcttctgtttaatgagctggtgtggctttggaagacgtgatataaagtaatatacccgtgcattacccacacgcgtagcatattcgccttcaggggtattgcgaagcaaaatttgatttgcacaaccctcaatcatctttggggtagatgaaatgccgtaatcatcaatttgatagatccactgtataatggcctcctcctaagtatcataaagtgttttgtgagtggcctttcgaggctgacaaagctggtcagccttcaagtcgaggctcgaagcagtgattgagagacaccatactgacgcaccaacgcagagatatttggttttttgatgcgtttagctacttcacaggcatgtaggattcgatcctccttagttttaggagactcgggcaagtggttggtggtgctgtaggaatataaaataaattgttcgtatgactgaaatttacgtttgactgaagaccacgtacaacgcaaggcggtgtacgagggtgcagccacggctaggaggaagatatgccaatgcaagacccctgccaataatacctgcaataagactccctcggttgccgcggggtcgagaccgtcgctaatgcttcttaatcagaagctgggctgcaagagacagtcagatttttgataactgcatctaaactcagagtaaccattcttccctcccccccgcctcaggggaactaatcgctagcatggaagccgcagctttcgcccaagcagcggcacgctggccagcatgttcctggagattgtctccaccacgaaacaagtcattgagaccatgaaaggtgcacgcgctgctctcgtggaactgttcactcgtgccgagcgcatccgtctgaacctcgaactcttccgctcgctcacctaccgactgtcggaccccatggagagaactgcggccatctcgttcaacgagagttcataccggcagaccgcgaatgaagtccttgagcttgtgcataaagtggcggattcggggaagcgcagcgatctcatgatgagagtcaactggctattctacagatcagacgttgcggcgctggtgaagaaactagaagatagagagagagatctcgggctagtcctgacgttcattgctgcgtgggtcctcataccacttctcgtatagctttagcccattgtgtttgctgagagcccgtcaggcaatcaagtgtcgttactgagggcgaagtccatgcactgaggaccaaggtcgacgagcgcacgaggatcagcagtgcatctgacactagtccctacggagaaaccactcagccggttgaccgggtgaatgaggatccgcccgagtatgaagagttcgtccaggatacaagaccaagggctgggtggcccgagatcgtgtcaccccggccaaagcagccgcccactttgtggccaggcgttctgctgagagagtcctacccccctgagtatctgcagaaacgggaccaactagctaatgcggcgtatgttggtgactgggcgtctgtattagacacacttgagaaggcgaaaatgctttttcaggagccatgggcgaatgccgtccggctacgtatgttactctacctacaaaggcaaccaagtcctccaagatctaagccaactaatccgtcatctgcaggccaaacccagaattacgacaagctgtctctctggaccccgctgcaccaagcagcgtacatgcgggccccggtgacggtcatctcgcagctacttgagcatggggccttccgtaccatctcctccccctctttgccaggactctcagggcgctaactctactatccagggacacttccaacaggtcaaacctggggcgagttccagtatgcggatctcacaccggcagagatcgcccatgtactcggatacgacgatatatatggcatcctcgcacccgtggtccggcatgtggttcctgtcagaacccaaacgtaccttcaggcaaaatttaatgagcttcttctgtctgaattagaggactgtgcacagttgcctgccggatgcatccggtttccacctctatctgtcctgactgaactagagcacccggagatttggtttcctctcgggtttcttcaaaaggtaacgcctctatttcatagtatagaacgaataaactgataactcttcaggggtttttgtttcgtctcgatggtcgggaggtagtggtgctcagcattgggcggaggagaggtcagccgagacaagctttccgtgtcacaacagagggatggacagcgcttgaggatgtcgttgtcatgtcatagacggtgcatcagatcgagaataattatattgactcttcactccgctgacgagtgtccctgcctctggaatgcctccgggttgcattggattcacatacgtaacaaccaatgaagtaaagcgtagttccatatattagcgaagaaattgacggctcgatccttgtcacagggtttaactccaatcacagcatcagtataaggggattcatagaaacagcccaggcacagacgcagcgaatcctataatcccaggctgcccaaagagggttcacctcagcccatgaagtcccacccttctatcaaccggcccgaagcacccgcctcacaagccagacagataatcggaggaaggaagcacgctccttggatgtggcagcgttagatcacaccattctgggggtgagctattgaccactgcagctgggtaatactggtagagcaatcttcacgaggctcactttgttccctccgattgctaatcttctgtctctctcgcgatgactcccactggagtcaatgctgtaccactggccttgcattggggctgcttcggctactgctgctgtcgtcgctggcctctatttctcgacgagttccagctcttgcagcgcataaggtgagtgagccgtatccgctcgagacgaatcttgtgcttgcagggatctgaagattatcctgcttacacagaacgtacaatttataccaccgttcaggcagacgcaatgcatgggattacaggcttcatgttatccagtatattcactaaattaacccttttatctgatttggaggcatattccggtcaatcaaagcttcccgtctgcagcccccttcggcctggggccatcgcctaacctctccagcacaaaatacaacggatgaccctccaccgcacccgccgcattcattactcccatgacagtccggtcatcgattgctctgaagtaatcaatgatcggtccatcgttgtagaccatcgctgccgaaacaacattgttatatttgacctcgcggatccgcgctttgcccatgaagccattcaccactcatccttgccctttcttggtttcagggtaggggagagatgcgtcgagagagctaataggatcgacgtcttcagtcgagtgaaagtctttgcctacccagtgggctgttttcagggctgcgatgccgtggtggtctgttaaggctcaggtgccgagccatgagaagagcagaccggtggcaggcaggggcgggaggaagttgaatagggttgctgcggctaaggctgtgatgggctttgaagagagaatgtgcgtaagggtttcttggtggctagaatagggcgtcagatagactatcatggataggaagtagggtagcgtacgactcggacattatggctctgagctcgcacggcgactgtctagaaacgttgtaacctcttgcaagaaccaatgaattcagtccctgccgatgcaggagtcgacggatacttatccctccacgcttttttggtgattgtatatcagtcagaccaaggtggctcatcccgactgactcgaatgcggagatcactataggtgaaacaggcaagagcctctacacaacgccaagtatgaaatatacagacagctcactataggaaacgatacagaaactccaggttttgcaggttaagtgcgtccgcttcatcctcaaacggtacccaaccgtaccagtcgtcttgcggtgcgggcattggcatgagcatgtctccagtgccagtgccagtgctagtaccagttccaggaccagagacatggctactagaccccgtaacagtcgacatagtagtcgctgagtctacatcgttgccctctacactctctccctcaacctggttctctcttgttcgccgcagactctcagcagtgcgatcgtccagcccgcgaaagaacagatgcaaaacccagttctctagatcccaggacttctgcagctcttcaagactgagcagacagagccgcgcgcggtgttcggcgagagttcgcatcgttccgcagttccgtcggtgatggattgtgtggatgcagagggttgagaaagcatgggttatccttaaccagccgtcactgttagcttgtgtctaatcagatgggagaggatggaattaaatacaaatgcggcggtgcatgctggactagatgatgcgatagcaaatcttccaggatccttgtgctcttcgttgcggcatcgagggcagattggccgttgtccaagggggttggatccagaaaggtgcgacggtggaggagaatatatagatttctataagacagtaacgatgtcagcggctgggatgtatagaaaaagaggggcgccaggtgactcactgatatgtcatatgcaaaagccccgtcaggaacagcgagtccggcgacacattgtccagtcgaagctcgacaggcagctggcaattccacaggtacagctgctcgttgagggcattcctcgtcgcgagatctggtcgttggtggtggagatactgcgttgagacgatcatccggactgcaagcaatggacatcagcagcgcaacaccaaaagaacatagaagggtagagccatacgaagccgagccagtttggccatttcaacggggtaaacaagatcttgtggcgtttggcgcccgaagatatcgccctccgctgtctccccttccaccacatcatcgggctctagcatggccacatcgccgtcttcatcgcggatccggggggcaagcccagtgctgcggcgctctgttggtcgcgcgtctgccgttaaccatcagcgatgctcgaaaagcctggtagacggatattaacaaacatataaagcccaccagattcgtttccataacttcttctccttcgatggagccgagaattgggacctggacagcccatcagcctggcattacagtagcaacataaaaaaaaggtcaagctgtacatcatgtgcatcccccttttctgcgcgagactgatggcaatgcccaaccagtacctcacatcgcgctcctcactcggccctcctcgccagaagctcaacatgaagagcgcctgcagcttgacaataggacttgcttccgcatcagcttcgtagattgccttggcgcgggagtagaaaaggaacttggcgcggtaacggacgggaaattccgtctttgcaaaggtctcgtcgtcgcagaggcttacgccaatgaagagcatagattggaggagcagaggggggatattgctgagacctgcacctggacctggctgtgtcctggcacggcagatcgccgcacggtcaacgatggggaagcaaggatggaaccagcgaaagtaggcttgtaagagcgcatcgacggtggcctctggtggaaaggagagggcaccgttggactcaagctgtgcggcttgctggacttggtgcagacggacggcctcgtcgcgcgtactggtgggtgcgagacggtcagggagggggtagtgcagccttggtggttgggtaggatccatgacagacgtcagagggctggactcgcccaggaagacggttgagtcgtggattcgtggtttggctgcgtggagcgtggatgaggttgttgggctggctgaggatgagggttcggaggctcggacggctcgtccaatctgcgtgacgtgccctgacttgaacgtcttcttgcggggatatctaatactctattaacttgtgattatcaatcattataaggtcaatgggtgagtacttcccccgccgcgagactccaacttcgcaagggacatcctgcgccacgcagttggagcacgggcgctgctgcaggacattgcagcggatgcacgaccatgacagtggatacaggcttgctttgctcgtcgaaggggcattttagcagaatccattacaaacttgagatgccgaagaggaagagtgagatggcttctccacgaatattctggtggcgctcggctatatgctcggctttatgctcggttacttagtttcagtgcggggacttttaaagacatctcctacctagctttgctgcagaatgtgacaagtaattttttatagaaggagacagacgcaatgctacggttatcgaggctctcgcatgtgtgcaacaggcgcctcttctcgtcctccgcccgtcggcccctcatggacctgacgggcttctctgagaaccaactgatggtccgcgacgccatctcaggcatctgcgccggctttccaaatacctactggcaggaatgcgaccagctcgagcgcgacccgaaagaatttcacgcggcgcttgcaaaggctgggtggttgggaatcgccctgccagaggagcacgggggcgcgggactcggtatgacgcgcgtaaaacaccagcaacatatacctattgcgagaccaagactgactcagaaaaaggcatctctgaagcgacgattatgatgcagacaatcacgcagtccggcgctggaatggccggtgcgcagtccatccacgcaaacgtgtacgcaacgcaaccgctcgcgaaattcggcaacgaacaacagctcaccgagacgatcccgaacattatcaatggcaaatggcgaacgtgttttggtgttactgagccaaataccgggcttgagacactggcattacagacgcgggccgagctcaacagcaccgggacgcactactccatcaccggccagaagatctggatcacatgcgcacaggtagcgaggaagatgatcctgctggcgcggacaaaaccaagagaagaggtttccaagccgacgcaggggttgagcatgttctgcatcgacattgacaagaacgagcccggactggagctgaagaagatcaagaaaatgggcggtcgtgctgtggatgcgaacgaggtcttctttgacaagtaccaagtccctgcttcgacgctcatcggccgcgaaaacgagggtttccggatgatcctacacggtatgaatgccgagcgatgtcttctcgccggcgaagctcttggattggggtatgtcgctctcgaacgagcggcggagtacgcgaacacccggcatgtgtttggccgcgccatcggcaaaaaccaggccatcgcgcatccgcttgctgatgtctacatgaaactcgaggcggcaaagctggccacataccacgcggccaggttgtatgatgcctcgcggacagatgagtccatccccgcgcatagtgttggagtggcggcgaacagcgcaaaataccttgctgcggaggcagcctttacggcgtgtgagagggcggtcttaacgcatggaggcatgggctatgcaatggagtacgacgttgagcgatggctgagagagtgcctagttcccaggatcgcgccggtcagtcgtgagatgatcctgaactacgtgagtgagaaggtgctggggctaccgaggagctactagtgtaagacaccaatagcaatatcattattaattgacaggtattgtcctgcaactcggccagaacttctcagtgccatctttaatgttccatgcattggcgggcacatagagtcctctctcctttgttgaaacattcaaggtcgccttgccctgttgactttgtgtgtccctctctccttgttggcctccatactctcagcactgcttttaagtcacccatcatttgaggtggcgtccagtgtcttcacagcatgcagcctatctagtaacccaatcagacacctcaaccc

SEQ ID NO: 5055 - DNA, 554 bp, Emericella nidulans
attacgctcttgctggcagggcgccacgatggggatcggtccaccaggattacgtgccgagttggtgcccgaggctgaccggtcctttcttgtcttgtcgggtggctccacgcatacggtggggagcttgctctggtatggactgtttgaccacgaaatttgttgagttcttatggtggattgcctatgtgtcctactggccatacaacagctgcgattgatgatcttctctaaatagtctgtcgctcccatacctatgtatggggcgatatatgatgtattacaagggcgatggtaacttgccctcacttacactctaggtaagtatgattccttgacatggtgcatctgcaatacgaacactcttgttaactgcattcctgagtgacggctatagattccgttatcgtgacatccatgtgaacgctgaagatgcgccgttctagctgctgcataccggaaactttggatgctgtgtgctctgctctagacgtaagagagagctgtgagattgtgtgcgtagtgtatgcctgggtccagagcaaaggagatat

SEQ ID NO: 5056 - DNA, 7434 bp, Emericella nidulans
acaccagtcttcccccgcaatgcggcggacggcctccgtttgtctgcgcaattaccggaaagtcatactcgactaaggtactggttgatcgagtagagttcttgtcgcggtcacttgcgcaagagctgggatggtcgccgaacgacgggggagccggaggataaagttgtcggtatctacagctggaatacggtcggtgacactcgtttgcattgctcttcctttgctataagctgatgaagaaaaaaaaatagcttgacttttttgctctctgctgggccgtccatcgtctcaatgggatctgtctcccgctccatccgtttagtatcgtccccgaggtcgtagcgcacatgaaaagagcaaaatgtagagtcatattcacctgtcagtctcttgttgcaaacactttggaagctgccagggagctgtctattcccggagacaagatctataccacggcattacccgaagcgtatcttcagaatcccgagccgattgaccagttcaagtcggtagatcaactgattgctgagggtgagaagttgcagcgacttccaccattacagtgggagaaaggccgcgcaaaaatacaggtcgcatactactgcgctaccagtggaacatcagggaagcaggtcggtggctcttctcgggaatggagatgatggctgacgggcaattgtagaaactggccaaaatcacacactacaacttcattgccaatgtcatgcaagtgtgcatgcacgagagctatgctaagaatggccgtaacgagatcgcattcggcgcgattccgttgacccatggatatggactgaacattgggcacatcatggtctaccgcggagacacctacgttatctgcccccggttcgatatgcagttgatgctcaagacaattgagcgtttccgcgtcgaaagactatacgtggtttgtattctcaggcctaggaatgcaagccaaactaattgcgcaggttcccccaatccttgcggcattagcagcgaaccccttccttcttgacctccacgacctctcatccgtccaagcgaccgtcactggtgctgcagcactcgatcgtagtatcgccgcgaaactgaataaactgcgacccacgtggaaaatcaaccatgcatacggtattgtcaataaccctagcgctagctaacggctaatatgagacaaataggcctcaccgaaaccggtgtggtagcaactctcacaagcccacacgatgtctggcacggctcctctggttccctccttccaagtttcgagatccgactcgtcaagcccgacggtacagacgcagagggcctcgacgagcccggcgaagtccacttcaactcccccagttgtttcctcgggtacgtcggcgacgacgagtccaacaagaacaccttcgacgaaaaggggtggcttaagtccggagacatcggtgtttttcgcaaatcgcctaacggacacgctcacctgttcattctcgaacgcatcaaggatatgatcaaagtcaaggtacgtcgtttcttgaatggaattttaaatatatgagcaaggtcaacttaatgaatacaaaacagggcgaacaagtcctcccacgggacatcgagtccgtccttctttcgcacccagccgtaatcgatgcagctgttatcggcgttccggacgagctctctggcgagcgtgcgaaagcgtacatcgtgcgctcgaagaccgtgatggaagatctggacgaggatgatctggctgacgagattgacgaatttgtgcagggaaagctgcatgaatcgcactggcttcacgatcgaattgtgttcctggagaagttgccaaagagtgagagtgggaaagtgttgaagaaggatttgaaggccatgaactaaacccatcccgtaggaggaatatctatactttttaatcttaattgggtagatacatgctcactaaatgaatgataaagattatatctaaggactgcctgtcgtgctctatggtacagcttttatggagccagcgtagcctagtggaatgctgaactggttaacttcggctagctcagaatctccgccgatagcggttgttcactgttcgtagtttacatagtgctaagagtatatgtcaagtagatgagagcacgatatggacttacctgtttgctagtggactaggttatctacctccaagtgatgtttgcagggtcgctttgatgcacatacaggtccatttcctaaggtcaatgccctatgctcgcaacatgcagtaagaatatatctatccaaaagatgacgagacgagcttgctcaaaggtaatcaccagccggggtccgaaattgcgcgtggtccggatggaaagcctagaaaggaaggatatttaacaaagaggggtaaaaattttggtggctggaaagcgcgctacttcgttttacatggtcccgaactcaagtatttcgaagccccaggaggcgctcatcttggaaccattaagatcgccaacgcacagatcgggaaacagtcgcaacaggcgcaaggtccttcgcgagccgacgacgatgattctgataatcaataccgtcatgccttccttattttggagcccaaaaagaaagactcttccgccctcgtgcgccatgtcttgtgcgctgaaagcgatgatgagagagatacgtgggttgaagcgctcttggaatatgttgaaggagctccagcaaatgatagcgctcaagcccagacggctcctaataatgcaacgaacacctcttcaaaaaacaagttgttctccaacggtagcaaaaaaggcaaagggacggacagcccagatattgagccatctgacaccgtccagggcttcagttttgaagatgctgttcccgccgaaccgcctgttattggctcttctgatccgcggacaccaagatcgccaatgttcccaacggtccctttccaagaaccaagcgacaacaaccagcccgaccatggccagctctcatcaaaagtgatatctgcacccactaatggcgcagtgatacaagacgctggcgcttggggaaataagacctcaagcactaaagagaagaagcgcagtatctggggatttcgtacaaggtcatccatcgatcttgcttcccatcttcaagctgtctccgagggtcctcctatccagcttcatggtacaggcaatgagaaaagggaattgataaaaccagtatttgggatgccgctggtagaagcagtgcgagattgcgcgccgtttgacgttgatgtcgaattacctgctgtggtttatcgctgcctcgaatatctcagagccaagaaggcggaattggaagaaggcatatttcgtttgagtggatcgaacgtcgttgtgaaggcgctgagggaacgattcaatactgaaggagatgtcgatttcctcgccggagaacaatattatgacgtacatgctgtggcctcacttttcaaacaataccttcgggagctaccatcgaccgtactcacgcgcgaactacatatagaattcttgcgtgtccttggtaagcacattatctgatactatgcaatgttgatgttcatactaattgtccgcttcagatatcaacgagaagcagaagaaagttgtcgccttcaactcattggttcgcagactcccgaagccaaatctggccttgctgcgagcattggttcaatttttgattgtcattgtcaacaattccgacgttaacaaaatgactgtcaggaatgtgggcattgtctttgctcctactcttaatataccagctcccgttttctcgttgttccttactgaatacgatgaaattttcaatgatgcgcaagaacctgccgtgaacacagtggatctggttgttgataatccgttgacaccagaagacattcggtctcctcggcgtcaaatgttctctgatatacctacgcccgcacacaatcagatgacattcccccggccaggagacggtccgtataaatacggttcgagtcatgacactggcttcattcccagcagccgagttatggaactcatgctgcaaatagggcgaagacctacagccaaccgccagcggctgtgagcaggacgttggctccagaatctgacagccaaccgcaatgccaaggccaagcgaagggaaagcaacatccttttcatggatttcaacaacgatgatccgcatcagctgtctcatgacaattttggtaagtacttagtttgttcacattatccttcttttcctccattcttccagcccaagtgtgcatactgattatgaatagcctaagtttgattccattactcgggtagatgttggtgctgtccctcttcagttaatactaccatcgtacctacctttttacctccgtcgattttatttttactcctattcccaccgcttacaccatgatataatgcttgtggtcgggcgcaatgattcgaacgaatatgcaacgacgtatataaatgcctaaaccgcctggcgagcacatccaactgggagcctgaagcggctgaattctaatgataataagggcctcaatgtctaatgccagtttccttcttcctctgcgttgtattttttttggtttggaatgtgacttacggtttcatgtctgtttctttgctttccatgcagttttgtataaatctcttttgtgcctctgcttgcgtttggcaaactcaggaattctataccccttcctattttcagataagttatatggtttcttcggcattcttcatgttaagctgtagacctgtctcaatttgccataaagcacgtcaggtgctattagtcaagtttacggagggcaacttgggtttggtgattatggaaaccgctgaaaagtatgctactgtgactatatcgtgtcccatagtatcatacaatctaccatgtctaatagcagaaagcgctagaaactctttgcacgatcacctttccagaaccccatcaattccccgttttcactaacccactcgcgcacaccatcaactaacgccttcgccatgcccttgttcttattcttaccatcagcacctagagagccccgactcaaccccgccgtgggaaccggtttgccagttgcatattcagatcccatggtgggcagcacgttctctcccgcactcagactaacaaacagcgcaaaaggcactagccacacgcagagtccaaagtatgacgccacttctgtaaacgtcggcatgtcgttggggctaacattatacggctgtcgccagctcgtagagctcctttgcagtgtggtgggcttcgaaaagtgctggaaccatagccagtggttgaggccaacgaggaaacaggaaaggatgaaaaacgggtctgagagtttcactatgggaaagcggcggagattgcttgcgtagacgatgtgggagccgatactgaggagggagagtgagaaggggaatttgtccacaagaaggagcagaatctggatcgttattatgccgtatatcaggcgagataaaagccggcgagctatgacagtatgttcttcaacgagttctgagagataataaagaccagatgctgtaaggttctgttaatgagggtcgctaggaagagacttcgcgtgcacgagttttgctgcatggaatcttcttgatgatacccaaaatatgagatgcggaaatatcttacctatggctaaagtgagaaagcagaatcctattatcactcccagataccctactaatggtagtatccacatggtgtgcaggcaaaagagcaccgaagaactcctttgagggataggctctgtgacggatgcaggacagtcgaaacgactcaagaactctgaagaagatgtctcgtctctttagctagatggtagatgtaccagcaccggtgggagggtcagacaaatgttttaacttatattgagatgagacaagcagagatatacttgggcacggtgccgatcatgcataaatggctttatgccttaggcaaaaggcccacgatgccaagataggcctttcggcagaaaaaaatatactgcgatagtaaagtataacaggacaactttcatgctacttttgttattgcctgcggtgtttataaaagcttgactgataccagtcgtgatagccttgcgctaagatcttcacaatgtcgcgctccgaagatattttgtatgttttaacatgttgtaattggcctccctgctaacgaaactcgctgaagaccccggacctcttttacgacgacaatgagtcgcgaaaatataccacttcatcacgaatccgtaacattcagtcagacatgacgcacagggctctcgaactccttgacctcaaggcgccgtctttaatcctcgatgttggttgtggctctggcctgtctggtgaaatactctctcaagaaccacgtgagcaaggaggtccgcacacctggattggaatggatatttcacctagcatgcttgatatagcactacagcgaggagtggagggggatttgttccttgcggatattggacagggtgtaccgttccgacccggaacgttcgacgcggcaattagcatcagtgccatccagtggttatgcaatgcggaaacaagcgatgttagcccggaaggtcgccttcggagatttttcgaaggcctttttgctagtcttcgacgaggtgggcgtgctgtttgtcagttttaccccaaaaatgatgcccaacgcacaatgatcagcggcgccgccatcaaggccgggtttggggctggtatcttggaggatgatcctggtacaaaaaatagcaagttataccttgttctcacagtcggtggtggaggtttgcagggtgatattactggtgttgtggatgggatgaatgacgtcgatatcatggacgcgaggagaaaggctcaggatcacgggagagctactatctccagaaagccccccaaggcttggatcttgcggaaaaaagagcaaatggctaaaaagggcaaggttgtcaaggcaaattcaaagtatactggccgcaaaaggcgtccagccttttgattacattcggctggcactgttatgaagacttcccgttactcgacaagctgccctaacagtagcaagaaagccccaggtcaagctctacgatcaatgtcttgcgaaccctttccaaccggatttggacacgaaatcaaccccggtatatggtatatgactgctctccaatgcgttgcgtcagagcttcatacaagtccgggaaccacgtcgccttcactccaggggattttgccgattaggtcgtctgtaggtcgcgtacactccaggatggaggctagaaagggacgaaagtatgtcaagtcaagcatttggtatagcggggtgtgaaaacaaatccgcgcttgctgtcttgaaagaaccaattgatcctcggacttctttcttagtgcaactaaggtgagt

SEQ ID NO: 5057 - DNA, 5226 bp, Emericella nidulans
atcaattgtgcctgaatggctgattttcctcattggatgtattagttcctgcttgcaggggtaggagacggcttgaagattcatggatatggcggagaaatagcatcggcttcagctggtgccggtaacaattgaataaaagccgcagagacttcgcccataatggcatctaaggagtatctcaacatctttcccaggaagcagctgttgagtgcgaagccatgatgataaagcctactgtagccgcaaaaaaagcacgatattgttgatgctattaagatagattatgacagcaaagctacccatggtaaatgatattggtcagttctagggcaagagttgcacagttcgtaaatgtagatatggataagtggcgttggcggaccgcagtggtctcttgcggcaactatatgctattcaccgcctccatacattctgccgcagaaaatccgattttcttcacagcatttcaaccgtgaactccaatcgaaggatcaagctctcaaatccctggtccagaaaaatgacgtcgaccacagcagcagctccgcaggcctcagcgccatcactcgcacttcccccttctcaattcgcccgactccaacctcacgcctacctcctcgctcacctctcgccccccgcatcaagtcaacagccatcaattcgagccaatggtcgctcccctcagcagtttcgcgtcacttccgcgaataccggctccctaacgcacacaaatggcagtgctgtcgtgcgagtcggtgacactacagccgtatgcggcatcaaagcggagatcctacacacggaagacattgcctcatggagcgtctcacattcatcctcatccccttctacctccaacaaacgacggaaagtgacaaatccaaccggagattccggcgacaaccgtgaaaacagctcgaaagaagacgaaggcaaagatgacttctatattgaagacttcagcttactcgtaccaaatctctcgttgagcaccgggtgcgctcctggattcatccccggcgcgtcgccttctacattggcgcagtctctatcacatcagattctatccttattgcatagctcgcggctagtccgggctgaggacctggaaatatggtaccaacaaccgaacttcggagcggaaaagctggagcgtcataacgaaggtgaacagatggatgtggataccaggcaggattctgatgagactaccctggagacgcgcgagatcaaggccttctgggtcctctacatagatatcatgatcatctcgctggcaggaaatccgttcgacgccgcttggactgccgttctggcagctctccgcgacacaaaactgccacgcgcatggtgggatgctgataatgagacggtggtatgttcggatcttgtctctgaggctcgcaggctatcgctgcgaggactgcccgttgccagttcttttggcgtcttcgaagccgatgcagcggcgggttggagagcggttattattccagacgcaaaaggagacaggaaatcagcagaaggcgataggaagaataatcaacgacgatggattttggcagaccctgatggttatgaggaaggattaactcaggagagagtctgtctcgtcgtgaataaaaccgcaaatggcgaggtcaacattctgaagatggagaagaacggcgggttcgcagtggacagaggagaattaaaggagttagtggagatctcggcccggagatgggacgagataaaccagattctagggcagtgttgaactctcctccgagtacgatgtttacgacaacttcacaataaattcatagatgctccgtgcctagaataatccttagtatacacactcggcccttgttacccttgggccagtccaccattatctgcgagcctgaaactccagtaaactgcactaacgcctcccccttctagcctatccaagccgcaccaatagtgaaaacagataccctactcggatgtcgcagtagcatgcctcggactccgccgccgccttttggtaggaggttcattatcctctttagaatctggtacatacgaccaattctccttaccgtgagccgaatcgctgacttccccttgacctacaggccgggtcttctccaatcccgcctttctgggcatgtagattgaaattgagaacagatccaagtgttttgagcattcattctcgccgcctagttgcgtcttatcattgctgttctcgaggttcttcacttcactcttgtgaccggtattctccaaggaagacagacgttgattctttccatcggatactttgccagccttatgagacccttcgtcttcatctgatctggaaaagatgcgagcaaaaaggccgcggctcctctctgacgaaggtgtgcggtctttctcatcgttttcgccgtcaaccctgttttgatcttcatcaccttcggcatcggagaaatcccacatctcgtgaacttgacatttagccaaggcaagttcccatagtgatattagaaccccaggaacaaggtataagagggcaggctgtgggtggtcgaaaatttgcatgacagcaagggtcgtaaccatgccgattgtgtagccaacaatgctggctgtgaaatatgtcttggggaatgagcgagcgtcacgatatgggggcactagctccggttcgttaggtcgagcggatggtgcccagaaacgctcaccccatcctcctgtcgctggttgatagagtggcttgacgaatcccagccctttattttctgatcgtgccttaatcatgccctttgtcttgtagtataggtacaggtcaaatcgaagagcaagaccaaccatcattccggggatgataatgtcaccaagccccaacatagccagggagactgtaccaggagcctcgctaggggccggcgggcgaggaaataagagtttgatcgggacgtctagtttctttgcaacagtcaccatcaaaggagtaaagtaaacaaagtaaatatcgtaaaagaacagcgaaccaagaataagtgagccagtgacgaaagtggatggcgacatcaactgcagagtaccatagcagaatgagaatccaaggaagttggttaaccaccatggtttcgagacgaatgtaaagtaggccaccgccggtagtgccaatacgccactcaggatatccagcgcgctgagtgagcactccaaatgaatcacacggtgtatgtggacacgaagcttcgctcgccagtacagagcctcacgaagagcccagagcgctctcacagcaagtttaggcaatgggatcgaaccaaaaatccccggtagaggagattggcgtatatcagctggctctgaagtagtcacaacggagaagacgggctcagatcgtgatggcttccaggtccgcccaccgcgggaatacttacgcggaaagataaaagacctcaagactgagagggcatctttcacaaatgtcagggcaaaaaagatacccatttgtgagaaatagaaaccaagtatcttattcaataggtcggcccccgcatacttgatcaccaagtacaggccaccaagggtggcaccagcggtcaaaggaaacaccaaagcatcgctaggggcgagaccctccatcttttggtcattattccaatgttcttcgtcttcgtcatactctgactcgatggcatcgttgtcagtgtgtttgggtggtttggcagcggaacttggccttgaaagtgacgcatgcgctccaatgtaaagcggaaatagagctgatagaatcacatgcccatatgttggcaatagtggcttgacaagtgtgaactgatacagcgcctgccccaagagctccgcaagtggactgacctcagccatatcaatatcagattggcagtctggtcgtatacaaagcgcgataaaaggcgacagacagccgcgcgaaatttttattccgggtaaattgaggtgctgaatttgccgacgaagataagattctcagtccatgggtgttgtcgatggttcaaagaaaccagtccaacaacatttgatgccaagaccactgccagctccgcctcagagtccaaactcaatctcaaccgccgcgccgcctctccacgcatataggtactcaatctacatactcatttcctcaattatggcaactgatgtaacgtttgatacgagcatggtaaattccgtttttaaacatttcagactgcatggctgatctgttgcagggctcgttcacggtagaactttacaattcgcatgctcccaaggtcagttgcgttgcccaccacagcatctcgcactcgacatgaaatccgctgacacgcattttgggccatagacgtgcaagaacttcgcgacacttgcgcagcgcggctactataataacgtcatcttccatcgcattataccgaacttcatggtccagaccggtgaccctactggcactgggagaggagggagctccatctacggcgagaaattcgaggacgagattcgctcagacctaaagcataccggagccgggatactgagcatggcaaatagcggaccgaatactaacggaagtcaattcttcatcacattggctcccacgccttggctcgacggaaaacacacaatcttcggtcgcgtcaagagcgggatgaggatcatacagcgaatggggcttgtgaaaacaaataatgaggacagaccgctggatgaagtcaagatcctgcgcgcaaaggtcgtggaagcaggtagtgaggagtgaagcctccaatgattgttattcagctgctggcatttcggagacgaatcacgaccaactggcacgactccttgtacttctgagatgaaccaggaaacaggttaacaaccggaagaaacaagcacaggctagccgccctggcgtcaacgcccgcgtcgagtaggcctaaagaatgaggtccggatagaatcccgaccttaggagcaaggtgtagccgatttacaagggtttcagctaggttgctgtatgacaggatctaatcttggctctaacaagaatcttataacaatagagatgtgtcactacaaacgaaccgcttccatcaaatgtttccatccagagcagcagatacagagtgacaggattctatctaccaccccctaattgcagaaccagtgaaggttctgcgaagtagacaaactgctacggaacttgtgcagtctggctgtgcatagcaccaggagtggtatggagga

SEQ ID NO: 5058 - DNA, 3990 bp, Emericella nidulans
atgttggcacgcagtatcgcagtgccatttttacgcatggcgacgagcagcataaaatcgcagaaagtgttacggaaaaagtgagcaaggagtggtacaagcagcccctttcaacggaaatcatccctgcgggccagtggtgggatgcggaggagtaccatcagctttatttgcacaagaatccatctggatatgagtgtcctgcacagtaagtttggacttgaaaggatggattcagactgggtttgctgattgctatacagctttgtcaggagctttccgccgctttctgagtgagtggacactaaatttctatgaccagtatctcaggtgctttatgctgtatctgcgccgattgggccgctcgggcatcatgttggatatatcaatgacgactgtcttctgaatgaatgtcaaatgtcttagctccctagaggacggtgatacagtcattcctctcatctggacagattgcagagttccttggtcatgcacaagtgggttagcccagtaagtcgtcctggaaatcttctcagctgccgcgcggtgtagggaactggacgcttgcttcacagttctttatgcgcaggtacacaggtgtggatacagtcagcggccctgcaaactcaattgtaaggtcattatctcaatgatagggacatattcctccttgtcatatagtctcatcgtgcagagcgattgatatattcatttcagtaccagacagtgaaagctgggcagcttagtcctagaaaacttgaacaggctcgaatgctgtaccattgtgagtcagatggaagtgagcatttcatgcgtaaaggtggagcgcagagagcagatgatgaatgattccgattcattcaattgttcattcactcagtaacatcaggcctcaattgcccctctgaatcccctctctccctactattatttctctgcctctcctcttcctcttcgccccatcctcctccttttagagatttcatctcttccttcccctctctcctcgttcatctgtctcattgggaaaagcggcccagtgttctgtctcatttgctgcgttatccgatctgctgttttatcatctctcttctatatcatcctcccttagtattctctttattctcttaggcaagttggcttgcgtgctttcagtccctgaagggagtgtgatctcgatcctttgatattgcttcacgaaacaacagcttattcagtctcagctgtccctgtgtgatatcctttccgagtgttcaagagcatctttatcagcgaacctcatattgctcctctagattttccaccactccttgtccgcaatctagagatcgggttattttaggtgcttgtgttctgaggtaaatacccatatggacccagtccatactcaggaggcgatggagctgatttacattcagtttagacagagtctcctacctcatatgtccactacccaggcgatatatctcgacctggacgccggcagcccatacccatattcaatcgaccgcaatcagcagcacgatggcttccgccgtagtcgtggctatgcgcgaggcactgaggcacctcaaacatgtcgagaaccatgtaagaggtctgagatgttgagaaggacattgatatgctgatatgccggcagctccgacatcataaccagcccaacgccgcaaataaggtcggcaaactgagtgtggagatttctcaggccgttcaggaagcaatggcctatatccctcagtgcgacgttttcgacaatatggtaagatttgtctggctgccctatatttgcttgccctaagcttgtagcaggacgccaatggagcagtggccaaccgtgtcgcccagcagcacgcaaacggcggtcatcaagccatgaccaaccatcctccacccggtggcccgatccagcaacaagcggttgtggccctcttgaatgaagtgcagaaagagcagaataagcctgcccacttcgaaagctgcccacttcagagacttccgccacccccagcggccgctcttcagcctcatagctgggctcaggttgccggctccattacgtccggctcttctcatgaaataatgcagttaatgtcaccgactttggtgacctcttgtcctggctcgaaggagggccagaatagtgatgacggtagatctaatgacgatcttataacattcatcccttcttcaataccggtgcttcctgaagaaaaagccgggattatccgtatcttgggacggatgaacgaagcttctattgcccatatcaccgctcgtatccacgagggacccttgcaggacatccgcattgaagctcccgatagagctcgagttgttttccagcatctttcgcacgcggaagcgttctgtgaagctgacaaggaaatggtagtcagacttggctttggacgtcttggaaaaggctaccgtgttgagattgcagagatcgtcgattggaccgacgaccaccgtgcgatgaatcagccgattagagagcgtcgtcgtctctcttttgctagaaaggggcttttctcctattacaagaatattcccggcgtcctgtctcctgaagcttggaaacaggatatgcggagcattgctggcgtcggtaatatcgagcgcctttttgtctttaacaatggcaacggtgagtgggaactagtagccatgtggtgggatcaaagcctgatgctgacgctactgtagcgaccgccatattcacgagcacgattattgctcgtagggttttggaagctgtcaacagatggaaagaaacgaaggccgtctatcgaggcgtttcggtgacctactcgtctgacccctgcgaaaaggagctcattttgacagacgccaagtgtgtccttatgcgtcggcatgaaaagttccgtcccaaccatcccagttaccgtcccggcaaaatcaggcagggccagcctgggcgccgttgatcgggtgaacacacaggatatggtctgttacacgtccatgagccagtgagcactcgcttggaataagcataccttagcccgtcatcgacgggacagaaattcaaaacgtcattgataagaaagcaagatataataaaaatccatgacctccattcagaaagacggggtgcgcaatgctgatcgacggtgcaaatcaacgggccaacgtgcgtcgtacaccagaaaaggcacgagcttaatcgatgacagaggggaaaagggagatatccctctatcaaaatcaatagactcatgtgccccttgatgtcggatgcacggagaccatgaggacattagctgttgatccctggtgtggaaaagggttttgttttggtttgtttatttcttttgtcccttatttttttttacaatgcacgtacctccagctatagtttaacaatgtcgttattggtttaagcttaagcgtcaggaggtttcgattccatcggcagcggcatgaacccgagtcgtgtaactgtctactggtgtcgactccgagtacaggcgagaagaataatataataactcgagtctatgctgctagcagagacgacaacctcccaggatcgcaacggacgtccatatcacatatcacctaaagtaccattcgcttcaaccactcggtagagaagaatccatatcgagctcttcatagagcgtcaaccagcatcagaagcttaaaggctgttgcgcaagccgttgacacgctgcctcagtcaaaacgccaataaacgtcggcaagtggtattcggacagcgccagtatgaacctgcaggcgttgtggtgcctgtactccatgctaacagatatcgttgatatgcttcaccacttttctttttttgggttgcgccaattcacgctgtatttctatgatccgtggagagcacagtacatgctttttttgggtccttgcatgaatacagagtcttacttgtgacccgttttagagactccacttctacaccatactacctttcctgctagacttgaacctgcccag

SEQ ID NO: 5059 - DNA, 2296 bp, Emericella nidulans
ctgaatgaaggcatccgcagttgtttcgaagagatagccttgggccagtccatcactttcaataagaagctctccagtggcgccaacgggtagaagaatgttgtgatcggatgaatcgacgacccaagtttttgtgcccggagcttgctgcagcatcaaaatattgccggacttggaccagcaaagggctgtaggtgaacattcgacggaaccatagtaggagtatacttgggcagcctgcggaaccctgagttgctcaacacctagcggcagcgcatcaccggtgaggacgacctgcctcataccataggcatctgcaagattggtagaagtagccagactctggtccatccggatagtggtcgtcctcatctcacaagctgccttggacaagtcggctggactgctactctgcggaatgcagacacagccgccctgactcaatgtgctaaagatttcgaggacaaactcgtaggacgaaatatgtgcgcattgaagcatacgagtggacataccaagggaaatggagcgcgcaaatgaccggcaactggcggcgatcgcgccatgatcaagaagaaagcctttcgatgggtccatagggtccgtcgaaaatacgacataggcgcactcctcgaattgatgccactttgagacgtcgatttcgaggctccccagaagctcgtcggtaactggaatgacgtacggagccagatcctccaaggacatcgctctgcctggacaagctagagccacttgaagatcagcagccatcatccaagtttcgagctctgcatttactgggttcgtcgcaaggggaacgcaaatgccaccagctttccaggtcgcaataatggagataatggcccacagggcctccgactgttcgaaagatatgggaaccttggtacctggcaaaacgcccagattggtcagatagttggccaaggccgacgataggtcattgagtcgagcgtaactcaattgaagtgtctcgctcgcgatagcaatgctttgaggtgtttgcgatgcaagggcctcaatttcggcacaaatggatgtcgttggtagtcgaacttcggaattattccactgacatatctgttggatatcctggggccctaaaacgggtaggctgctggactctgagactggcacattgatcatatctcccagacactgcaggaagacctccgccatattctgtgcttgggcatcagagagccaattgttccagtaattcaacactagttgcgcttcagaatcagtagtttcaatgttaacgtagacagagagctcagcgggatcatgaatgagtcccagacccttgaatgtgatgcacgaatcaacagcatcatcagcaggaagctttcggtaggaaacacctgtgttgaaaagggatgtccgagagatcttcattgcgtgttggatgtcgaccagggagatatccctgtagaagtaattctccatatagtcattctgaatctgacgcacaacttccatggcgcttcgcgagcctgttttggcgcgacaaacaagcagattcatggcgggaccaacgacagactcgatgccagggactggcgcatctctcagcgagaccgtatagctgaagcacacttcatctgccttacacaggttagcaagagtcatggcccaggcgccgttaaatgcgttcgccactgtgatgttgttatttgcgcagaaggattgtaatttggagtatctctcgaacgacagccggatggattgaagacttttcctgccagggatattgctgacatctggcgagaggcgacagggttttaggtcggctaggtattcgcaccaatgctggatccctttttcaactggctggcgttgcaaatacgcaatataatctttgaatttgggcctgcttgtcgcattgagagtatccgcataggcgctctgaaggtcacgaagcaggagagaaatggaagtaccgtccatagcagcgtggctaagctcgagcttacatataacctttccagacgcgctctgaccgaatgtgatacgatgcggtgggcggattgcgcggtagtctgcgcgtggctggttttccagcgctgccaggatgtcctcatcccgagagcactccaataggaccggggatgagtcgtagtccttcagtacaatatgactgaagggttgacgtcgacacagcccggtagcaaacacagtacgtagcatggcatgatgctttactactctcttccatgcatcagctaaccgctggatatctggcttgggcgccgcaggagctggctcgacctcccaa

SEQ ID NO: 5060 - DNA, 6183 bp, Emericella nidulans
tgccatctctgtcgatcttgggcatcgcagcggtggatacgagagaagggtcccgacagatcgtaagtatttttgcggcagcttggcgcaagttatgcctcgggcgctagacgtcagcacctagcttaaaaatttctaataaattgctgtaaaataaaagcaaagcaaggctagacctgcctgagtccacgttgagcgatgccccctctgccgatgtgaacagcctaccttggccggggctgtgataggaggaagttatggctgcgacgagtcccgagcagcgaggagatataagcgacccaatcaacctgcgcgaccctatctcgttccccctcctttgccagcgtgaacaacgcacctgatgggtcagggctgcagagcctcttgctctgttgccttggggccctcgtataatatcaggattcaggagatggtcgtataaccatcctttgatgcattgcatccgcgacgggagcgtctagtacccacgttgtactttattcttatatatagtattttgacggttaacgcatgtcacgtttcagtcggactggaagctggcggtctattatatcgttgtcgcctccgtcgacatctggcgacgccgtccactatgtgtgggggacaaggcgcctttgcgcattatctcacgagaacgaacctgcagggtttcctcgaacgaaggtttcctacacaccctggcctaaattttcatatccgcgtaagccccaatagcccgttgttttgctgatcctactgacgcccggtcctggtccagctgtacgaagatgtctggtcgttcgacgcgcctgaagaagtaacagaggtacgggatatggccgtatgatcgatccaccacattcccaatctaacatctcataggaagaattggagtgagtaagcagtgcccggccgttggcagagcacgagctggggctggggctatgacggtggctgagaatagactgaccgtctcctagggcgatctctgaataagccagaacctgcaccgcaaactttagtggaaggctgactttcggcggcagatggagggaaggctgaacatattgacccaatcattgtcttttctttcgcattttgctgtgtttgcttttgtctatggcgcgtgttcttgtggtgtggcgctatcctgtctccgttcattttcagactcagatcactcaaggcacacttttttctcttcctggtataagttctcataaatcaaagatcgcctgaaattttgccgtcgatctatatctgcaatagcgacgatgacaaacatggagcttgatacgatgactccatcgtatgcacccgctatagaggggttcccagacaatctcctaaggtcggatattatcgacttatactccctcgttccatacaccgaggattgtcaatcccgcgcagaggcacggagatgttttagcctgtctgagtcgctttgccaggtgacttggaccgatgtcgactctggggacctaggtaggcatcatctcagccaatgctgtatggccaattattgaccagatgaggggtagtgaccgagagaacactgagctcacttgccgaactccggggatataggagtcttcatagcactcagagaggaggaagggcgctgaggtttctgtaggtcatccatcagtgcaagtaggtcgttgctaaccgaccagatctatcaaccagcgcaactcttggaggccgctgaatgtcactcgcatgatgtttgatgagattgttgatatcgttggcgcgtcctcaaacttattcgaactgccattgtgctttttccaaaagacgattgcagtagaagagggcttcaccagcgccccagtgcttaggctcagcgccgaatcaatcggtaggtgccggtttcgtgcagctacaaaagcgttcaaactaatcgaagaaagaaatcatctacattatcaagtatgcttttgataaatcacccgtcgataaggggagagatccttgggtactacgacaaacaggcgtatatcacaaatatgaattcgcgacgaaaaacagtacctggctcttcttaaatccaaccacagagtgcaaatttcaagaccgtctcaagcgctgtcttttatcaccagccgagcggtcgacgctgcagcgcaatcccctcctcatccacagcatgctctttggtaccttctttcctgcttggagagagtacctaaggcacctagaaggccgcatgcttccaattgtaggttgccttcctctaataccaccatctagctttgctgatgatcaaggccaatatcacggtgacagccgaaattgacaaaccattgcgtgtcaaccacgaatcgctaactgcagttcgcaatactgagaaccgatgtttagccatgcagccgatcttccggtcgcttgacaagacctttgatgtcttgcaccaggccaatgcagctctgggtgaatgcggggagatcgagaaacacgacttgcagatgatgaaacagttgctcaacaactattccgccacagtaaactcgtacggccaggcggcgtggtcactgcagagccgcacctcaaggattgcggcgcatattacagacacgctatcgttcaaggatgcatacatctcaaaacggcagaccgagttcatgttgcgcgactccaccacggtccgagtcataactgttgttacgctcgtatatctcccggcaacctttatggcagtaagtggcggcgatactatatggtaagccaagcactaacttgtttagaccctccttggaatgaattcattctttgagatggacgaaagtcgtcatattgttgtatccccgcagttctggatctacatcgtttgctcggtgcctctcacagcggcaactctttgctactggtggtacttccaaaaggccaagcagcgtactgagcgatcaacaacggaagcaatgatggtttgagctctccaggtagggcagagtctagattgcatagcggtaggcaggaatgggtgtgcttttggtgtctctatcttgctttgacgagaggatccggtggcggaaaatgcatcggctggattatagattgtagttggtactcagatttcaaccctcagcactgacatccatatcaaagaatgctccagaggaactggcgatcagcagcttcaaatgtccatttgcatctcttctgaccgcggcatcatcgagggcgggagtatatgatagacggtttatcttcgcgatcccaataaacttggatttatccagggcttgaagaggtaataagtatgctctcagcccgttgttcttgccgatgagaactaaggtgtgtccatcatcgcagacaaacatactatccacgtcaacgttgagtcttcgatcattgtacgtgtgcctcgccagattaacgtgcaggatgcgacggtggtcagataccatggctaaacaaggctctgtagctttcgtcacgaagaggcagcacgtagtgaagaggtttcggaaagcccagggttcctagcattaaagtcagttcggtggtgagcaaattattgggttagctctcctaccgcaatttccactgagaagtctttgttgcatctgccactataagtctcccaggccctgatggagaaccgtgaaccttcttgtttgaccattacgagaaatttcccgtctggtgtaaaatttaaaaaccgcatctgggccgccgaaccgactgagaccctgtcaaaaatcagattggcggccgtggtgattgacatcagggaactgtctgagacagagttggagcggctagtgcgcggcatagagtaggtgtttctgtcaacatcagtctcttttccttaagccgtcccagggccagacagggctcacccttcctctgcggtgtccatcaggtgttgggtataggcaaggtagatcctgcattcggactcagaccctcttggcctgtccgtaatgataaatgccgtgagagcaccatctgatgacattgcaactcgtttgatagagcccatgtggtcgtacgagactctcacaccatcacctacacgagaggacgaggatggtgtctcaacgtcataaatgacacactagaagagttagcagaagataacagtagaaacgacaatgggattacctgaaaagagtccccctctaggctgttacaaatggcgtttgagctgactgcatatgatctaatagtcccgtcctgtattcgaagaagctgaggctctggaatgcccgacccgtgatccagggcagccatgatcctagacaccgtccaaaccaggatcctctgcggtgaaaagaaaacgaggtagtcgccatctgccggggagaatctaaatccgaagccgttcgtcccgaggttgtagtgaaagctttgcagtcgagaccttgtggactccgaggttctatgtttcagccaggacagcacacggtctgggaacgaggcgtgacctggatggtcctgtggaaatgtgggggaacgtggagtagcttcttgggtgaaggtagaatggattctttttagggagagttcgacgtctttcgcagaagcccgttggcgtcggatggggtgcaaaactttgctttgcaggtagtcgagcgactctcggatcatttgcgactccttttcgtccacacgtgcgctcctcctcaggtaatcaaaccaggaaattaccgcaggcgcgacccgcggagttgagttcctgggcttgatgtaaaaatagtcaccttcttctcgctcgccacgtttgagagtaaatttagtcacacccctggtcccatggagtatatacgttatgaccaacgagaaaatgcaaccaaaggaccagacatcgctatgagtggtgaccctatcatgcggtgtagcacattcgggcgggagatagatcccttccactcccggcgcaagactcgagtattcattgtttctcactcgagtcaaaccaaagtccgtaatcttccatatttctttctcggggttaaaggcatcaaagaccagcacattgcttggtttcaagtcaagatgcagacaaaccttgccacctgaccctccatggaggaatgccaacgccccggctaacgcgacccctcgtttgtacacgatagctttctcctccaatgttataggacccggtcggtcgccatcatgtttgccgctcaggtattgctgcaggtcacaggtcgccaaggggaagaaaagactattgatgtcgtggtattgcagaattgccagaaccatcaccagatgatcatgcttttgaggctgttccatgatctctttcagcgcatccagttcgactgtgaaggattggtgtcttctaaaatcctttcgcgctatccattctggctcgatgtttcctgtccggtcacctgtcagccggagatggcgccgttcaattttgaccttatagacctcgccaaaagctccggctcctatcctctcctgcttcttgtacggcagaggacattgggatcggtaatcctggtagacaatatccccttcccttcgtaatgttatcgcgcagaactgaaactgggtgtcgaaaaactcattagcaaaaccatggaagaaggactcggcgtcggtaagagatattgggaggctctcgtcggtgagctttggggaatggcggaagtcgttatcgtggataatgaggtcaagaaattgtcgcagaatgtctacgtcgcccgagacacggatacgaacaacaacagcaaggaccttgctgagactgcggaggacacgacgtactaactccggtacaaggtcgcgatcgctgcttaaaccgccggtcgggattataattcggaatagttcttcaaggccttgttggttcacccaaaatacatctctggccgtcccattcggataaaagggtcgagcctcgtagtttctctcacgaaacctcagaagctggttcgagaagtcctcacaaatctggtctattcgctccatctccaccttcgcagaagcggctcggaatgacctggcggtgcacggaacgaagataagcgggaagatcgcagaaagcagtcatcctttcaatccaagagaggcagctgagatgcgcctaaaccgccacgttaggcccgaaaatcggttagtccaggaagaccatagaaccttctcctagtagccaccaactctccagagtcaacgtcaccacagtgacaagagtgcaagatctagcag

SEQ ID NO: 5061 - DNA, 7357 bp, Emericella nidulans
tccataagaaaatgtttttgaatagcaaagctcataactcccagttcttgaggacatttgtgagagaccgcagtgtaaactttccctggaatgtatgacctgcacgcgaaaggcggatcttggatagttcgatgtccttgtcgttgatcaccagcctatttggcttatcgggggttccggggagtataaagtatcctagaattccgatggggatggtgataattgcacagataatgtacatccaccgccagcctgctaggccgtgaaggccttcgagtctcgctgatgttcccgcttggattagactcgccgtaagggtacctagggtgagtccgacgtaaaaacatccaccccgtcgggcaatctcatcaccacggtaccaagctccttgacattgtaagtcaatccccaaaatttctttacttggatgaaactcaccgaatatataatgcatccccggaaagaaggcagcctcaaaccaacccacgaagaagcggtaagccatcatctcaccaaaggacgttgctcggtattgcagcaaagtaaagacaccccacatgatatccaagaaagggatcacccaagacatcggaaacctggtgaataggtatgcgaatggtaactggccgacaaccgcaccaactgtatacatagtctgcagttcgacaagctcattgccatggagacctaagtcttcttgaagaccagagacgtatgcattatctaagtagtcatctgttagtaaaatcctgctctacgtccgggctcgtaggaatcacatactgatatttgcctggtcgacatatttaacccagtaagctagaaatgcatacgggacaatcaaggcatcgagcttcaggataaggcgtcgttcctccttagtatcctggtctgcgaaccacttgatgtggtaccattttcgacgttctcggacggtagacatggtgttcgttgtctagatgaagattcaagctgcccattgtttattttatatgatgcagggcctgaaagctatcaggtctcgaagagcctgcagaacaaaagatgccacttatcggctcaattgcgtgagactgggcattcggcccacgtctactctgttatcagcgctcgtggcggctttccctagatcataaatttgcggctccagacgtcttgcgtcaattgagcgcggcagtatgattgggcgaattctgagctggaagcgaaaccttcgacgcgcagatgcatacccgtggccaaggatcgtgtcaggaggtggaggtaaggcgtgctcgttgccttagtgtttttgcagtgtagtaaattcacgagccttggccttgaaggacgcttcaaaccagttgttatttgatgtggaaattagctctgttagtgtaggtatccgagataatctcgcagtcaacgaaactgaggtggatgcccaccttgacccatggtgacaaaaattaccagtggcccatgccaacttgtggcaatgaccttgaggtcgaggggaaagcctagatactggcaagcaatcgtcgaaagatgtgagttgaaggttatgtgaaatggtgtgtgtggactgccagcggactccatccgttccctcgacggttcccaccgaagctgggttactcttccgcgagtgctcagtgagttatttccgtaccttcatccgactgagaaacccttgactgtccactaagttgcccagtcccttttctgtacagcggatttctttggtcttctttgctaagctgccgtgatgcttccaagatacctgtccctggctggctacgcagctcggtgcattgcatcgcaactctgacagggtgctttgtaggactagaaggcgaacttctgcacgtggtcatatttgcattggggcgaggatgccgaagtatctatcgtatgcgacaaattagtggtgttgaggcaactcggactgtacagggaagaagagagtcagctttgttcttaataaactggagatattgcgactcacgtctaaaagtgttcaatattggagatatctgttgtgtccaccgagtttctagcgcggatcggttgaagtgaccagaaggcgtggcagttgctcttagagagatatatgcccgctcgccgacggtgctgttcatgaaggttgggaaaggctgtagctagctgggcatggtggctgctgatgagcccatttggttctgcgattgccgacatgtcatagttgacaactgctcaattctccatgtaaattcgagaactgcgcaaggtcacggagcactttatactgccatcaagctagatagaactggagaacggcttggatgtccagtttttcgcaggttcggaacgtttcttatagcagaaaggatgttgctactgtacggagaagaaacacccgctattctcagaaaagttgccttaggatggacttattgcttatgacggctggcactgatgaggttggatgcagagttgttgaaagagttcaagcctcaggtacttagaactaccgggaccaccttgcagccttaagagccaacacatccgactccgactcccgcagccatataacttgcttcataagacctctgtgagttacggcttcagctctgcggttgaacatatatctaactccaagcataaaagctaattacactgagaacatcttccacgatatcacgatatcacaatatcacgaaatcagcaactggctccctgtactgagaatcacaacacccatgccgtcaagacagacgatccatcgaggccatcgacgaacagtcccttgagattatggcgcaattgcgacgccgatcacaagttgcttcttgtccgccgcatcaacgcatgactacatgcagctgcgtttgcaacttttcatatactgctctctagggctaccggattgtcatgaacatagacgcatctatacgcggctaggtatattgaagagaggaaaaggaattcgaagtcatggggatcaggagaatcgatggtaagtaagttgtagataagttactctgtgattggagatgattagagatcgggaaactccgctggtcgacaagttgaattaacgaaggaatgccgtagctgggacataatgcttaactcgagctgcggactagagtctaccgtctattccttgagcagttttacatggaggataaatcttcgagtgggcactgctctttttatgcgttgctgtctacgtccttctcctcgagcaacaaaaagatcaccttattatcacacctattatcgctagccttcctcggactcaggcaaattgatgtcattagttgtacctgtactaccgataaacccaaaccctatcatccaatagatccagcgcatgctgtctcccactcgcttccatctttagtcccgcatgcagcgcatccaacatctcctccgcatttgccctcgctccttccaacaacactctcacacgttcaacttccggctggtacggccctagcgggagcatatccctcggcaaatctccccactccagacagacgggtaccctgtacgtcttgatcacgcggctgagttgactccatgctgaggagggattcagtagcacgctgataagtgagagctctgtgaagccccggagggaaagcatgggtttctgcccgcctgacatggagggtatctgggacatgaagcgggagagggtggcacgttgggagaaggggaggtgggagagagggtttaaggaagatgttgaatgtggggtgcgtgggcgcagggtgaagtcgaccgagtacgctgtgaagtggtcggctagttcgcggtctgcgatgtcagtgcccgattttgcgttgctgattttccctgccaggatcaatatgagtaaatggttagagggcggtgcattgaagctggattcgaagtaaaaggggggtgatttgactgacatatgttgtaatttggcggagctccgcaggcttcgatgtaccgggagtatgcctctggactgagaaagccggtgtgttgaggatccagatgctggaaaagctcttccatcatcctggtaaaggatggggagggcttcatctcgtcggtaaggagggatgtccaaccccgagttgcgggcaggggcagttctgagtactcaggtggatcttgatcaggaagctgttgctgctctggatccaccattctcggcggcaaggatgtgggcggccgtctctccgagtcttcaaccacgctcctgatctccttttccgacttcgtcgggcgaggaggcatctgcggcggcacatcgctgggtgtgtctgttgggacaggccgtctgcgcgggggcccatacgcactgagagatctgctcaccaactgtattcgcggtggaggcggcggaggtaccggaaggaagccgctctgtatgtgcatggatattgaatgagacttatcatcttggtgttgcgagggatatatccctgcgacgtagcagttggcgcagagagtcatccgcggtgtacaggaggcgcatgacaaacgcggcttcatggactggatgggctcattacaggaggtgcatttgtatagagacattgtgaccggatctgggggagtacgccgcgctgcgagctacagtgctgagagaactcagcttgggatgttatatgagcagatgggtcggctaaaaaagccatattgggatggctgcggggtttctttggtgctgacatgacaagacaggccttgaacactctcgtacaaggctgattatctgtaatcagtaatagtacgcggtttcgtgtcgttatagagtatttccaatgaggctgaagacgcgatgcatagttagcacgaggtattgaccttgactctgaaaggtcggatccaaaataacttacagaacaccaccaaatcaatcgtaaagcatacttcagggaatatcaatatcttcaggttagtcaagcggagatatggttggattgaatgcgtttgttgtacgtcctagtatgatcgtaaatcatagcctagatgaatgtgttaacgctgcgacggtgacaaggaacacagaggcgccggtttagcgagtttgcccagcgtctgactttcagtacttacataattcattcagcagcatgtgccgatatatttgattgggatgcagtatccggccagtattcatcttgaaccgatgggactcagtccaacattcagcattcaagcttatttatctaaatggcatctagcactccgatgatgagctattcagatagctggttttatcgccacagaatggatcacaaacctctttcctcacttgatggaccggctgcctcccttcagactaggacaaaagagtactcgacctatgcccacggatgctccaggtggtctattagttgtcgtagacgatgagcttgtggtcgatctcctttccgagatggatatattggggaaggtgctacgtatcagtttttgtgagaaattcttttcaccggctaatctagaacgcagagacgccgactaacgtatttgtcgttgggtatgaaatggaaatctggtcgcttaatgtctgatagacgacatgacaatctatgtgaagatagaatcgacaggcaaggcagagttccgagaccaagaacggggagaatattcatcactagcgacctctttcatggcatgcatattcagaaaccagcagtcgaagcatggcctacgaaactcatatttacgcccatcacgaaacactcaccttggttgaaatatctgggccggcatagagactaaccctaaatctccacctaaatcttcgatatgggcagtttgggaaacttgactttgaaatttttttcttccacagaatatcaagtgccttgaccaaacatacatttgatgaggaggttgttgctcatatggacgactcagtgactggtttgatatccggagaactgggatcatgggggaatcttgggggtggacaatggcgatgcccgtcagataatcctgacggattgaccggagctaacgtctctgaaccgaaatttgtcaaatctttatcaaatgctagaagagctcaatgtgctcaaccggaccagctccagcgagagggttggtgttgagatcgcccactctatgcgtggaaggttcaggaagacactacccttcaggtacagaaagtagagtgaaggcagtcttccctgggagcagataatgtgcagatcattgccaatatcctgattcttcctgcatcatattgcatcaatggaaacacgcggccctgaagaggccaaagctcgaatccgaagacaggcggcaaacgggagtgatgcatacaatagctgttaccggaagactttcagagtgagcatgacggctctttcaattattctcgtcacctcggttgttttagagtcttcaacgtttgtgatagccgagtcgcagaaaagtactcattgtatgggctatatactcttcagtctatgactgacagtctgaagaaagaaagaacaccaaaatgctagctctcgctaagattctccacggttctaaactatctgatttccatattctccattgcctgggtttccttctgctgagcgacctgactgtctcgagatcgtgagctcttccaaacgtcaaatccgcgaatcacctcccagaccatccattactggtaacgcttgcctctatcattcggagcagcaaagtgatatggtgctcttcgaggacaactcctcacagcggctgggatctgcgaaaatgtctggtacctgaccacgcatggccggctgtgcaaagtttaccattcctccattaatgacgtactcatccagcgaagtggtagccgcaatacacaaacaacgagcttttcctgattggcttgagcacagcagcccacatggggagatctggtacttggacttttgacttctatcaggcggactgccgagtaccgccatcccagatgccagggaatacttggttccaagtcaagtacgattactacagcattgggattgtctttttacaaattggatcttggaaaccatcagcaccttcgtcaacggcctcgaagtttcagcgttcacaagtttgcgagtccgcttgtctctaggtgcgtactgagaatggggtctaggatcgggcggtctccctatgaatgctgtggctgcattctcacggcatgttcaacggctgttccaagtcagcagagtctggagatttccctgtggagtattattggagcgttgcgcatttgatctgtgatcgatactgaggctcttgagcgagaagggtagatatgcaggtagagttgatttcataaagagagagaattacttgctttctgggttctcacgggctaagaattgttttggtcacttctacatctgcagagatgttgctt

SEQ ID NO: 5062 - DNA, 9183 bp, Emericella nidulans
ttcaggccccaatcaaccctcactaaagggatcctcccatcgtgcaccaggaccaaggcaaggcgatgcggaggacaaagagggaagatagctggaactagatgccttatgatttcttatttaccaggcagttgaattgcgctacaaatctgagattcgcattgctgcgtacctggccggccccaggagtttatatgtttttgatgtaggccagaagctactgatatatagctcggatgtcaaaatacatatcaggataatctaatagagcttgcagattcacgtgaaatgattatattgtcaacaacaagcgaggttttatcctaaattcctgcataagtgtaaaaccagcaatcaaaagtaccagcaaagaatcgctatctcaagactccaatgacctttttttcccgcggtaaggcttatagcagtagctgatacactagctcagccagtgatgtatgtccctgtatacatgcaggatggcggcaatggaattttcccaacagactctggcttgtaaggtgagattcaatatggctatgccactcactcttatctgtatactgcatcattcgtcttgtcggacccaggctgtattccccaagcagaacgggcaccagccaggcttgacaggataattccaaaacatgattggatcgcagcggagcaagtgagttggctcatcaagatggtccttgcagtgcaaatgccagccattccgatcattaaaccatcgtctgcactcccaacaagctctgccatatcatcctcgctgagttgacgtattttcctgcaataacaacaatataggtgaagctacctgtggtgggagtcttgttttccactgctaggttagtatggtgaaaatattggcaacagaacacttatgtctccatcaattttctacagatgtatttgctgtccatgggctgcaggcatgcttgataagcaacaaactcatgctgactgcagattgcttctaatgctttgatagcatccagttcaaccaagctctgtatcgttgcctggctggcagaatatcagcaaggaggtcccgctccggcataacttgttgataatagtaaaagagcatatgttcatggatgcttctgctttgattatctggttgaagttgatattgtcttttaggctctccgagatacaacttgtccttctggccttgaattcgctgttgctgtaattggatctcacgcatgctttctgcgctgtcagtgttttcgagttgagtacttagttctgcaagctccttatcaagggcaaggatatcttcacagtcctgaaactcaaactcggctttggctggcagagattggcacaatttagggttaaaatatagacccatactgcgtcggttctgaatatgttcatggcaagacttaatattcaggtagctagcaggcccgtcgacttcgcagatagggtgtgtatatgattggccaaaagttcgtggattgacatgagaggcatatttcatttgggctgtcttggaatatttcttgtctttgatcatgtgagtggactggatacaagtctatgggtgtttctacctacctgtctccataagtgcccaccgacggcatgcatgaacagtgatattctgttcaaatccacactgtgatccaagcacagcaaactctttcccaaatgcatctgcgcctaatgccttacctgaggacaagtcaatatccagcttactagacagcctgaatacaggtttattcaggatatcttctcagaaatgtattgtagtgataatatggtttgtctggaactctagttcactggctttaactgatttcactttagccaggaggtcagtacatgatttataatcacaaaaagctctgtctgcagagaaaaggggaagcatgaatagcataaggtttcaaaggaggggaatttcttcttttagacctcataaaaggcgtggatggggagttcccaatgcttttttctccagtggccccttcacgtattgtcgttggtaagtcaaaaccaacattgggacactatccacaagttctattgtaaggatgaaatgctgcatacagttagccatgaactataataaccatagaacacagaccttgtagcaggctgccattgtacaggcctgcaagttagcatcctcatcatctagcttctgtgcgatagatcggcgagcggttgattcatgtacctccccagtacgagctgaggagagacaatagagcagaattaatgctgtaagctgtacccgagactgcttgggaagtttaccatggtattccttgaagtctcgacaccagagctgtgcaaggaggataatcagattatttggggacagtctatccctcgacatctctgcattactaagaccaagcttggtctttagatctgatatgatatactttgtatgtaagctacatcaatgattaaacatgcgaatacttacctcctttattgtaactgagatgttcccgggagcctggaagttctgttctcgagccaaagctgtttcaaagtccctgcgaaactcctcaattgtccctgttgttggcatctcttctattctgctatctgtatttcgtgcatagaactccaagaatgccttattaagttcggatattaggggggaagcaagcatcaggatgtagctcaagaaacctgaggcaggttaggaagtgggtaaggagcctggatcaaggatattcacctgtcgaagataagaagagtctgatcatacttcctggctgtacggggaagtactgctcgcttaatttccctatcatcatgttcagaaaggttaataatatggttgaacttcgcaacgaatgccataatgtcagcacaccttgggcagagtaaaagaaagaagagccttagagaactcgaggggtctctcgctttttagattcgccataatccacctggttgtcattttgcgcttttgtaagaagttagcttcagtgcagaatatttgcgtgcctgaagccgcccacaaggtagggcggcaagcaaccaacaagcagaacactaagctgggtgagcactgacatatacatgctgttgtatgtttttagactttttatagatataccttgtatctttttaatgtgaatgtgatcagatacaaaaactatttagtttagcaagggatgatgagtagggttacagtagaggagcgcggccctttcctgctggacacatagcataggtcaatagctcaacaacctcatagatatttgcgcgacagagtcattggtccttagctcctacatatactcacttacagcctgccaagtatgacttacagtgcggtactggctccgtggtatctttaagcttagtccttacctagaactaaattaggaatttaataaagcttttaagacttgagtataattaaccctaaactacctaatacttgacgaagctagctgtcagcaaatctggttaacttcctttaacaggttatactgtacaaatccagaggcaaaggccaacaaaatcctggaaaggcttgataaactttaccttcagattgaacagctgtgagattcaaaacaatatttggactgcaatgctcctggccaagttccagggcaaatcccatcaatacagctacctacagggcgtcaatgacatatccaacatgtttcaacattacttgtgtgacacgcatggccacagcgcgtccgagtctgctagactcaaaggattggaaagactagagttacaaattacaaagcaaatcgttattcccgtgccaatcttccacggggcaagcaggtctacgtcagatgtgctctcaaacgaaagcattctctagtgtctgaccgtataaccggcaatgatcgctctttgtgtagttagacttttagcaagtaacaggccttaatgctttcttgtcttttgcgagggtaggcgaggaccatgccgttgcttcattccttgttgatcatttcgtgctaggctgccgctggctggactggcgctgttttgcctgaagctcccttaatggaaatagcagaagtctctgcataagcattggcgagccggagcttgcagttccgatctcccaaataggaaagttccatatatgacttgttgtcacatacggtcgacatcatatctttctaccacgcatgctgactagaaatgttttgtcgattctctgactattctaccgaatctataatataaatcagaggtataccacggttctgaagactgtaacagaggaagatcagctaccctcaaagtaacagtgaacaacccggcggcgccaaagcttgcaagatatatcccttgaatgcgtataaatgtctattttgaagacatgatcctaaagacggggtactcgtctccttcctccaccggcacaatattgaatgaaacatacgaatcaatattctccggctccagcgccaccatcgccagcgcggcattcttttgtctcgtgcttacgcggaagctaccctctggcaggctaagctcgcgctcactgctctccgtcgtcgccgtcacgcgaatcacgccttcgtagtaggaggaatcgatctcggcggacgtgatggtcagcgcctcgacgaccccatcaaatggcttatccagcgtttcgacttcgcaaccagcgactcgaaggcgctcggcgaggtgggcccaggccggggggataagataggcctccggacgggcgcgagtgagattagcgaaggacggggtcgtggacgcgaagcggacggacgggtggacgacactaccattctccttgtcgaccatcgtgaagggacgaatctttatctcactgtagtccgtgacgacgatatcgtcggctgatttgatgaatcgctcaatgccgtcctcgacggtcgtgaaaacctcctcggcattatcggcagcagtctgaacaatactacccagcatagtgagaccggcggcagtacgacgctggaactcttgatcggcaatcccaatgccgcgcgtctccagaaggaagacgacagcttgggtcaggcccatcgcattgcgaccgatcttgctgtccgtgccggcctcggcgaagtcggcgacgattgaggaattagatacagaagtgccggtgacatatggctcggcgcggagaccagcggctttcatatcgtcggcgatatttttggcgaagagctcctcagagagtttgcggatctcctcgttgatattgaggtttttcgccgccgagaacagaccgtccgaaccgtggacgtacctccccccgccataaggcctgctggcagagtactcgtgcatgtcaacgatgacatgcgggttgaaagtgttcatgaactgtttgatatcacgcgtctgctggctagcaagtttgatatggtcgcggttagggtcaatgttggtcgcgagagtgcgctggaagtagaaaacaccgtcaggattataccgcggtagaatgacgagctccagcttgtcgagaattgaggcagcccactcggggtcgtcgtcgaatttgcccaggagggcttgtgtggtctcgtcaccggcgggctcattgccatgcacagcaccctggatccacacgcgcaccttggatgacgagttgccgcggcgaacggagctgctgtgactggccgagaggtggacgtaagggaatgagcggtgctcttgcgaggtgaagttggcggtgccataggtcatgtagtcgttgcgtccgactagttgctcgaggaattcctctaatcgtttctcagtcagtttcaatgacccggcgcacatcctcaatgctagactcacccaaatcgtcttgcgaagacggcccctgagtgccattggtgaatcctggaagtcgggcatcgggtgtcaggaaagccggagaccggagttgaatatcatctacgttcgcgaaagcaccagcaacggtttcggagtccttcgtgacaggcacatggttgtatccatatgtaacagcgcttgccagagaggcaagaccgagaatgagacccgtggtagttgctcccatgttgacgtgaattagaaccacttttgcggaccctcttcatgcaagacaggcagggatgcaggaaaagaggaaggacaaccatcgcagcagatcttccctccattttgtactgctgccgacctaccgttgcattggagttccaacactctccaaattcgcttttcttggttcttccgccccccccaccttatttcttggcctccgcgctgcctttctacttggagtaaatacctgcattgcgccagccactcgtattcagacaatcgctgtatctctccaagccaagctccggtctctccacttacttgaccaggtgggttttgtctgcggacagaccctctcgaaggcatcactctccagctgatctccgccattgcgatggggggaagctgtgagcgtcacttcagagccgaggtagaatgaggcaatgccaagcgcgacgccagcggggcgtatgtggttagggtaaatctcggcaatatagctagtaggtaggagagatcatgaatgttagttttctatgcttcttctcttttggggagaacttagggacactcaggttagggtaatggtgcatacacatattgagtcgcgtaagtgaaaaggcaccaccagaatatgtacaggaaacagaagaagacggccgtttttaggcctggtaaaaacccagaggaaaatagcggtggcgagtgtgcctatagacccgatgagcatgagtgtgcgccgcccgattctgtcgatatagaacgccgttcagatgttgccgaagctgcgcgaaagaatgtcagcaaaccattggtaggagcgagagctgagaaggaatatggaaggcacgaacatagtaaccgtagtctagcacgcgtttagcaaaagagtggaacttccttgtcccagctgagcatagattaaaacgccgtagttcgccataacatagacaccgaggaactggttgccaaacatgagcaggaaccctatgaatgcccttacggttcggcaccgtgcgaaacagttcaaatcgtcggttaggaggctagcatccagttcatactgcttttcaatcatggaattcctcgcacgcgcggatatgctgcgcgtttggttttgtcttatgtagattgcagacgatctgaaacacctcctcacggcggccttaggaaaggagctaacgaggggaataggggataaatttctggccgaggaggaatatcagggaaaaccgcattggaaagccaagtggaatcgccacgcggactgcgcgtgttcatcagttcgaatataggaacaggcgtacgaagccaccctgcagaacagtaaccaaacacgtacggtatctttttcattcacaagccttgtcaggctattggacgtcctcgagaagctttctaatggcttaccccagtaatggaaaccattgcacctcgcgtctccggggtagacacttcggcttggtacatcagaactacatgaatcaatcaggagtcccgtaaccccaatctggagaggtcaggacgctcaccaacacaggcaagaataccgaatccctataaaagtcagcctgggctcagaagctgtaagaacgctggggcaatgagagaactgccattcctgcaacaccacgcccaacaatgaatatggcgagattaacagccccagcacacagggccccgccgttaatgaggataagacagctaataaccatagtccacttccgaccatacttctcggagcttcagacgtcggtggcacagccgataatggcaccagcagagttgacccagttcagtgcggcgataatatttgctgtgtgtccataccccagtgtaccttgcggggcgagatcgaagtatttgtagaagtttgactgacccacggttgaaccaatgattgaaaggccatatgctgttgcaattgtgccgatggcggaaaagactaccccccagaggttataagcattaacgattatgcggccaagcattttagaggttgaaactgcaatctgagctgaaattggtacgaacgtccggagatttctaggctggcctacggtgctactgggtcccaactcaatacatccggtggaagtagactggcaaccccgttgaggcgatccatccccatgcggagttacgagggcaaaaatcgcaccacattcccgcaagattaccaatacgcagcaaggccccataaccgaagcaataaagttcgtttaggatagttcgggacaagagattgtgtactcccttcacactgacatgtttaagctggaggaatgctcgtctcatggtgctctgcctggaaccgtatattcatgagaaaaggagtatgttttggtggtaatgttagatgtaagtgttgggtaagtagcaaaccgagtataattgagaatacaagagtagttcccatagtctgagtggaattggccaaaccccaatatgtaccgcgagtaagtcgggctaaaccctgcgccccgcgccatacgtctcagacgacaattgatttgtattagtatctatcacctcagcagcggagtaacgtggcgtagatgtggcatatacgtatgcacttcgctcctttaatcacgcatgaagcagacccataatagcatgatccgtccattcccatgtcgaccactacttctccatgtggtcctcattctgcagcgccaggtcatccatgatggtgaggacctcgatattccgtggcggcaccacaccctacagccggtctgtcgtattgtcctgcctaaaccccaccaggaatgccagaggggtctggagccgtttgttcgtgatcatgccagagtcatctaggaacagggccttcattgagccctgtgtttgcacggcagggcgaaattggtcgtcaattgcaagcgctggagggtaatcggccataatggtcaagtctgttagtgttgcccgagccctcgttatcgcggcagatatgtggcccagatcgattatctgcgtcgtgaggcatctccaacgcggctatcgtggtacaaggattgtgtcttgcaaggtgctaccgagctgtgactcactttttgtgtttccatgcgcggtttctctcattaattgcgaccatgggtctgcaccgacaggtttgctaagctctcaacggactgctgactcccttaaatgattcaggtactgaagtcattcctgtgc

SEQ ID NO: 5063 - DNA, 2974 bp, Emericella nidulans
gaagagggttcctgtgaaattcgctggcagtgggccttggattcattagacagatcggattcccagtggattataaaatgcaatgttgtgttactatccaggggaaccaatgctactatctgcaggtcggtggagagcaaccgagtaccggataatgaaaaacttacgggatgaaaagagctgagtgcgtgagacaagcgtccgtcctcggattgattgggacgatgcagcgtgcagtaaaccacgatccatgcgttgatctcgacgcaacctatgctccgaattccggaagaaggtgcaattgacgaagaaggcactcttgtctactaccaggtccacggatgctgggataaatcggtaaaagctgagttctcgagaaaacttcgtgataagtttcgactgcgtccgagttctcaatcaattcttccacaggttacagagaagcatgtccaaatgccgggctcgatacggttacacagcagagtacgggaaggtaaggacagaataggtgttcctcgcgataccggaccatgatggcgtgtagtctttggtgttagagatctgcttgagctgctagtctcaactccctaaccaggaagcgaacctatgtctatgcttcaactcgcgcaaccgagagcatcggatcacccatggtcatggtcagtagtcctaggggatatcttcttcatgcctgtgcttgcaatcgagctcgacgaatcactgacaggccgttatcggttggtggccatgatatttgtccgctcagaagctaagagggatacactacctctttgccagtcaatcaattctgtcttgagaatggcttgagaagcagtgattggttaacggcagtgtaaccacctatcaggagcgttgtctgtgcaggtatcatggttcggtccatgacgttgagtggaggggagcttgagcgccgtacagtcccgtcctttgtgaagccgttggggagactgacttcgtgacgtcatccatccccgtttccttggaaggcgccattaatattgctgagacagcagtgttcctgtctcagatggcgaattgtcagcgccggtaggtatgccgaccgggtcatcactctcatactgccagtcatccataagtcgatccccagagagagtatataagcttgtttgcgccagtggaaacttcactagcgagccatgtagctcagacctcaggcaaagacctggggtacagactcaattgaccacctccggctccgaatatcgcggcagtctacatgccgtcacttacactctctacctgcgaccagaacagtatgaggaccgctgatcggtacgccatggcccgcaccccacgataggagccccgtttctgcatcgcgagagcgtctgtggcatcgaagagaaagagctcaacattccttttcgagttaatgactgttggcggccctccttgacggctcctaacttgggtcttgagccgccgatgtacatctgcatgtattacctcgacggattgattgatgcagaggactcgattaccctgcactccgttcactacaacggcagttgtctaccaggatgtccaatatacctggctttgaaaccggatgtatcactaacatatatcgcgatctatgattcagcgatgctggagccgatagataaatacctgtccgaaatctcatcatccccaaacacatcatccccaaacaatgctgtggttggacgggaggcgctaaagattcaaggatgaaggtctgctcagcgtagagtctagacgcttttagtctggaattctggaggtaccggtgggtcgaggagtggagactccaatgaacccacagttatcacaaactgaaccctcctgtcatgatgggtgcttgggaattttggaactggccagacacccggctggttcgggaggagggaagggggaggagcaaaaaaagaggggaggagaggggaggagagcatggacaaacttgtctctcatccattggagggactatcaatattaaaccttccaatagatttccggagaccgaatgcctgcaacctgtagttagcagaactggtgcaagatgatgctattcccagatctgagagacgggaatgcgaaaagcaaagccagtcttgaaaagcctccagagagaaaatccagggaaaaaaaaacttgaaaaggacgacgcacagctgccttgattcctggacagcagcggttttagactccgaggctctagtcccgacgcggttagccttcattgttcccagacatgcacgattgcaaaagtgcagactccaaactcagagtggaccagccagaatgccccggggggccggagatgcagccatgaagatcacctggctacctcgcgagtacctcgacgccctgtatgggataagggagcagaaaggtagagaagtaaaagcaatgcactcttttgcatttcgccgcgatatcggagagacagtatgcagttcaagctcaccgctggaacagcccgagttttcagggctcggagtaagctcgctaaatggacgaaactcgatgaaatcgatgaaatcgacgaagccagcgaatagtgaatgctccgaggagttgcgcactgcaaggcaaaaagtcgaacgagagtagactatatcagagattttcagtctcagctcattgctcaacgtgcagtgggatcgtgcgatcgggaggcgaaagcataccgtggttgtacagtcatacctggtcttgaccactgggccgccgctttggggccccgggggcgttggatggcttgatgggtagggatcgtcccaccgtcccagaccgttcgatcgcctaatttaagttggctagtatcagaccagccgccgaaatgaaaaaaaaaaaaaaatcttatcagaatctcgaaatggctgaccgggccatcgcggcatcggcgccatcgtcgttcagatgccttggtagtcttgaccttccgaaggtgccgtgaagtgttcaa

SEQ ID NO: 5064 - DNA, 3408 bp, Emericella nidulans
caggcatacaatcagggtagctttatagctattattcggacaggttatgatctctagcgggcgtactagtactactggggtctttatagtgacaccaccgtgcatcatggctccaatgccggtgccgctggtgccgttaggacaattttgtcggccgtcgagcacaaggtctgctgcataaaatgcctgcatttagactatggcagctcctatggtgggtggttgaagctggatccgaagcgcggcttcaatggctgcgcttgttgtagtctggctgagctgggctttgtctcaggaagcaacaatgagatctagatgcgaatggcgtttcggtttggtttagtaaggatttccgcatggtctaagtacgcctacctgtgctgattgccatccttgtctcgggcaagctcaatctgcccagcggtccttggttcgaggcgctgaagcctcatcacttagggattttactttgccttctctattacgttgaattgaggagacgataggtatggccttatgttgctggttcacccagcagtctatgcctaggcagaaggtacgtaacagtgaagggactattcatggctgttgccgtactgtgggaatcagatatgacagtcatcttgatatagatgatgcccataccggcagagtttatattgtcaacatgtatcgacagacccacgcatgcctctatgcaataataccgtaggtctagggaccgcattgaagtaatgcctggattgccgaaaactgtcgagttctttgcttgctcattgcaacagcggtagggttgggctacggccgcgctacggccgcgagatccttactcgaaatgtctgctatttgtggatacggattctcgttcagatgacacctcagtttccatatcatcaatctggagcctcgcatatttcgtttacttgtcatctctaaaagcctgggagctcgttgactacctgggacaattctcacggcccgcgatcttatcctcgagaaccttcatacatagaatagctcatcgctttttagggaagacctaaatccacttacccgaccaaaggctgcatggtaggctggatttaaacgccctgatcaggagcacgtcgaactcaaactacaatatcgacattgtcaggagcggtcgacgcgacctcttcgttgctgaacgggtaaaagtaatcagccaagcatataataaacggcagcaccgcagtatgagaacagcgtcgaggcccttccagggctctttgagcccatgcagggtagtacggataagcaatgaaacgcccgacagcagggtcggtttgagcatacctccgaaccatgcgacgtcctgatcgttccatgcattttctaaatcaagtacatcaacggaatccgcccttttggcgtctcttgacgtacatccctcaaataacgccgcaaatttgacccccatatatcctttatatatcttgaacgtatcgacttgtagttaagctgcatttcctggtacgaaagatatagagtgctacttgtcactatgtacgcttggttatacaaaccgtcaagccaaatggcgttccgtatactcaaaactacccttagtccaagactcttggctagggtcttccagcaaacccattgctatctatatagtcttggtctacgaatgaggaatttccatgacacatcgattcgtttgacgccaagggatcgtcgaagcctatcgcgacgtccgatcttatttcaacttcttctcgaactatagtactcaggcctccctgttgagtttatactatctcccagtgagggcccgtcgcggtcaggaccaaacagccttcgcgtacggaggagtagtagactagagggcgctcccccaccactacccctgtgagcgccgatacgacatgcacgttcgtgggggcagttcggaaaacgcccaaggcgagctttactcttgataagtctctgtactctagtactccgtaagcagggtgctccgtagtggcggcgtgaccaagctgatgggatttatccacgtggagtgtatgatgcatatccccacagagctagtctcgaacacctctactttgcggagattctagagctctgcaatctggctgctttgagtctgagtgctggatgccaccgtggataaaattctcgtttttccgtcacagtgacgatggaggaactcggcgagggcagccgcgccaagatacggtagagaaggcacgcgactccagatccaagctgaagcgtaaggataaaactcggacttgcgtgcgccgttcggtttcggccgtcaagttctgggtcggaattgggctgatgcagcccgattcctattctgcccgacttgctggcggaaacatcgggagaaccaggaacaccagcaatccctgaggccggctgtgattggccggggcggttcttatcagcggaaaatccgcaatttcattctagaaagcccagattaggttagactagcctccgtggcccgctgtggcgctagggtgttatctacgccctatgataacggcccaatggcggatgattagcgttacctgaaagaaaatgctgataagcagaacgctgctggtgcagtgatggggatcctctggtctgcgcgaagggtttgttttataccgacaagagcgcgctgacggctcaagccctcgctgtctatcagtatcggcacgatagtttaagaagtgctgcaccaactgctatctctatcactatcgtagtccaggaccgcctctaagcataaatagaagtagtaattcctcgcgagccattcgcgagcgactcagaagacagagcggtttcggccttacgaagtctggtcctcgtttcgccaaggcgtcccgatatctggatgatcgaactggtagtggcccgtacggggcgaaggcgatacgccaactctaattattactgagtgaggctattccagcaggtatcgaccggtggatatcatgatcacggttcacgatgcttgaaagtcccaactgtacgggaggacgaggccgagtatccagtttcagcgctactatcactgccgaccaacccaaacaatggagccaacactggagccagcaatagagccaacccgagaagtcgcgagggagtcgacggggtttccactacgactgcagcggaatcaacagcctgttgcctgggttgccactctgacgcactcggacggactctgacggattatgggacagattcgatgatcgttcctcatggcagatggacggagcagtcagtgccgggaagactggagttcgccacgggtccggaaaacgaaaatattgatatatggagtcagtagccagggcggccaacagaggacgctgatttggatattttctgaatcttttatcccatttgatttgcattcaattgacctgcgag

SEQ ID NO: 5065 - DNA, 1903 bp, Emericella nidulans
cgtacttcatctagaaactccagctctcccgatgttcggccgctctccttcgttgatctccttaacactccctaccctcagccaggtcccgctccggttcatctgggcaattctcatcttcgatcttctgtgggaaacaatgcatccttgctgagtcataagcagacctttgatatgtacctggcgaatgtgaagaagacggatgatcctgccgttcagtatgaatttgccgttttcatggtcaacgccatgctagaaatgccggacgatgtattggaaggcggcaagccgtcaatctcagttgagaaaggcaaaacttccaacgacattactcgctcccatctcttgaaagaggccaaatcgattttgcagggactagccaaccgcagttatccttttgctcagtactacctagcggacggctatgcctcgggcttattcagtaaagggaaagaggattacgaccgcgccttcccgcttttcgtagctgcaagcaagcatggccatgtcgaagcatgctaccgaactgctttatgttacgaatttggatggggactagggttgaggcttcaagagcccaacagttctatcgtcaggcggcctcgaaaaatcacccaggcgctatgctccgaatggctaaggcctgtcttgcaggagacatgggattgggcaagcgctatcgagaaggtatcaagtggttaaagcgagcggcggaatcatccgatgctcaatacaactcggcgccttacgagcttggactccttcacgaaaccggttacggagatgatgtctttgtcgatccgtcttatgccgctcagctcttcaccaagtcggctgatctaggtcatgtagaggcctgctaccgtcttggggatgcttatgagcacggaaagctgaattgcccaaaggatcccgccctaagcattcacttttacactggagctgcgcaaggcggtcatccacttgcaatgatggcgcagtgcgaatggtacttggtcggtgcagagcctgtgctggaaaaggatgagttcgaggcgtacgaatgggccaagcaggctgctgagctcggtgagttgtctgacactgtttataataattccggctaatgtaaaacaggtcttgcaaaagcacaatatgctgtaggttacttcacggagatgggtattggatgtcgacgtgatcccttggaggccaacgtctggtacgtcaaagcggccgaccagggagataccagagcggtgcaccggatcgcagcaattcgagctgcggcggacggtgtcaacccagcgcaggccgctgcggatgccaacgggaagaagcgtaaaaatggtacgtctccagttttgacttattctactaattctaattgatgaatgatccagatggcaagaaaagattcggtattttctaagcctaccatgacattagcaatttacacagcggacacaagcgacatagtccgcgatggttaatacataatacacacgatttgcacatgtacgggcattggtactcttatcttactgaagcgagttgctatgcatggatttgtgtggccgcatttgggagggcatccggaccatgtttatctttaccagacgaacatatcctctgcacatagttcgatgtgatatctcctcttctgtgcgattaccatcgtacaaatagtacacatctttcgagggttcaaccagctgaaaccctgatcttccctagaatgatccctggatgtaacaaaggcctgctgttggctgtcaggtatagcagtcgtcatcatggcagctttccccgcattctctccgcttccgtccattctccagattccattgctcgctaccattggagacggtcctatcacccaaactacccgacctatcaaacacacactcccttaccgaaggct

SEQ ID NO: 5066 - DNA, 8486 bp, Emericella nidulans
ggcttacaagtgacaacttcggggacgttggtgagcggcctgattgagcatcacattggcgggggtgcactaatatgcgagttgatcaaagtagtggtttcggtcgtggtcaaggcgaggtgaaagagtccctggcgggaagaaggaaagccgaagaaagtcgagccttggaagccccgcagtctgttgatcaccagcagggccatttccagatgggacagacccttacaccaataacaacaagggtaacggttctcccctcctgaccctcagcatggtgatcagtttccatgttgtcaccattgctcacggcattattttggtctgtgcttgcgcgattgggtgcgtcggatgatcgagaattgtcagaattagcgaaccgaaagactctcataaagtttaccgggcccggtggtcgttcgtcttcagagttattatttgaatctccagaagatggctgtccggacgttgcgtttcgtaaactttgtataaaactctcaagggagccgtcaaaaccgtcattacccaaggatggaatattgggtagagctggaccggctccacccgagagttgtgtagcaatagcagtagctgctagttgaagaatgcgggacaacggggttttgttcttccctacgcaaagcccttggtggccgtgctcgcagtaaacttgggaaatgccgagtactggactggctctgggacctaagcataggagaggcgggctgagagtctgctagtgcgggctccacagaattaagctcgtgcggtgtatcgaaatccatctgagtatcaaggggccccggatgaggaataaagctgaaaggatcggagttgtgaaagctgtaaggaggattctcggtgtcctgcgcgggagtcgaatcagaggaaggcgggccgaacatttgggcaattggagtcggtaaagagtgtccaacacgaccaacacggcgtatgcggagactacgccgccaaccccagccaggttcagctgaaccatcggtcgatggaccagaaggagttcccaaaaagccgttattgtttatggctgcatcactccgtggaataaagtagggcccgcgaagcgagcgtcttctactcccacctcttgagctcaaagaagcgaatgggctaaaccgagcgctgctttgattaacctccgatctgggtatggtccttgaaacaactccatgccgatgagcgtgaccctccgcaggagtctcttcttcgctgtttaagagtcctcgaataacagaatttggcagaatccgagatccaagtctcgacatcgttgagtgtctcctagccacacgagcgaagagcgcagattgatagtcctgctggctggcgtcgtcttgtgacccggtttcgtcctgagtatttcccatttgctcttcactgcccaacatgctggagtgcgatattaacgattgcaacgggtcaactagaaaattcgtttcggtggaatgagtcatctgcacatcgttgttgtctatctcctgtcccgcctgaggactgaaagccccggcgcgctccggattctgaccgttattcatgttttcatccctgttacggctgtggcttcgctgtcgaggtaaaggggattcggtcgggaattggtggcgatgttctcgttgagtggaggaatactgtcccatagtaacatcagcgtaggggagggacgtggcaatgggagcttataaaccacctattgccatccacaggaagatgactaacgtgatgcaaaattagtataagttcaatagcagtcaagtcggtaataaggaaagaagcgagaatgtcaggaacaatatcgaaacaggagtagtcaagtctgttatggagccgatgacggaaggccggaaagctgccgaattgacgccactagtactctaacatctttaatgccaaaatttaaaccatacactcaccattggggtagttcaagccagacgagatcccaaggggccagcacctaatttgtgcctcagaaatattgcagaaagcgttctattcgttgttcgtcggttgcagccggcggcctgaggagtcgggcggtaggccgcacagtcagtctcctagttgtctgtgcaagcgggctctatggaagactgcagcggtgtgcggttgagctggatagagtcccagtaacaacggttcgcagggataatgcacgcgagaactcgactcgactcgaggtgatggatgaatgaatgaaatggccgcaaagcagttgccagatattcggccagacgcgccgaggggacgacgcttacaagaacaaggttcaagaccactacaatagtgaaaccgaagaatcgagaaagaggacagggcgcggacaaggaaggtgattttagtgagtaatggtggaggaggggtggaaggggaagaaggagtgaggagagaggctgatggcagaagatgtgacgacgttgaccaaggcaggtgagcgtgagcgataaccgcttctcctaccggccgggtgctgacaagctgtgtacaaaggactaattacacatagtacttgggctggtaataattaaatcttactggacacttctacaagagtctcagatgtcactttctaatggttggttatattgctggcttgaggaatataaatagcttgagaagtccaagctcgtagaaggagtggtcgagcatcatagacaccggattccgtggcggtttcggattcggtttgatctcgtctcaaccagatgggacgtttgaaataccctattagtaaacggtcctcggtagccacagcctggatatacgacgctagctgttttcggcgcggtacctggtaatcatgtgacctttcgatgctagtttgccttggtgccttggtagccttggtgccttggtagccttggtgtcttgatgccttgcaagaaaatgtatcaggctatcccgtggattcgagttaattttccatcaagtcctcacgtgcaatttaaccagcggcttcgttcttccatattcgtgaacgcgcagagtgatattggaggatagagtagattcagcaaccggatgatctgaaaatatttgtcaatgattctctagtcgtgacactcgggaagtgttcagctcccgagggatagtgaatctatttttttattgctgtccagagaaatcctcatggcatttgttccctcagcaacctctttctcattaccacttccattatggcagcaaaatcccagccttcgggccgcccggtatgagaggaagcgcaagaacgaatacgacacagaggaagacaatactggtcccaatggtggcgaggatggtgaaacaaccgatggtctatcagaattcgggctcactagctcatccgtgcttctatcacctgaggaagcgcatcagtaccgcatcgcaggccttccattcaatgaggagctaccagatactaagtattttccgcacgctccggccacggaaaggagccgtaaggtgaataaacgcagttcaattctaaaagaactctcagctctctcgccgccgatatatgtgccccagtctgcagctcaccagggaaaccttcggctccgtcatctcgcggtgctcacgtctgtgctacatcgatgccttctcgagggcgactatatccgcgcagggagggcatggggtttgattatccgggagcaattcggtggcaactccattgatgtccgtactgatgatcgatgggggattggagcagaaattctactacggaaagaccaccaattgtctgaggagctccctgaaggtgaaaaggccgacagcggccgaaatggggacgtcccaaggcctctgtttaccaggaaagggttcgaagatgccaaacaatattatgaaacgcttattattcagcatccataccagaagactgcgcctaatgccatcagcgcattacacttctatccggctatgtttggactatggatatacgtcactcaggaagaaagcacgtgtgcacgaagggcccttgaggaaagggacccagcctcactgagagagccctgggacgacgaagaggccggatctgagaacgacggtcaggatgactggtggaatagatatcaaaatctggctgctggtatcagggcaaaagaactggccgaagccgagaggattgctgcgagaatggatggtattcttacctcgccgccatattcagacagtcccgaattgctcgaactgcggggtatggtctctcgatggattgctgatctgctcgtctccagcttgccttctgcaaagagtgacgatgatgagtatgacagtgaccacaacgtgagtgtcgctgatggcgacgatgacgttttcatgggcacaacgcaggccgatggggttgaggcgagacgggagcgacggatagccatggaaaagaggcaggcggaattgactcggtcccaggagttcatggaaaaggctcaaaagaggaagcgcggagtctcttctaggctgaacgatctgcatatcgaccgcgacgtttttctcgaatgatacggctggggatctaccgtgtacgagatatatctagcttattcttattttcgctgcaagttccccacatatctataaaaatgataggcttgtataccacctgtaaatactttctctgttgccatatgatattcctctgaaactgaagaattctactaggcgttcgctgccctacgttgtggtagtaagtggtgttgagcatgaggtaagctcggccggcccgcgtgcctgaatgtccaaacgcgtctgtgtcttcctatgattttccaacaccgtccgtccaaacgaacgacttcaaattatccacaaaggtccaattgatcctaaaactgatcaaatccatgatttttatactaataggaattttaccacgcattatcggcatgccatctgcctcttctccccgcagtcagactaaaatactctaaacatgggcgtaggggactatgtgcactccaaggagaaccgccagcaccagcctcgcgcaattgagccaggaaatcagacaaggcgggctctagctgaacaagccggccttgaggccccttcaaccactttagttgcgcctgtgcctattccaggaaaccggcaagcgccaatagaacgatatgacacgccgttcggtgaccaggcattcatagagaagcccgttcatagagatgcctttgacaccgacgtggagggtattgatgagtcaactattgctgcaacaagcgtgatagggaatgatgatgtcacatacagattatcgcctgccgcccggctggatgcaaatgcaaatgcagatatgaacatgtttgggacggtccggcatatggatccccgacaacacccacaacaagaacaacaaccacatccacagccatcaccgtcaccaacccgtcagctccgcaccggtcgccgtgccaatgagtctaagtggtacgagggcctaggtgatagagcgctaaggtcagcgggcttggacttggacgatttagaagcagcaagccaaactacttctacagctggcgatgacgagaagtcaaacgacacagacgaccagcgctttgtacctaggtaccgcgcaacagaagagccactcagcagaagacttcagaacttttggacggctagtcgcaggacgacatatcaaaacgacaccatcggacaagaagagccaacgaaaacccagtcctttattccagtggcttctacggcgagaacactacctgcggatagcaggaaagtcacactcacacgcagtatgaccacaactcccaggaccaggtttagtccaccaaagccgtcccttttggaccagctagacttaacccctacgcggcgtacccctggtatcactcggacacattctcgaaaggacagagaaagaaatacagagaaagaaggcagcagaacagctgacgacactatccgtgccgcagacacaggcctcagtctttttgcagacaccaacaatcaccgcgcagggacagatgagagtccccgatccctcaacgccttcgaactgaccaacttcgacgaccttgaaaacgactcctccatgaacgaccccttctcgcgccgcgcctcaataagatgggtcggaccagctgaagcagattctccgccaacacatacacacaccgacacaaacatgaacatggtcaccaagacccctcttgggaaacgcaatcttgaacctgactatcccccggaagttctctgcactaaaaccttcagcgaacttcaagccgaaccttttgaccgcacgcccaaccccaaagcatcccggcctgccgcagagacccagacacaacccccagagatgggcaaagacgaagacaagatagcatttcttctccgccttacggaacaggagcgcggggaatacttcagcaaactctcgatggacgattgggaaggctgcggtgacttacttattgaggagttcagtaagctgatgacaaagatgaaggaattgcggcatgcacggcggaagacggctgcaatttttgaggcagaggtgaagagacggcataccatggtcgaggagcagtcggcggagatctcggcgaagtttgaggaaatgagggcgggtggtgctgaggttcttcgtgggcgttcgccctgagacaagctcagggctttgtagaaaacgagtccgtgagagtaaatatttccgtggactcgtcatccatggttgaaagtgtggtgatttgttgctacaaagtaggggggtatctttcaagtccatctaaagcaagactttctgttcaaacaacccattctgttctctctggcgagcttctgcggatcatgcaccacgctactacagtatgccctcaaccgcttgctgattctggtgatctgatcgcttttcattcatcgagaagttgccacattagcatattactgttatcccagaattcctatacacagagctatgtatgagtgtccttcatgtgatgataaaatggccgacttaaagactattaggtgcgattcatctatcgttgagctacctaggtatctactcaaaagcattaagatatctcatcgtagaagcagattacacatgactagactgcttcaactccaaagtatgccaaaccataactcctcttgagcaacagataacttgatcaccgaaaccagcagtgattcaggaataaaacagctactaacaatttgcagtgcgcatgggaatatcgccaaaccgtacccgcattaaacattgctcctttattaataggatgccggaattgttatttgagtgacgagccttgtttcacaagcgctgcagagatacgtttgtaatcatcgagcaagacgcttacatccccaatagtaagctcatttgcagtctggatatcgaggaaacgttgaattggcggatcaatactggcgtcgcccgccggtgctttcgtccgagttggaagagaagatacagccggcgactcgggagtgccacgactgaagcccctgatcatccccggaatatgattcaaaggattaatgctgcttccaaagcttctgacggactccagcgtcggggttgccaacgcagaatttgtgctaggtgttcggccttcatcttttgacgtgctcgtcgctagtgacgctctggagctgccatgtgtgcgcacgctgtcggtactccggtcacggggagtccgctgtccagcaactagcccagtgaaagtatcttccgccttggacccgatgcgtcttagccgggacggctctgtggcaggtgtctccctcggcgtgtcctctttatccggagcactgccacctgatgcaggcgctgtaactagacgtctagcctccgccagtgttttcggtagtacagggcccgttataccatctctgcctggcagttggttggactgcagctcttttaaacggccaaacaagaaattaaagctgctgtctagcgttgcgctgatgttcttcagtccttgatcggcagtgctacgaacagcgtcattagcagccccgagcacctttgcaggaggttgcaaaaacgtattcagtctgccttgctgggccggtgtcaaccccgtcagcgtctcggacggttcgcctccaacaggttttgaaggctccgcagatgcagttaccgtagaaagagatgatgtgggctcctgagaagcaggttgtggaggacgaatgctctcagcaagtgatgcaggttcattactgggagccttaacacctccttcttgtccctcctctgcgcgaagttcggagagatccacgttctcaagaaagctgattgcagcctcgagattggtaagacagtatgcggtttcgccgttaaccttgctgcttgttctaaacctttgaatgaacaaaaggttgcttatgacgttgatgccctcgggcgggcaagtgaccaacgtataaatgagggccggtagaatctcgtcagcggaggacgacgaaggtaatagcttagttagggcatcaacaattgccttgtgcgacgcagcaaggtgtcc

SEQ ID NO: 5067 - DNA, 4055 bp, Emericella nidulans
ccgcgaattgcacctgaagcgaagcagccgtgtagaccaaaccgatcgaatgagccaagtcgcccctccggtagaatgatgagagatagagtacctttggagtcagcacgtcctgacaaacataaattatacaagctgaccattcccggaagcaacccgcccttggcgattcccaagagcgcacgcactgcggcaaagctgccaaaattgcggacgaacccgaggcacatggtgatgatgccccagactgccgtcagcgctggaagccatattttcggtgaggctttcttgatgaccaggttgctggggacctcgctataaccacattagcggagagctgacttgccggtcccaaggataggtacctcaatatatagaagagataaaagatcgtcagaccgatgtcgtactggtgatttgtgatatcgaggtcatcttcgaggccgagaatcttcgcgttaccgacgttggttcggtcgagaaaggaacaaaggaagagcagtgctagaacaggcagtattctgagacgtgagaaggtactcgggcagttcattataacagtcacgatcaagaacggtcacgatctcgatcacgatcccgatcaggtatcgaaagaatgtgtcgagccgggcaagcacttacctggtgtccagcttgaacaggatcctcctggccagcttctgatcagcatcagcgtcgccggtcatgctgagcgagtgctgcttgacatagtcggccagttctgcccgaggcttctcggggtccatagtgggaatcaaaggtactggtcgtaggtaaacaatggacgcggttcccgcagcaagacgactgagacgggggtgaggggaaaaagcaagggggaaataagctgccgatgggcaagctgacctggtgaaggaaaaccctcggccatttttctgttcgccgatcagtagcggtgcgttcgcctcgacactcgaggcttgatttgcttcagctgcttgatttgtctgattagcttgattagcttgaccccgcatttgagggcagccaagcgtccgccccgaactccctaattgctccccagattgcttgctccaaagccaagtgggcgacacgcgggacaggcgggggaagcacccacgctggaacccaattgctagccgacaatcgctaatccggactcacttctgggcgccgacggaccgtcctctttctgtccagatctctgcttgccgtcctgcccccataataaccccaacaccccaacatgaagcctgggcacatgtcggcttgttccgctatgacgagatcgatcgaccaacctggaaggttgtcagtacattatggtttaaattgtcacaatagtaagccatcgctgaaactacataggcagcatcgaatctaccgaaccttgcacccaaaataggtcagaaataggaaaatgccaacaccgtataaaaacgataggaacactatacttcgtagtactaagcagcttgttattccttggcgtctttcccctccctgtcccgctcccgaaccgaactcagctaccagatcgtccccacaaaggttcaatcgaagcatacaacgaacgtgaatcaaaggcaaagcgataatacccattccaaacattatgacaacaaaccaggccgatttttcagcctactctgacgcctccagctcttactggcccccaggctggaactttgcgcggtttgcccgcgctacacccgcagacaacgccacgctgtccgatgaagaacgagcgaaaatgcaggccgggtttcgcgatgtgctgggtgaagagggcgtcgctgaaatggcacgtgtggtgtggcaggagcagttgcgtgtaatgagagccgaaaaggaaaagaaaaatactgcaggacgcgctccggcggcggcgccgccaccgccagagtggttgaagatttggcgaaagaggtatcggagcccgagaaagaattgggggtttgtggcgctctggactgctgcggctgtctctgcagctgagcggatggtggattcggattgtggctttgagggcgtggaagagtttcagcggagggtgtctgaaatcgtggggattccctttgaggcggctttggagcaatgacagtcggctgaagaggttgagaatgcgcggaaggcgtttgaaatccgatgggattggctagataacgaagaagaggagaaaggaagcagagaggtaatggcggaggacatgaccaacacagagctcattgagcgactacgtgccaggtatcgctcaatacaagagtccgggtccatttcacacggtcagtcgttgcctgtatttcttgttgtgtcccgtcggccgtgacctcggtgttgtcctgtaccagggaagagcagccagcaacgacaagccggcgctgcgatccaaagcgccgtttttactggccgttgcggcggtggaggaacagggtattgaggaggacgaggaggcggatagactggttgggcgcagtggggagaaagattggtttgaacctgtctttagggttgctgtggaggtactggtggatgaactctggccggtctttgatgagcagattacgacgctggggagtatgacgaggtttgtgcagagggcggaggttacggaggatgtattagctggcggtgatggacagggcgaggcagatgaagatgggctggatgccatatggtggtcggtgcatacgccgcctcatcaaatgaggaagaggagaagactcttcggcggcgcctgaataactccaatgaatatttcacaacatgtcctttgtcttcctgcgtctgccacctggtacatactttgcttctacagccagactggacaccattctatgcctctacagtgagtgatatcggccatatttagcctagatggtttgaaaatctccaaaattattaacctaaatatatacagaaataaacagtctagctggtcatctgtgtcaccggcaaggccagcagtgtgttcatattcgtcttcagatcctgcaacagatcgctcatttccttgatcaccagcggcgcgtaagtattctgtgccagactgctcgcccaatacaggatctcctcgtctacatatgtctcgaaggtgtctctcactctctccacttgccagttcagataatccggcatgatctgcttccaggcatcttcaaagtcatacgtgataccttgcgtcgccgcataccgcgttagatccttgaacatggtcgcgatatttttatacgtcgaactgaatgccgctaccacctcggttctggaccggtagttgtgcatgtcgaccacatcaagaagaattccgacccgctcctgcgggttgtagttactccacatggtccgcgagataaagtccgcccctttgaccatatactccttgtatacgttgaagtcgcggtcgcagacttggaggttctcgatgaatcgattcgacaggcctggatcgctcgtgcggcctagcaagcctgtgaagaaatcattgatgtttcccaccaagttgtgcgtaaaggtcagagtcgggtatgtcacagtaggccaactctgctggaagataccgttgttgccgaagacttgcgcgaagggaacggcgccggagcgcaacatggtcccgctcggggtctgtccggctgccatgtactcgagcgcgttgcggaactcttgcttctccaggacgtgttcagtcacccagtctgtgttactggcgagcgtgctaaggctggttatcccagcggcggcgcagagaccctgtttggcaactgtccaggctcgaccagttgcgagcagaatgctggacgcgccggggtactgctgcacccagatgctggatctttgcccattgggaccgcagagagccattgcgatcctctcgcgagcgccacggggtactagatcgtgttcttcaaggagaaagggggatgtctctaggacggctagctgggataagttggatgcaaaagccacatcttcggtgcctcttttccccttcaggagtgctgtcaggtcatcggttccgcagccgtaatcaaacacagtctcctcctcgtagacgt

SEQ ID NO: 5068 - DNA, 6784 bp, Emericella nidulans
ggattcttagtccatgacaaaagatagaatgattcaggaatagctaggcactgctgagtttgaataccgttagcgagataattcctgtcacagtgagcaacgttgcactatcaatttaagaactatcttgctagggtcaaatattaggactcgagtcgaaaccactaagctgcgattatgcgttgctatctcaaagatgtaaaggatgatgtactagcatagagttttgccgatggagacagctagatcgccagtatatgaaagctaattgatgccaccgtcatatctcaatcagaaatattgtagatcaggagagtgtgggtgacactcacacaatgcttggatcatttcatcttgagtaacaatattctactctgtccatatcttgctcaaatagggtaggtgcataacaaaatagcggctcctttagaagctccataattgctttctttgatcacctgtgcattcttcttgtcaacgagaaatattcccagaacaaaacatttggcgttttgtagacttcttgattcagatcctcaaaacctcttcctggccagctactcgactatcgccctgcttgagtagtgattgaagattcggccccggtgagcaacatctccatagctcgtaggctcattgcattcgcggctgtaacgtcaaaaagtccctgatgggagtatgccgggtataccttcggttgtgttgctgcctcttaccacaattgatggtctctaagaattaatcgtcattcaagagagtggtttgtgtccgttcaacatcatccaggctgatatgcgaggcggtccgtttaggcctactccgaaattgcaaggagagcgatgtcaaatccagcatttagatcatgtctatgataatgtaatgtccagagagtggtaagcctctaaatgttgaatagctctgacaacttttcctaagccacccaaatggtggtcaccccattttgatccaattgcaggcaattgagtgcatcagacttgcggcgatctcaaaacaggggatcatgctagagctttcgtgaagatatcagcaatccctcttgtttttcgcatctgaaaagatcttgagctcactttaatgctgacgggtaggttctccagcccgagtaactggatgtgactggcagcgtggttgctcaaggcactctgaacaagctaatcgcggtcagtcacgttcaaccctttgcagaaagcggacataccctggatcaacaggaaatgctgtaagctgcagtttctggttagcggccattctacataaatgctgcactgcattcgtaggcacgtacaccgtattgggaaggagattacgttcctatcattcaaaacagatttcactccgcctcggacaagtcctgtttactcatcagcagacgttagctgagaactcatatttatacccacaagacaaagacgtactgtccagaatgccgcagagactcaatcgtcacaagctttggattccaggctttccggctttcttgtacgaacaacaagaacgcttgacgaacgttaggccagttgtaattgagctgcttacctttaaccttacttgaaagttcttacctattccgcagcataatccatctattgctcctattgttgcttcgaatcgacattttattctccttctctagttcaacagggcctttcgctatacgaggagcagaagtgtgacccaagaaagccactacgacctggcggagcgttaggataagcataagcataagcataaaagctagcttatataataattgacataagcgccaagcctaattaccgcggtgtactccatacaccgaaactagctatagattgcgcaaaatatggtcaccaacatctacataaccatcgcgtgcagtctgagaccaaaagttatggagttgaagcacgacataatgcagaatgcaatccattgagtgttatatagaatgcagctctaaatctaagtccatccaggttcgatcgagagtcaaggcaggactagactccgaattagacactccatacacggcattggaagtagaggacaggtaccagacataagagtataatataatatgacaatatacacaggatcaagataggacaaagaacgccaccaacaatgcccaagggatatatctactgtatgaaatgcttttccagccagccagccagccagccagggccagggctaggactaagaccaggaccagaagctgagaggaacttccaccaaaacagatggaggcgatgagatatcagaggatttattcctcatattttccgcccacaaacgcccagttcgacgcctccagcttccccttcaagaattcgtacactgtgaacgtgacggcctgtccgggtgcaacacgcatgacacgaggcgtgatacccttgtagaacgcactagcaccctcctgcttgaacatgtccttggcgatcgtcataattctgttcacggcgctctgaccaggctcagctctcgtcttctgcagacgagtcttgatagtgtcgatgggtgcattggagaaggggccgacagcaccagaaatcagaccgataacggttgtctgatagctagggagctgagagttgctgtattcgggctggctgcgttgcaggaaggccttaagttccgtgtaggctgtgaagttggcggcttggtttgtaccctggcggagagcagtcagggagacaccgcggtagagggccataaatccttcttccttgatgacggtgaagagagcgtgaggggcggagcggtatttgggagcgtcaagggggtcggcgagggagtggtgttgcgcttgcaggcggatcttaatgacttccatggggttcacgacggcgacggcttccgttacacctgcggcgagaccggctgttcattactcgttagtatcgaactgcatctacgcgaactgtataatgcgcgattaggactagtgttggcgtaccgaggaatgtagctttgctggagacagcaccggtgttcttatccgcaagcaactgcttgtattgctcgtaggaggtgaatcggatggccatcttggggatgataccgcccaagacggctccgagacccttgtacagaccgagtgcggtttccttcttgacaatctcgacaccggttttcacgaaaccacgaggcttgacctgcaatcaaatgagtaactgcgctccgacccataaagagtttgggaacttacaccaggtgccgtggaccgccgcgagagttgcatgcggaccttaatggtgtctagactatttgttaatgtttacgcttgtgcgactggattggatgttccgtacccaaaggatggcatacaagagcctccatcataccggctccaccaccagctaaacagaattagtactgaggtacatcaaaatacagacacaaagacgtaccgatcagattgacagccggcgaggccggctttctgccatctcctcctttagcagacattgtgactcaaaaaaagtgtttagtctatttgtggtttttccaattgggacgaaacaagcttgcgcgtctcaacacttaacagactacaaagaaagaaaagaaagaacaatccaaaaagaaagaaaaaggactgaaaaggagtcacgaggacagcgacgatatcggacgttcacaaggtggaatttccccaggtttgaagcggagagatacggaagtataagtaccctcggttgggccgaggaagaaggaagctctggaagcacggtcttagtcaaggcaaataattgggagtcagagcttcggataggcgatcattgcccggacactcggagtcggtggcgggttttgtctctgccctttttgtgtggttaattattctttggctgagggcgagcgccgcaaaggtggaacggggaagcggagacagggagatggacgagcggaacttggctgtcagtgatagcagtagctgcaaagagaatatcgagaccagcacagccgagaccgatacggaagaacttcaaatctgaaaagtaggactataagatcttcccattgctgcgggacagacatatttatggacaaaaagtggttatgtccctgttgccgttcccatcattactatcatcattattacctcctcccaagaacgacgaccccagacttcgttggaaggcccggttgaatgaacccgcccagtccatggttctggcttcgacttttttttctgcagcgctgccggttccagaagacatgatctcatgaagcaatatgccatctgaactcagcctggatgaaacaccataattctgcatgtgaaagcgctgttgctcgacaggatagctgggatgtaggagcttccatactctagcttgtgatttcgcgctattcagctccatttcaatgtcaagtgaccaccacatggggtgaatggatgcttgaggcgggagaaatccggctccagaagaatgacgttgcttcagtcatgccgaggaaattcccttgggaatgccgacgggtggccacacgtcgacagctggtaatgctggacggagcacaaggcgcagagcgagtgcagtgcaaatggggtccaaaagcttgcagtgcagctcaatgcatcagcagatcattgataaggggatgaagatgcggcccttcggagtaactgcgagcctgcgagttcgttgtggtgacctgaggcatcggcacatgttttatccagactttttccacttcatgcctgatctgtcaggcagccaaagatcaggcaaatcaagataacccaatagcctcgaccattgataaggttaaagttgatcttcggcaatcaaattctttgtaggtttacgcagcagtgctggtgaatttaggatacccagtcacggcggctatgtgccggtatggttgcggtgccggtgctgcatctttcggacggtacgcacaaaggagcgcgattccctggagacgaacgcccgtctttgcgaacccagcagcattattgaggacaagctagagggcgaaaatgttgaaagtagagtaaagcagttgggcgtcggtcaatcgttctccctatcagtgtttatcgtctcacatcggcatcttctccgatctcaggtctccaactcgaatgcccatcattcccataaaatcatggtaaggcaaatagcctgagcagagacataggtcgagtccagatgtctagacgagcctaatctaggcgccatgagcaccccacaaccggcatggaaacgcattgccttgtttatcctccatcaatggctcattattggcatcggtgtcgcctgcctgctgggatacttcttccccaacgtcgccaaacatggcggcataattcgttcggaatacagcatcctttatggcgccgtcgccatcgtctttttgatatcgggccttagtattcctcaggataagctcgtgcggcagctcttcaactggcgccttcacctcctcgtccaagttacctcgttcctctttattccagcgcttgtcctcgctgtcgtacatgctattctcgctagcgacaagactgaacgcattgatcgcgctgtgctggcgggatacatattcaccgcttgtatcccgacgacgatcgcgtcgaatgtggtgatgacaaggtcggctggaggggacgatgcggctgcgttggccgaggtgcttattgctaacattctgggtccgtttgtaacggctggatggacggtgacgctgctaccggcttcaaaagagttcgatgtttggagagaccaggatgaggatctcacagccatgtatcgtgacgtattcaagcaactgggcctggccgtgctgctgcctctcgctgttggacaatttgtgaggttcttgtggcccaagaaaacagggcatatattgcagaagtataaacttgcgaaacttgggtctttctgtttgcttcttatgatctggtaagtttgttagaggtgggaaagaagattagaatgagttcctcacacttacaccaggtcaacattctcctcttgcttcgcaacaggggcgctccagggtctttcgaccgaaagcatcgtcttcgtcgtactattcaatattgccctttacctgttcctaacagccgtgtgtttttctatatctcgaccgcctcaaggcctctgcgttcgaacaacctttgcgcgctggcaggtcctgaagcagatgtccgttgaagagaccatcgccgtatgcttctgcggaccggcgaagagtacagctctgggtattccgctactatacgcgatgtggacgcccgtcgacttgtacataaaagcgaagacgtctgtgcctgttttgctgtatacgacagagcagctattcgtagcacattttttcgttcatgcgttcaggtggtggaaacgaagaatttgtgaacgtcgtgaatgcgaagaggatggagggagtgagccgccatctgcttctccctcagaaataacagataagtcaaaagagcagaggtgaacgagtaagagtgacttgaatcttcataatgctacttgattgacacgtgataccatattacaaggattgtacaagagattgttcatctggattaaataccgaaagacagtttcatagcatttcattactgggcattcgcgaagcgtggttaggtttacagaccgaaggatatatataacaggccatgtctaaatggtccaagaacgcgatgaaaagacaataaatacatcaaatatagctcaccttcacgcccatcccgacagtgcctcggaccttttgccagccagacccagcaattctcttgatccgctcacggatttttggt

SEQ ID NO: 5069 - DNA, 4560 bp, Emericella nidulans
gggctaaacacctgagctgcagcttttcctctcgccggttttcttcccagcgacgtgatttacggcgttgctctggcatgcagtggccgtcccgtgaagaccgttgtacgaatgatatcgccatggccagcttcttgaacggcttgctggtgcgaggaagacgacccagcctcatcgcagagaataaatcgggtccctatccagactgcactcgcccccagcatgagggccgccgccagagactgtccgttgaagaggcccccagctgcaacaaggatgatttgccggtccgtgaacttactcttctggttaccgattactttttcgacagcagggatcagaatgactgtgggaatatcccccgtatgcccgccgccttctcctccccgggagcagagcaagtctgcacggcgtcaattaccttttgcgcgtggtgtggatggcaaaccatattcatgtacagcacaccaccttcatgcaatcgcttgacgacccgggcaggaggaatacccacggcgcacacgaacagtttggcgccactctcgatgatgatctcaatcagcccatcgggcttttcatgcgagtaatcgtaactttggaggacctttgttagagctaagcgtaccattagggttgtggactttgactttcgcgcattaccgcccacctgaggtatgagcagatcaacgccaaacaggctgtttttgtctaccaaatagcctttcagctcttccaacgccttgcgcagctggtctagcgtgtaagtgccgcctccaatgactcccagacccccagcattggacactgctgcagccagcttggggaggacaccgcgaacattccggctagaaggaccgggtttcgaatccccagaaggtccgttgctgccgttgagatcttttctatatgaatgtttaatacaccgacttttccactgaagtgagggtaattctcacgggataaagccatatgggagcgaatcaataagccagcaagtggtgatcgtctagacagagtagatgagggttgctaaacttggggttagcggatagaggaaacaatgacaagcgcatcaataaatccacatatcacaacctcaccattcctcatgtcttccaaatagatttctcgttatttaacaagccgacgtcccctgcccagtcgcgaccttactaggcgtagtgtggatctgcggcccttttgtagctgagatggaattagtcggcaagcgcatttccggctggaataaggctagatactcgacattttcgtcagcaaccaggaaactcagtgcaaagttattaatatcgtagccctatgataaactgcacttgactggcaatcaaatcactacgtcccttgttgcttccgtccaaaatggtgcacccttaccaaatcccggttgttgtaggcgttggtgatcttaagaacccctcgctcaccgtggaagatgatatcgaaccattggacctcatgtcaaagcaattgaagctgctttgaaccagtctctccgtcgccaacagtagtgcgctccagtcggctatcgacagcattttggtcgtagccaactggacctggccttaccctaataccgctgagcttatcgccggtcgactcgaatgccatgccactcatttgtgcccactctataataccacatcaggttcagcttcgagggccacaggacactgaagaaacacaccttcatctttaatcccacatggtagactgatgcctcgtcgatattcggcgggcatgtcctggaaagcaaggcccgctcttcgtatcgaatttgctcttcacgggggacgccgccggctgcctcccactcatggacgtgcggattcacatattcttctaggtaatcgcgcacgtatttacgaagcttcctatgcgattcgttgtagtagggggatcgcagtgaattgtaccaggccggctcggcgaatggagctgggttgccgtaggggtgcagcgccgttgttgcggggcgtcgtgtcgagttcgatggattttaggaggcgaaaatgaagcatgaaaacgagactttgaacagtaaccgcataggaatggtatatttccacaatgtatatatatgtcagtcctccaattccgccggaatcgagagccgaggtccatgtaaatcaccgagcgttccctggtatatatggtggatagagaaatacctgagtatatccagatattcaacatcatttatagacacatagtaatctataggatctgtattgctcagttcacgaggcacagtctccaggtctaagggaactttgctttcatcagtccttgtcactctttgaggctatagccaaggctctacgccaggtaaaacagctgcttagaaggtgcctctgctcagcctctagcgaaattttaaaaccatggccatcgtctctttgcatttctgactggctgtactcatagatctaccggaaaattgattgtggtcacggactacattcctaccaaccttgggacaatccaccatgcggtacagcacatgctccggaactcatttggccctcatctgaatatttcagtctgttgatgatctggttgtggctaggcttttataatcgggcatttaggtggttgatgtacatcttcagacttcctatagaagctatctgatactggctcattttggccgccagatccttgcaagggatatgcgctttcacgatgatttgtacatgattagtccattgaaactggattatagatctcttgctggaactctatcacggagtgagtcttcactgctccacgaaccttataacttcgtgtcgttgggtagacatcttaagagagcgacttggcttccgtttcttatttacaccaggttttacctcttaaatagactcgtatcgagggccagttggttgtttcacagactttcagaagcgctcttagaaagcttgctattgtgataggaggttagtacaaactatccagactgtatcgagttccagcattgacaccagaaggctcgaacggtgttggcattgcatatgttcgggcctagagtaaatacgggtaagttcacagctgaatcaggcaatggttagaagcagcattcatcaatatacacaggacaaatattgtggttgtgatatcacgagaatttcaacaagggttactacagagaaccaaagttagggctttccctcaatctattattgccaagtgatttgatacgaatctagcactaatttgtgaaatgcgtgacaaactgggataatgaagttaagctatttgaaactgcagatacatttcccccagaacagcgagatcagcattatgttgcgaaggccagagttgccatgtcagactgcgtggcggacttgaaggtaaactcctagagttaacctgtaaacttagcatgagtggtagagttgactggatttcaaaattgaaattctccccaagccagaattcaagatggtggatattaattcacaggtcctatatataatgctaagcttgccatttattatttccgcaaagcaatgggcgtggatcatattacgacggttgcctctcttggggaccaacagctggctaccagaaatggatggaccggaataaaccgtgtctaatctgcagttctctgcagttcgagcatggtgcagtccttgagacacatcctgtctcatacgggtcgagagtgctatgtatagcgccaaggtttatcaaaacagctattatactggaagtgtttctcaacagtaaggtcgagataattgatgatgcagttgaagcattattgagacttctcaatgatcagcgcatttatggtatgtatttgcccgggtgtcttgttagaccgtacatcatattcatccatactaagcctactaggtcgcacttttgccattgttccatgagcgcggcacaggaaaggttatgttgatatgacgatgatgattacacgccagagaagcattgattcgtcgatatcgatctaaagatgctcaagagaatgggtgaccatgagacttgacttatgaataacttcctatttctctacatcgagagaagtacggtgaaaatggcaacatattcccttatacccaaggtgcggcgcaaccctatgagccagctgtcttctgatgctactgacctaggcgacgactctgtctaggttgccaaacattattcaaacactctcaaccaaaatctccaaatctcggttttgtgactttcgtgtctccttctctctccatagtcatcatcgtgttgttcgttcgtttcaatatgccgaatcacaagcaccgcgaaaccgtttcatcgtccgtcaagccctcggtgcacttctgtctgcgttgcgtccgtactcagctcaagaaatttgttgtttctgggtctgtgccttcacaatcgaatatgtgcaagatgcggtggcttttgtgctatatccacactgctgggagcgtaatgccacttgtttatctgtctgtgttataccgctccatcatgggtctgttactgacttgtatggaagacggtgcaggtatgaaggcgatgcgaaggattccgcgc

SEQ ID NO: 5070 - DNA, 3945 bp, Emericella nidulans
aatagttgcatggcctgggtcgctgcgacagagcctggatcactcgaaatacgggcccgttacagaacgtgtgtttatgggcgcactttggttcgaacggatcaagtcattatgagggcgctccacattgatcagtaccgttaaatataccctaatgttgccgctagatggtggctcaatcactcgagtctggacagcggtcgcgacgataataggtacctttggactgtttactggcacgatgtccgattccagttagataagtcttaagctagacacttttcgagctcctcgcgttcgccgagagataatgactctgacctgggccagctttcgccacgcttccgccgatcctaaagattcatcaaacacgatgcggcaatcatggtctctcaagattacgcaacgacggacttttgctactagcgtcaggataagctctgtggcgaactggtcacagcgactttatatgccagggttcaatgtgtccctgaatttcctacccacagtaagtcgacgtggcctgcgaaaacaggtagctaactagaccagccgaatgttatctccagatataatttcggtttcccaaatgccctagaccgtgatcattttgaagatggtactttaaagtaggagccacttctacgttaccggtcgtattgatcgaagctcacatgggtgctgcagcaaacttgtcacccacagagatcgtaatgatgagaatcatgaacatcattaccgagaatcccgaccggcgactgaaactgtttgataagcgtatcactactaaatggcgcgaagagagttgctcagagtgcccaggatgtgtccgcgaggatgatgcattggatcattgcggagctgcgatggaaggcagatatcttgagggacacaggcttcggaaaagtctttgatgacagcgtggttaagtaggacactgccatatcgccggaattgcgggctgctctgaaaaaaaaagccgtgatctctttgtaagatgttccagaagatcacagagactaccatcctgggtctgatggaaaagtaatcggtctagtgcacccatcactctttgcggtggtatatggtcgaacgcgtgttctgccagacaggattattggactggatgactgtctggaaagcatagggcaaggtacactgcttcccgtccctccagagagtgataactaaccggagcgaaccctcgctagccataatacaggctttcatccgcccgcatttagtgctaggtttcagtggctgccctgcgaggtggagctgacttgacactggggactgccgtatcatatcatacatcaacaatgctcatccagtaaacatcggccctgtatcatattcttgagaagatccttgcccaaacgattcccttatgggaaagctctctaacagagaaaccgtttcagggcgatcgaattaagttcaaaggagtcgaacctgagaacgacacttgccctccgcctgaaggtccacgagatgatgctgaggattatgacttcgaccactttgaagagcgtctagctgagtggtacgcttcgcgacaaataaaacagcctgagcctgtggtctttaaagtcacaaaacccttatatccggcggtcaacttccagaagcattttccgaaccaaaagtttcaagtgattgtgaaattggcgagcattatgttgacgccagaaagcccgagtatgagggagggacgtggcatattgaaggccaactggtgcgctccgcaacctcctcttgtcattcatgattttgtaacttgttcagaatgagcgcatcgcagtgtcggcgatctactactacgatagccacaatattacagccagtgcactggctttacggcaccgtggaatgtctggaatgtacggtgtgattcatgaacaggatatgcatcacttccttcagcaaacatacggcttccctgaggatgtagatggccggaatgaagtcctgattacccaagatctgggaagcgtggatacgacggaaggtcgtctgatcaccttccctaacacgctccaacaccgggtctccgtctctctggcagatcgctccaagcctggccatcgcaaaatcctcgccctgtttttccttgatccacatcaccgcatcatctcctctgctaatgttcttcctcaaagagaagactggcggagaactggaaaccgtgcttcgggctacgctcatggcacaaccacgatgaccatggaggaggccaaggcattaaggcttgagctcatggaagagcgggggcatagtagtcaggaaagcaacaactcgtttgaaatgggagagttcagtctgtgtgaacactgatggggttcctactctcatagcggggttcaatccgaatgaatccatatatgccagtctacagggcgttgctatgatcttggaggtctaattgaataattatgctgagcttatatcacggtaattaatagggtgatatgtaatttgaagctagggccataagattccaattgataaatgcatcgctcgatacagttcagccagcggaaactatatattcacgaccagccagcattctttccttcgccatcaacgcagtaggacaacgcagtatcgcccgcactggttacatcactgatacaatagccgaacacttctcagatcgaaagattttgctgtcggtttgttcggaaagtcgggctgagcggcgatgaagtcatgttttgctttccccgcatgacaatcaacacaacatctcatgttgcgatcaacctcttcatctccaacgatcttatcataatctcaaaacagcagacatggccacagacaagaaagtcatcgcattcgacctctatggaaccttgctttctacagaatccattgcaaaacagcttgaatcacaattccccaacaaggcgcagtccatttctagcttatggcgccggtatcagctcgaatacacctggcgtttgaacagcatgggtattattggagtccttcaatagaagctgacggcttgagctaacactgtccaggaatctacgagcccttctcagacatcacccgtaacgccctgcagcacgccctcgccgaacacgaggagtcccttcccaacgacgccatcgcctccctaatgaaagcctacgataatctctcaaccttcccagacgtccagccagtattgatgaagctatcccagatctcgaccttaactgccgtcgttttctccaacggcaccctgtccatggtctcaaattccgtgaacagctcgccccatctttcgccgcacgcatctgtcttcaaggacatcatctcggtcgagagcataaaggcgtacaaacctgccccggcagtctaccatcacttggtcgcgaaaacaggaaagtcgtcggcccagaagggcgatatctaccttgttagtggaaacccttttgatatcatgggggcgcgcagtgttgggctcaatgcaatttgggttgatcgcggtgggaggggttgggcggacgctgcagttccacagctgaggccgactgcggtggtgaggaatttggaggagattgtggaggttgtccaggacacatgaagcctgccatcgaccgcaacgatttgcgatattgctctgcgatcatgcgatccgaaacaaggcgactcatgtgcaaatcagatgaccttattatggacccaagatatacgcgtttcagaggcagtaaataacctttggattgatggccttaggctggccaatcctgggctactgtatagcaacgtaccgcttccctttggcatcctgactagtcactaattgaactccgcaatttggaaacctcggagtaagcaacccggaggaggctaggtccggagcataatttggcgactcgagcttatgcagagttagtaaagaccggttcctaatggccagtgatgaccgacacgcaaggcatgtggacgcta

SEQ ID NO: 5071 - DNA, 7163 bp, Emericella nidulans
atatacacgtgtacatagaaggagaaggggagggccatcaagccggcaacaaaggagaagaaaagaaatgactaatcccgcaaacgccctaccaacgcagccttccatccaatgcactatattcacaatcgaaggtatcgtccatcatccacaatggtcccaatggtcccaattattagtaaaagcacgtagctcaaagggggtttgtgtcctccgcttcgccgaaagcttcgaactgcttgagcaggtattggtacaggaccagcatcgttccactctggatgctagtccagactcctcgtgggccgacacctcggaaccatccaccaattccctcagtcttgtaaatcatcttcagaccggtaaagaacgaggagttgtccaatcgtaaagccccagacggcgtgggagatgccgcagccgctgttgccgaaatagaccgcgattgtgactgcacgcccgacttcgcttctcgcaccaccgaagcgttgggtgctggtgccgaattgggtgcggggttctgctgcgtctgaatccgcgtcttcacaacgtccataggacaggtgagcacgcctgccattccacccgctgtaacggccgtgaagatctctaaccccagcccgatgtcacgagatcccacccattcttttgctattcgctgttcttgctcataaaaggcgaattgtaaggcggagaatgggagatcgcggaaaatcgtagccttgtacccatagaaaagtgcagaaaacccttcttgacgaacgattgtgcggaaagcatctgcagtagagcggtaattgtatccggatttgaagtaggggttattatagcggccttgaagctgtaaacgggtcttcgcaacctctgaaggaacataaacgaccgaagcggccagatctgcaaagaaacctacataacgacatcataagtatcttggctgtataaaccaactgaggacgtccttaccaccagacaaatatgccacattagcattgatcccggcatccagcatcttgcgcttcgtgaactcataaacgccaaaaaaaatcaatgtacccggaaacgagcccatgagcgcaggagtaacgccaccatacagtccacgcagtagccctttttgccgatatatggtcgcattacgacgaagttattgaagtatatctaggagggatatgaggatcgccctgttgtcgcgtcttgacagtatctaaagaatgcataagcatatcaccacaggtaccacctataccaccagcgagcattgcctgagggagtccccgaattagcctttaacgagatgcgctacgctttctgaaaagaacagtcaagcggactggagaacggtcagagcagcgtacatgcagatatggaggacgaggttcctcctcgtcgatgtctaccggtccattatatacatttatgtccgtcgatatcattatcggcgcagtatgggcggcatcgctgggattggccggggagaaagccggtgtggtcgaatcagctgatttctctgtcgttgtgaacaggctgaagacgcgcgacgttaagctcattgcaagaacaccgcaacccaacgaatcgtggtgcgggcgagaccacggtaagttgcgatgcggcgatgccgggttaattgcagggagccactaggcgaggtagaagcgtaggaagactaggggaagcgaaggatttttcagattggaaaaagcataaacaagtgtcaacaaaattagagaggcaggtgtatcaacattgcaaccttttttgtcaagagaacttgaactgtgatgctggtcggctgaggccccaaaattttggtcggtctgccgttttctccgccgcccgagagccctttatgcctcaggcaccaacacctacaacgagggtaagccacgaccaaatttctgtactcgtcgggtactcatataccagtcaatattgcgggttccgagaaacatctcatcagtgttatttgataatacttgttctgtccttactaattggtagggttcattgactgtcgctacttctatggggtcggagcaacgttaacggaatctgacattgacgcattcaagataggtaataggatgaaaagaacaagaaaaggaataacagtaaagttcggagaggccatcactcctcacggcctcggctgtccccaacatcaacaaacaaaccactcgagttggttaaactaaaccccaagctacactgtacacaacctctcacagcttcgtcggttctcataaagccgtcttcctcgttaccggatcatcgttcctttaaagattggattgacggtccttgggttcgttaagttcatcagccacagtaattgccaataagttcagttggactcaacgatagtggataatgtggggtatagagaaaagtcattgggctgttgttcgcctaatttcaccactacttatcgcaatatcgttttgtgtttgaaggccatcattggggcttctttcctgctccggcagtaaagcggctaacgtcggtagcctggtatgcctgacgggcggcatccttaaagccctcccagccctgacgcaccgccggaggagtgctctggtgggacatagaagcatcgactcttgctgtaaagtgacggacagcctgctgaacgaaagagctctggctgtagcgggcgcggaagaaggtcagataaatgaataggaggatgaagctgcccttggagaaggtaaggatggccaatagcaagcggaacaggagggcaatttccagtccagctacgagatccatgctagcgtcatagtactgcttgacaaatcgcccgatggtctctgccaatggcgactgcttcgcgttcgcacggccaggagatccagcgggggtgctcggaggttggagagtaggaattaggtgggcgcgagtgtaagttgcaacatggaagacggagtagacgctgaatggtagcagagcaagcggcacctggcgagaatagagccacaccaaggccattcctagaaccggaattgtcagggttattaccacaaactgactctggtattgagacaactaacccagatactgaacgttctcatcgcccgcaagcttcagcaagatgctgggaaggctcccttggagacgtccacgtgcgacatgtcccttatacacaacaattccgtaggtaacggcggcggagatgaacgctaggcggtaagatacctgtgccgcacccgagtagtagttgaaggtggcataggagagtaggtatcggaagacagagcctagcaatgtcacatgcctagagtcggtcagtcaacgctggccttccagaacaatccgcacgcaaccaaaagcaggctgccaaacgaggaccacgtaagagacaaaatccgatctctatgtagcgattgtcggaattgactatagcggtcttgaaacaagataggcgatgctgaaagactaaatggctatagacctacccgatgaaccaagcaaacctacaggatgacacccagtcagtatccacgcgcacaacagggtgaaagagaaacctactgcagtgtctgggccagagccttaagcctttcggccaagggtaaatttgacggaggagggggagccatcgggaacgatgtcgctgacgatgtgaagtagttgacgtggaggtggttgggtggtctcggtcgaggttgaagaatgaaggaggggacgctgcccggcaatgacgaaatactgtaaaacggcgggtagttaactcagacaaaggatacagcaagagataagaattgaacagagggtgaatcaatgtcaggaatgatttgtatccgtgaggaggctgggcggggaggcggcagttagtttcggacaaagttgcttttggtgtgtgccggcggaagctctttctaggaacctggcctggttgaccatcctcgggagcctcttgtaaatcggcggacccggtgacgtcgcatcatgatgcaattttttacaacaccttttgcggaatatatcaatcatagctgtttaattatatcctgacacgccgaccagagcgcgaattaatgttcgtccctacagattatacgctctcacaacctctattctgccacaatttctgcttttatgacttcaaattgagactagcacgacaaactcaaggtaacaggtaaggaaaacgtcagaaagatggtcgagggtgggcgatctactaaaatgtgtagaagagcaaaggtgcactaatatagaacgatagcagcactggaccacagaaggggaataggaagcaggcgggaacaaggtatagcgtaggcaaaagtacataacaagaagtgaattgtggacatgaggcagtagattcccaacctgagacgaattgcaggccgccacctcgtgaatcctctcgcaatttcaggaccagaaaacttcagccactgaaaacagccgtatcaagcatcgaaaggtggctcttgtggtctggcgcatctcctgtgtaagcccaaggcaaagatattgaggcaatccatttccctccttggtccactcaattagattcagtcattactggaaggggataagagagacgggttagagggagcgtggagaacgatgaaaacacgaaaaagagaaggcggaaggttgtgggaggcgctcgatcaatcgacaagtcgtggagaatcaaacgtagaagttccaataagcctccaacgaccatacacactatcagctgtcttatggcttttaggcgaagaccgtcggggtttccgactaagcgtctgtttaacgaagagagaatcccttcctctttcccttttcttcgagtggccgtccactctcgaggcgggctttcttctcttctaactctgcgcgttggcgatccagttgttctttcatctcacgatgtcgagcgtataattcgtcttcgctctgtttcagtttgctttccttctctgctaccttctgttggaagaccatcttcatttctgcctccatcttggcaagcttctgttcgtgcagagcacgctcctcttcttgcttcacagcagggttgacttccttgaacacgcttgggtcttgggcgacacccatctgagtaagcttgtcggagcggtagttctcgtacagatggttgttagtgtgctccttgagctcttccatgtgggtgcgaataagcatctggcgcagcttgacgaagtcgcagtgctcctcgttgtcgacctcaatgataccccaggggtagctacggccacggaccttgcggccatcggatgtagcaacctctgagttggcaccgacaacggcaaaaggaaccttcgacatgatttcttggttttctgcgatagtctcttcgtcgtcaagttcgtagcgaggcccttcgaagatttgaatcgagtggtgctggatatcggcgagaatctagggataatcttgttagaactgaagttctcaaaatattggactttgcatattcatacccgcttcttaaacatggagatttcatcatccgtcagagtatcagccttagcgatcacagggataaggttgaccttggtgtgtaacctgcgcataacctcgatatcaagcggctttagagagtgaccggtgggctggatgaagtaaacacaggcgtggatgcggttatcaatgatgttcgtacggttgaccttgttttcagcctcgaggtaagcatcgtatctctgctcaatgttttccacaatggggcgccaggaatcgtcgttgttgacaaagtcgccgaatccaggggtgtcaacgacggttaaacgaaggcggacaccattctcctcgatgtccgcgctgatggattgaatcgagacggtcttgggtatgatgtcgtgactaggtcccgcgcgctccttcggagggtaaagagaagtattgaaaagggtgttcacaagcgtagactttccgagtccggattcacctagcgagatcgttagtgaaatggactccttttcgcttcgcctgatgtgcaactcaccgacaaccatcacattgaagttgaatcccttgcggacactcttgcggtgccattggttgggaaggttggcgaaaccaacatagccggttagcttccggcgaaccacgttcttcatatcggtggcagcctgcgccgcagccttggggtccttggaggtgaccgtctgagcatttccggcgcccattgggttgctgcgctcgacgaaaggagagccgggcttgctgctgggcggggaggcggtggcaggtgtgccattactaggaggtggtgaagctaaacgggagaagatggagtcagcagctgtataggcctgggtgccatgttcggatgacaatcgtctaatgggcgtcgaatatgagaaacttttcggccgcggaaatttccctgccatcgaatgctcgatgttcagagcgtctatctgcggacagccatgcgcactctgtcgtctggatgggggcatagttctggaatgtaacagaggggtgtcccggaagtaacaggtgcggatttttaggaatcaaagaataggcagacgggcgtagattgataggaagaaaagctgcaagcgctgagcttacccattgtgcaaggaaaaggacgtgatatggaagcgagcgtggaggcgtgaggtagcgagcgctggagagtaagttcccctgaacaggttgcaccttctgagttagcaaaccgagtccttgcagcgagggacgatgaaggagaggggctcaaagcaacaatgtccagcaagtcggatgaaaccacaacacccgcagatgttctgtggaacggaggaatggcgatgttaagaaagaagccatcttaccttggtgatcgttgatcaggaaaaggagattcgaagaaatagactgagatccacgagggaaacggtccgctcaagtggaaatcagattatcagaaagaaaaggaatctttctaaacagaaatcaagcgagaaataaaaagggacgctgaaagagagaaaagaatggtgtaagagaggacagggggaagggtcgaaggactggacctgcggagagttgacggggtggatgaagcacttgtcgaaggagccagagccggaggccagctaaccaaagaaaggggctctcgattgggaagctaattcttagcatcgacgcgcttctagactagaactacaacggagtccctcagaggacatatctttttt

SEQ ID NO: 5072 - DNA, 1242 bp, Emericella nidulans
gacactttgagccatagcagtggcgcttgcaggatgatggcgaggaagaagcagaggagttcggcggaggtgattgggccggaggatgggaggtggttagggaagtggttgaaggacggccagatggcgcttagcatggtagacacgcattggccggcctggtacgtctgcgtgccaaaccagataatagcgacaatccctctaactgcatgccctttgttagaggcggtggctgtgtgggtgtaagaggagagtctggaggaagcataccgaagacggcgaagtagctccccttcataccgaagctggctcgagtgtagacggggaagttgatgccaaagatggcacccacgtagctattatccaacgttaaccgctatccaacctgtacccattctccacgcatcatttaatgcaaagaaggggaacgggcaatacatacccatcaagcatagccggaatacaaacgagaatatgtccgaccaccacagccgcaatggccattggagcacttaggcccttactgaccgaagtcgaggtcactagcatcgcgagtcagcctaatcgagccctaaaacagtcctccaccgggagcggacagtaccttgatacatgctaatactaaacgcctcggcgacccagaaccccagtagtgacggccatctccacgtgcgtttgggcgagtcgagcgggatcgggtcgaggtctttgttggaggcaacggcttcggtggccaggctggcgtcgccttgttttacttggagtctttctcgtagtcccatggtgcctgcgaatttggactgcaaatctcagtgcaaattggatcgacatcatggatgagaacccgagtaagtacaaccggagtgttatcatcatttgtaactgataaagcggccgaccgttatctatgggtttatctgaagaaggactgatatgcattatccgcactagtgacggcaagatagcagcaaaacgattggctgataacctgaacgctttgactggaagcagtaaatcaagctgattgcatgggcctggcccagccgataagatagactcgctataacgtggccatcaagaccaggtccaggtttccggagacacggaaaagctgtaggtggaactggagggagatctaattgaataaaccaaaaatatgacatgaaacggagagccagaactagattctcgccttccccagcttcttctcctcggctttgaacaatttgaccagctgtcgga

SEQ ID NO: 5073 - DNA, 6879 bp, Emericella nidulans
agcagctgcttatgttccagatagcaatcccgcagtcgctgtgcaacaatcgtagtattgctggaggaaattttcaagctcggctccagaatggctcctgaacagcagcgagactcgaggactgctcccggctccgacgtggccctgcctgatcctccgccaattcatccgtccttcatccaggtagcaaagccgtatatcttcgagcagaccatccagcaggtgcctgggcccatccgttgacacacctatctcacaggagtaggcacgcggctcgagttccgcgtatatactctccccatctctggaagtgaccgacaccgcacctcgcaccagccagtatatcgccttcgcctcatccccctccgtcaaaatatagtcgttcggagcgcaaagttgcgggcgcagatgctgtccgacgtcgatgaggaatgattccggagtagactgaaacagaggaaaagaccgcagtcggtcgatgaggtccaagggcagagcttggatgttggacgaggccaaaggcgatgggcgcaccgggcgattggggttcgtaactgaatcaaatgaatggattaacgatactgtgtcggaaaccggtgccacagctttggtagaacctccgccggccctgccatgtcgcctcatgatgaacgattgtgacgctttctgggaaagaaatggtgtacaggacacagatattcagctgtacgctccgagcagtagcatagagttcgccggaaccagagcgaaaggcgatgacgtcgacgaagttggagtgacgggagcttcagagcatccccagttccacggcgcggggaggggtcagtagggagcaaacatttgaatagccaaaccggcgccgctgttcgacaagagcaagatcaaagctatcggggtagtgaaagttggagatccgaagcagatatgatactgaaagcgagcattctgcgttagtaagagaacctggggcagacgcaataattcggtacggtagagctgggccagactgaggatacctggaggcggggatctcccacgtcaaacggcaataatcaatttagctccacaaaacctctcagctctgcgcactagcaagctgctgtgattcgtgcgagtgctcgatgaccctttacactgaatcttgaaggattgtggcatttaatttaggcaattctttcgtctcgttcggattgaccaaaacaacgataattgtgaaaggagtgaacgtggttgaaagctaacataaaatgatgctccccctaagataaagctcagatactgaacaaagactcagtagggtaaggtgatgaaggaaaattgtgctggtgatagaaagatttgcaggcgagcagtagttggttgggtgcaggaaacaaatagtgaggaggggttcgcagggagaaagggagatcgttctgaagaacttccagaaggaatcctgtgtgcttctcgattgcaggtctaagaccctgagtcagctatctcctggaccgctttgcttttttttccgtttgtctgagcgttagtgcatggtaagacccgggcaagccagatgagttgctgaaagaaacctaacgagtattgattgcgtagctgtaaagaatgaaaaaagctgggaccggctcccaagggaatccctgtgcctgaagaaaagctcgagcaatagcaatatagataatgcatgctttctcataatgttagtattgaatgctttagaaagtccattggaacagtcaagataatctaaactaccgcgtcataccgcgttacagtgctatctacgaagcaacaacctcagtaccactttaaacgtgctccttatcgcatccaaagcacgaaacgcgataggttctgtagaggcagcggtattgggtgttgccgcgggaagagtcacctgacgttaaatgtagggcctgaaattaagaaagtgacaagggcccttatgtctgtcacaatccagctttggtgattatccccggtcgtccacgagcctcaacgaggcattcctgaaggccgaccatattcgacgttcactcctcacacaagaacgataaccgtgtccttgaggacttggtcgtggctgactaggtaaaaaggcccaaacaggacgatcgaaatacttcccggggcttaatctcgattcgatccgcgtaaactggctttcagaccccattcgatgcacccaagattgcacttccaaactgtagcctcttcgtcagatatcggaaagaaacccagtaattcgtggatatcaaggcgagatgctgcttcgcggacagcggctacctattggcttccaagccttttcattcgactttggaccgccgaccgaggatgaaatcaatataagcaggtcggttgcccttcaaactttcgagcgcatcctgcatcaaaccatacacgagactcaatttcaggcccaacttggttgttcgtgccgcagtgtacacatcgtgctcgtgctaaagcatggacatcagcttatttttcgttttttttgcaaacaagatgaagcaaacctaatagactgtagatcccagaaaaagacaagccagccgtaacggtggatatgaagtctctctggtcgtgacgagcatagtcaactgtttcctcaaagagacagaacgccagcgcgccggcgcctaatttgaatcccatcttcatgccctctttgacgcccccaactatagatatgtagttcttggttttgtggtactgaaaccatccggtcggcgtcgtgggaaagcgatgagcgttctcggcgcggaaacgatacgcagccttcttgcttccatgagtcgcaccgatggccaggccggcagagaatgcggacagggcagttaatggcaatcgttggccaacctccattcccaatctgggtggcgcttccgactcgaagaacttatcccagtgtaatatcttgtatagagttgtggactccggattgcgagtcccagagggctgttcagcgtccataatggaagagtggcagcgaatgccagcgtttttcgtctctttttttgcggcagtagctgtggagaagcaagaggatctaatatcgcgcgaacaatcgatgtttgacctgacaatcgtggcttcggagctcctgggtctagggcaaggttctctgaagtgagtttgcgggaacgtcttggttaaaatgttcccggctcccgcaactccaaatgtcaagagcgccgcggacccgccggagcttctcagatcaacctaagacctacgaaggaacctcgacatcatggtaagtcgggttcccccatgtctcttaatggatgaatttcccagttttgaaatgagttccgctaaaattgctactaaaagtcgcagccggatcctttgagctggacgctgctcttcaagaagcacagaacgaccgtgctcttgctgcttccgccttctcacaccatcgaggccaccaagacaaagctcctggaagctcttcgagcgcgcggtctaaaggaaattaacggcgatccggtccctgaagaccccacagcgatcgagtttggtgttgcagtggacaaaaatgacctagagaaaggatggacgagcctcgaggccccgaagattgaagccgacgatgcgcccaaacgagggccggagaagaagactacgtctatcagcttgaaggcagcagaactcaacaacgggcagtctattgcgttcagattccgaaagatgggggtgaccagttttgacaacgccactgatctcggcctagaggaccctggttgggatgttgttatcccgaagtttgatgacgaagaagtcagctcatagtgtgctgtttgtacaaagtgtctaactgcttttttcccatgttgaggttcagctcgtttgttttctttggtgcaagggtccgtatagatttacaggacggagttcgtggtcttcgtttgggacatatctgacaatggagctgcttgcgggagtacggtttcacatttaggaatgaaatcaaaagcttattatagttaccgataataccttgagagacactgatgttattgtgcatcgtcgtgactcctgatcaaggtccttgtgcacgctttttatatacatagtgagtcctcatattcagttatcgtaggcagggtaagagtagcgtagagtccgggcgtggcaccttcagtcccattaacaacaggacttcttatttgaggtttatctaccagaatggtccctcccagtgggagccctgccaagctatatgcgtggcggtaggatctgactcccttccacgattattgtcacggctatctccacaacctgttgctcgagcaaccaagcaacgccaacgtcaacaaattgaatggcctgaaacatccaccgtgatttcagcacagctcaacaggggtaagttatggggtcctcgggagaggcccactagtgtcaacaatcttcatcgaacgactctcttttatcccttttgttttcaaaacctcgcgctctctagctgtcacgccaaacggacggggcggacggccctcaattcacgacaaccctttaactacgacagcttttccgacaaccatccgacgccatgggggcctcaagcgactcttcgtctatcagcgtcactgtcagagtgaggccgtttacaattcgcgaggcagcccagctcaccaaatgtgaagatggtccgctgtttcttggagacggttccctcgctggtgcaccagctccaaagctgaaccaaaagggtctcaggtcaatcatcaaagtcattgacgacaggtgtttgttagtataaggtcttggttacctatcagctcgcgtgctaaccactgttataaaagagtattcgatcccccagaagacaatcccgtccaaaagttctccagaagtgttgttcccaacggaaaacgtgtgaaagaccagacatttgcgtttgatagaattttcgatcagaatgccacccaaggcgaagtatacgaagcgactacacgaagcctgctcgatagcgtccttgatggatacaatgccaccgtattcgcttatggtgcgaccggatgtggaaagacacatactatcactggcactccgcagcagcccggtattattttcctcaccatgcaggagttattcgaacgtatagaagagaggaaaagcgagaagcatacggaattgtccctttcgttcttagagatctacaatgaaacgattcgagatggtttcggtttgtcttgtccctctcagccttccagccatcctttctacggtggtctaacccatcttacctttgcgaagccggaatctttatgctcaaaactctgcgagaccggggcctccgcactattatattcgaagctggtaacgatattggcggcacttggcgctggaactgctacccgggcgccgcggttgactcggaagttcctgagtacgagttctcctggccggaggtctacgagacgtggaactggaagagcaattacccgacctaccaagagctccgggagtactttgaccatgtcgatagggtgatcggcgtcaagaaggactgcgcgttcaacagcgtcgttgtgggggccgagtttgatacgggatctggcaagtggagtgtgcgtaccgcggacgggagggtcagtaagtgtagattcttggtgctggggacgggatttgtatgttccctatcttctctctcttgtttggttgtggccgtattgtggtatagctaatgagcttctgggataggctgccaaacgctggattcccccctggccaggcctcgacaaataccgtgggataatccaccatagctctttctggccagacagtgagattgacgtgcgcgacaaaagatgcgctgtcatcgggaccggcgcatcaggcgtgcagatcactcaggcatggggtccagtcgccgcctctctaaagatcttccagcgtacgccgaaccttgccatccccatgcgccgccggccgctgagcaccgaagagcaaggacggagcaagaaattctacccggagctcttccggtaccgcgagaccagttttgcgggcttcctctacgactgggcggagaagaatacctttgatgacaccgctgctgagcgcgaagccttgtacgaaaaggtatggaatgagggtggattccgcttttgggtctctatctacaaggacaacctgttgaatcgggaggcgaacaaggagtcgtataacttctggtgcaagaaggtcaggtctcgcatcggggacccagtccttagggagaagctggccccgaaggagatgccgcactacttcggcgtcaagaggccttgtctggagacaagctactacgagcagttcaatcgtgagtctgttgatttagtcgatatcaaggagaatccgattagccacttttcagagacggggatcgtcctccaagatgggacagagcatgaggtagatgtcgtggcggttgctactggattcgtgagtgtgccctctccttccggtccctttggccctgtctggttcgtcaatagcgaagggtgcgacgctgactgctgtgtatataggacgtcgtcaccggcgtcatgacccaactcggcctcaaaagtattgaaggcgaatcccttgaaaaagaatgggtgccaggcgcgcagacctacctcggcctcaccgtcagcgggtatcccaatatgttccacatctacggtgctcacggcccaacactgctcagtaacgggccaacgactgtcgctgtgcagggccgctggatcgcggacacgatagccaagattgaagcgaatggtgtcaagtatatcaatccaaacaaggaggccagtgaaaagtggaagaagcaaattctagaactcaatgagatgacactgttcccaacgaccaccaccgcaatgacgggcaggaccatac

SEQ ID NO: 5074 - DNA, 6074 bp, Emericella nidulans
ccttacaataaatattcgtttgaagagctccgactgggagattacaaccaaggtcgccgatacggaaatggaagtgggcaggcaggagcttttggcacctcagctttcggggggggatccggttttggcacacagcagcagtccactggcttcggtagtacgtcgactccctttggtgcagctgccaccagcgcgccctcggcttttggttcgactcagacgacaggtgggtttggctctggaacctccaatcctttgtttggagcctccaagccagcaacctctctatttggtggaggtgcctcttctggcaccactcaacctagcctgttcggaaccacgacgaacaacactagcactggcttcggatccagcactggtggcggctttggatctggtggttcgttattcggaaacaacaccaacaaccaacagcaaaacaagtccatatttggcgcaagtactggaactaccggtacaggtaccggttttggtggttcggcacacagactactagcacctctacaccatttggtgcacagctgctacttcgtcaccgtttggtgggcaacagcagcagaccggtacgggtggttttggtggatttggacagaacacaaaccagacccagaatcaaactcaaaacaaagggctattcggtggatttggcagcaacactcagcaatcctccactggtggtagtctttttggaggtggagcaaccaacacgggaacatctctgttcggacagaacaaccaacagaatcagcagcagactggtagctcgctcttcggtggaagtaaccagcaatctggtaccggtctctttggcggtgctcagaaccagcaacaacagaagccgagcctgtttggcggttccacaaacactggcagctcactcttcggcggcaacacacagcagactggaactggtctctttggtggcgctcagaaccagcagcaacagaagccaagcttgttcggcggctccacaaccaccggcggctccttgtttggcggcaatgcaggaacgcagaacacgggttcatcgctttttggtaacactcagaatcagcagcaacaacagagtggaggactgggaacctcaagcctatttggcggttcccagcaacaacagccgcaaccaatgcagcaatctcagcctgcgcctggtagccttcaggcgtccctccttgagggcaacccatatggcaaccagtcaattttctccggtctgcctgcgccgaacaccgccagccctggtccattggccaccccgctttcgtctgcgaacaagcagaagcaacgtgctcctctgccaatctataaaattacgcccaatgctgccaaccgcctcatcactccgcctaagccccggggttacggattctcttactctacttacggttctccctctagtggtggtggaactccaaaccttggtggaagccttcttggaacaagtatgcgcggcagcttcaacggcagcttgggtcgtagtacattcagcaagagcttttctacaagcagtttgcgcaagtcatttgatccagactccgacagtattttgtctcctggagcgcttggctctgggagctcacgctactcaagcagtaacctcaaacgcctgacaatcgatcggagtctgagaaacgatctattcactcgctctgccagctcgcccactgccaatatcaatggagacgacgctggtcagtccgcaagcaaggtcagaaagaaggtcagctttgagtcgactgctgacaacgcgtctggtggtgaaattgtacccgtggagtctcaaagctcggaacctacaccagaagaacttggtttcttgcgctcaatccgtaagaacggcactcccaacggtgtcaatggagttaaaccggcgtctgaaaactccgccaacgctgagatggagtcggtttcagacaagagacttcttacttcggttcctgaagacaatggacgtgtttcctctgcgtccccgggtgagaatgcgtcacgtctgtcattcagccctagtggcgatccccaaccaggcgagtactggatgaaaccaacacgcgctgagcttagcaaactgagccgtgatcaactcaagcggttcacaggtttgacggttggtcgcgagcgctgcggttcggttacgtttgatgaccctgtcgacttgaccaccattgacctggataatattcttggcggtcttgtggacattggtgtccgcaaaatcacagtgtatcctgacgagtcaataaagcctgctaggggcaagggcctgaacgttccctccacgctgcgcatcgagaactcttggccccgtgggcgtgacaagaagggcccttcgccagtcactagcggcccgctctttgagaaacatattgaccgcctgatgaaggttcacaataccgaattcgtcaactacgagaccgagaccggcacatgggtgttccgagtggctcactacacaacgtacggtcttgactatgatgacgaggaagaagaaggtgagagccacaatcaaagcactctccccgccgaccgcgatctgaccgttggctcggagcagatgtcgacctactccattgacgattcctttgcgagctcggtggggggagtggacgacgacacattcgatttcaaaaaacgtaaaatggtccccggggcgtttggagctcaggcgatggagacagttgaggagcgagagataggatctgagaacgacgatgaggacgagtcttttttagaagagggctccacgggttcaactgaacaggatggcgaagatgtcaccgagagccagcaatctggcgagtcagaacttgaattagatgaaggcgaggaaatggacatggcgggcacctttcccaaccttgatcgcaccgtggagctcgacgatgatgaggatatggaccccgaattcaaccagccctcattgaaaccctggaacacaccctctaaggcccgcctcgatctcagcggtgactgggctgagcaattgcaacgaaccattagccccaggaagcagaaccgcgacgctttacgtgagattcaagcaaatgcttttagtgaacgaccacttaatgacgacacgccaacaaaaccagcggcaactgctcaacgaaagggattcaacactagtattgacctgatgaattctttgtttcaacaaccgcgcaaacaaggacaaccccctcttaggcagcagaagccacaacaaaaggctgggggctttgaggtacaaccactcttttgcttttccttccttcaatatgtctgctaaccacgatcttttcagtggccatacaacaaacagccaaagaccttcgcaggggagtccaacgaaatgagcaaggacgacttggacttccatcactcctttaaacctcgatggggtcctgtcgatttgctcatatgtgcgaaaactggaatgggtaatcatcagtacggtgaccagcattggagcgagaagttctctgtgatcagcgaaggccgggatattgccattctcggctctcggcggaccgctgagcctcatgaaatggttgaaattcagcgaaaacaatcccaaattacccatattgatggtcagccttctgctcaactcgcacgagaaagctttgaaccctttacaaaatcgtcacattctgtccactctgacaaggagcggctggtctggcagttggccaacattttgttcaatgatgacatcgaagatgacttttcgggcaggggaccaccaccatttaaggaaaaatacccatcaccgaataagaaagaaagggtggacccgcttctggaggggtatagcccggaggcgaaaggcacatgctgggagcagggcttggtctgctgaagaatgtgctgtttatctgctctgctcgcatcgcatcgaggaagcctgtactgtcttgatctcgagccagaatttccatcttgcgacgctagtctcgcagatcggccgagatcagactacacagcgcgatatggcccagcaaatcaaagagtggcgggagcacaatgtctggtctgaaatgagcgaaccgattcgggccttgtatgaacttctggctggtaatgctcttcgcagtgaagggaagtctggaggcgctctagaggatcgcgcatctactttcactttctctgaacgattcgagttggattggtttcaggcttttggtctccggctttggtatggcattaccgatgatgaacctctcgaagttgcagtatcagcctttgctcaggacctaaagagtggcgaggagcctgcattccccttgcctcctcaccaggataaagacaggggcgtgtggcatacatctaccgacaacatgggccacgaatcgcccctttgggtcctgctcaaggcctatgcagtaactctgggtgcggctaaaggcactggggtccctacacttacattgcctgctgctttgctgccggagtctgtgaccggagacaagctgtcaaatcggttatccttccaactctgccaggtcctttctgctgttcttggtcagtatgagcgccttgaaattgatatcgcgcagatggaccagctagtgtgggattatgcgtgggagctttgtgcatctggaaacctggcgcaagttctatttgttttgcttcatctgtcgcgcgcctcagatcgtgaaagggctgtaaaggaggtactcgcgcgatttgctgccgaacttcccgagccgatcacgccggaaggctctccggatgcaacttggcagcaattgactagcgatctccaaattccagagaactggatctggatgtccaaggctctttatgctcgaaatattggtgatgctgctcgcgaagtggattgtctggtccgagggaagaactggaacgatgcccatgccactttctgccgcattgttggcccaacggcggtcattgagcacgactacaagactctcgagactttgttgtctggctttggcgagacaccagagcaaaaggtgcagggttgggctagtggtggcggtgtctacgaagacttccttcgtctgattactgcgcgcggacaggaccctcagcgcctgaaccgattggtggatgccttggttaccatgggtgatgttattaacggatctcgagtggaagggttggaagagcgcgtggcgttcaaggagatgagccgtatcgttgctggctggaccacccaggaggacgtgaaggtgagcttttgccatttttcaaaaaccacaaacatgattctaaccttattacaggcaatggagatgtcacgtgtcctgaaacttcctctgacgggtgatgctcgtctcgtgcagacggcagagatgagcaggcggtactacagcgttgtgatggccgggggttactgagatctgactcgagcaatttaaacctctctagattcgattgtatcccgttatctcctcttgcattgacttgacgcattgtcttatttaatcctgtattctaacttgctcacattgtttactgttgcccatcctcttgcccttgtctcttctaatgaagccatgctgacgctggagaatattgttattgcttatttcgcatggcgtgttttgtctagatagttttttagtagtagaagcccagaaagaaaactacgagatgagtattagaacccttccctcccctttcctctgtgttaataagtccaaatgccggtcccggcatatttactgccctggaacggccttccaagtggaaatgcgccggactgtgagacgcttgcttatgctcttttattcgctttctctatgtgtacaacactctccactcgctctttcttgctctgcgttctttcttgatgtcctagcgggctcatcatggcttctgagaggtctggctatcatcaacaccatgatcgagcctgtccctccattgagatagacgagattctccccaccgacgagaccgttatcacgccgacgacgacctcctctttatgccagtgttcgtcctccgcattgtctaatgcttctctgagggcaacagctcccccgcggaaggctcagccatgccgacactcatgccaccaacacgatgggaccagaaga

SEQ ID NO: 5075 - DNA, 2723 bp, Emericella nidulans
gatcgctattcagcgacagtgaagcactcgtaggctctgaattgctgcgctcctgctcgtcatccgaagtcggggcggcagggcgcatgcgtcgtagacgacgtgactgttgcggcggcccatagagttgcgccgagggatcggcgtaaaaaggtgtcgatgctgaagttgtactcgaggactgttgcgcttgcaccttggttcttctcccaccgcgccgggatttcatatagacgcactgtagcccttcagtccgacagcgggcacagacgggagttgtcgcatcacaccgcatatgctttgagcggcaggggacgcaggccagagacactcgacgggtcgtggatgacgctttttcggtcattggtatcgtttacattcgttttttgcttggagacgattaagtacgggttgaaggacggtcaaaagcaagcaaagcaaacaacgcgaagcgacgcaaagcggggatggtagagcatttcagctggcccgcggtctgccagctgctgactgagagccaattcgtcttccactggagttgatccctgcatggcgcaatcagtcaggattgagtcagcgtggctgctttctggaagggccttttccgcggtgcggcggcttggggcgatggtgtcatggactgtggaggtgagatcgcgcagatccacggatcgtcataggcgtgactgacttgacccttaggcacttcaatagtaattcggccgattattgagtttttctatgtcattcaaagcattccccaaccgttgaggtggcactcagggaacagtcctttctgacggcgcgaggcggaggcgcactatcccgaaatcgctgctttctcactgtcgatctatacctagtaccaagctttctcaagctttccgaagttttcaattacagggggtcatgcttcgcttagtagtctttcaggctttgacaaaatactagcttgaaacggcccagtcgacggatatgaataccaccccaggtggcgtgaggtccgtcaacaagaattcattggacaaatagatagcacgaacattagattattccttcagatacccaggaggtctagcttacgaagccgaaaacaaagcgcggtcaaacgcctccactggcttctggtcgttcgacgggccaacaagccttcgcagatcaatttcgtattccatctctagactttctagtagagacgacgtgaaactacgtggatagtttcgatcgtcttgtccacaatgtgtgctcgcgtccgcgaatctcaatatcttagattcaccattactcttgttcgtcccctggacataaagaacagaattccggctcacgaaggccgaaacttcgattgctgaggcgttgaagacttcctggacccgcaggcagtattgagattgaattcagcaaggtaaatatcgtccggcgtcgggtcgaagacatactggtctccaagctcgaacttggcgtggtagtcgatagccgaaatattgcgcaggtgaaccttcatggtagtggtatcgtgcttcagatccccatttatgcatgatgccataaatgtttgtttaccgaatgatgtaagagactgggcgccgggaatgatctcaacgacactatcatccgtagtcgatatcgcgacggcagggcgactcggcgaacatggactgccacccaccagtcatcttctgcaatataaatcgacatcaaggcggcaccccaaagggctgcctcgtcgacgttattcgaattggcgatcctggcggtcttgttgaaccacccggctacacggcgctgaaggctgggaaggacccagaggccggtgtaaagatcaggtctgtgatctgtgatctggctcgccgataatctagccttggtcagggcattgtgagtagcatggatgctggctatctggacgttggatggcaaacagggtttctcttggacatgggtggttttagcttccttgttctcgagattcggttttcgagcgtgagatcgtcaagaagatccaatacggcaccgtcccctgtcggccaggcggagactatctctttcaggatagctcgcttcagaatcattgtatactcagtgaatggatagggtatcgaatataccgtcctcgatttcgaggaccgtaaacgtgagagtcaacatcgttggcaagatcatatatcaccgcataccgttcgcctttgcctcagatagtacgcccaagcccagcgcaatggctatgctcgttgccccgcgcatagtccggataattggtagattaagcatgcgtcctgctgttcgacatcgtagacgaagctgtttaccgtgttcatgccgctatagccatagggcagagggagtgccacaacagcgccggtaatattgatccggggaccaggatacaattgagcaatgtaacgcaggtttgcgaggatgggagcgaatatatctgttggcgtcaaggaagagtttgtgccgtctaaggatacctggagtgtctggtggcccatttgcatgttgtagctgaacatatcgccaggccgatcgtatagcgtactttcagagctctcgtcggcgaagtgacttctataaagtagatataagtctatccattagacttgagaaaaggcttgggtattacgtatccattgcagccgtgagcaggttcggaccacccaaatgcttcgcttcatcgccagtaactaagccccgcatgggtcgcgttacttactatggga

SEQ ID NO: 5076 - DNA, 3116 bp, Emericella nidulans
cgctgagggatgtgcaggcgcgcagccgtggcatcagtggctctgctggtctcggtggccatgcggtcttagtggctggggcggtctgagcggcagtggtagctcctccggtcacgctggccttggtggatggtctggtcttagtggaagtggcgatcttagtggtggattggaaggttctggtagtgctagcggttctgctggcattgggggttctgggtcagctggagggtctgcgggtattggcggctctggcagcgccgaaggctctgctgaaggctctgctgaaggctctgctgaaggctcgactggtggctctgctagtggctcaggtagcataggaggatctggatctgcaggcggttctgctggcattgggggttccggttctgctgaagggtctactgaaggctctggcagtattgaaggttctggcagcgctggaggctccgcggaaggttcttctgaaggctccattggtggttctgtaggaggatctggtagcatcgaagggtccgacagtgctggtagctctggcgagtctggatatggctccgactgtgacgatagtgatgtctcttccacgactggtgatgaggaatctgacagcggtgacgcatctgacaccggcgaaggtgatgcgagtgccgagggttctggcagtgcagacgcctctgggacggcgaaggctcagctgatgttgacggtgatggcagtgcttctgcatccggggatggggaaggttcggctgatgtcaacggtgacggcagtgcttcagcctccggcgacggtgagggctctgtgagtgttgacggtgactctggaagcgcttctgcctctgccagtggccatggctccgccagcgttacgggctctggcagtgcctcggcctcaggaagtggaagtgcctcagccaatattaactaaaatatcaactaaggcattccaactcagccttatcatctcggctcaccgtgctactgtggcggtctcattgctcaactacaggcttctgcctaaaagacgagttggaattactgggacgagattgattatccccgctgagccttttttagcccaatcttagtgctagatcaagaagacaaggaacatgtacctactatgttggaattcaatatacttgactagcatcaattcttactcatgattgcagtagaaactggtaatcactagctatgccttgagcaacaaccttgctgtgccgtggacacaaagaacctagaactgtattctcggtactcaccagggctgtcctctgtatttttcgtgatttcaacggtgttggagctatatggcgaggtcacctcaactgcagtgatcaggtcctggtcgaagaagagctgtccgatatgcgggacggacccgccagtcaacgtattgttctccaagagggccgcgtctagatgggcaaggacatggtagtgcgttgcccgacccgcatagtgtcctgggaagagggtgttgaatgtgacgacgccttcttcacccgtcttgctcacgcggcgcaggaaggtctcctgtaagatggagtcatcctcggagtttccgttgccgttaccttgggcgcccgagtaaactccagttgcattgcagttccatgtttcggcgtaaataccctcgatgggctgacaggtgctgacatcgacgaactggagatccagaacaacagggacaccggcctggtcttcaatgatgtctgtgcacgagctcgctgtccacccagaacggaccggtttctccctgggggttcagcacgcagacaataatcttcatttcccctattgttgatttcaagcaagagctcgccctccttgagactgctcgctggtggtagcgaagatccccggactcagaagtggacagagtgtaatcttctgagcacttgtggtcggttttggagacgtcatccgtgtcgcgggtacacaggagatgacgagcgcggtactgcttggccaactgggcgcggctacgtatggagcgtgcagtgaggccagactcctcaaaggaacgcgcacagttgccgaggccgcgaaggaggtgagccttggaggagaggagctcgcgagttgcgagtttctcttcgtggccaccacgaagctgaccatggagaggagcgccagaatttctctccaaggaagtaggacataaataataataagacgtaaacggtgatgtgtcgaaagccgaagcagctctatattatgtatggatacctacaccaagagatacacgctccagaccttataaacgaatgctactaagcctggccagcaacggcagggcctcgacgaataaaaactttccggaccgtaaattagggaaaatttatccccctaggggaagagccagaagctttatattagctagtgctatacttcacacaagatgagaaggctctggcctcagcttgtgcctactacgtcattgaaaactgaacaggatctctactgctccattgcttgatccctcctgccctgttgcagtacatattgccgcttatccacaagcaatcataggctgaggggcaatagtcactgcaataatcacttcaaaatacaagtatgagatcgtcgatgccatcaaatgtacaatgtattatcagtttagctctcgcgttaccaggatgctggtggccagccagagaacttccacattatctctctgttaagagcagaaatctcaaaaacctcagtactttctgaccagccccatgcattcttaacacggtcgtcaggtatatatagagctggggatccttctgggtgccatattgagacgaacctcagcattcccttcctaatgcccgtccttttcgacaaatattgcaaaaagttgaaccgagtaaagtaagcctcttcaaacaaagcacagtacactatgctggtcaaacgaggcatatgacgtgctgcatagcccattgctatacagaatcggtgaaatatctcatgttttatcgtagtacgaaaatcgactagttcaaataatagttcaccttttggagcaggcttggtgagtatttttcggctatttagctcgtgggtcaagagagaaatggattaatagacccaaagaaaggtcttacctgttggaagata

SEQ ID NO: 5077 - DNA, 4084 bp, Emericella nidulans
ctctatggtctataacctgacatttgactaccggtttgagctcactaatcgcgaggattccacggtgaacatgcgaatcgactatacaaatcttgtcccctactgggacgatttcaccggtgaggaatctggtactggaaaatcaaagcgagagctgcgtgcagagagacgctggtggggaggattctcgggccggactggaagaaagcctaaccaacccgtaccgcctctgtcgggacataaaggcaagcttccactttctatcaataagaggatgcttttgtttagcaaacgtgcccgctgctcgagaaacaatgtgcggctggaagccggaatggatgtcacccttgatgcgaaattcgacatgaacgcccgatggtcctactatgcacagggaacgattgtgcccctgagcattgataccgtgtatgcctatttcgaagtcaccccggaagcccgggcagttattgaaattgagggaagtgcggaaatgcagtacaatagtccccggatcaaaattattgacacgctctcatacccgggattggccattaagggcattgccgcggtaggccctacattggatctctacgcctccatggaagcctacgcgcgggttgccgggaaactcaccggcggggcaaagattacttttccacgctatgagatgtacttccctcagaatgacgattcggaagaattccagcgattcttggaaccgaataggatgatgagcagcgcgcctcgggtacagacatgactcctattctggacgccagtgtcgaggccattgttcatattgacttcaagatcacgcctgaggctaacctgggtattaaggtgaattctcctataggaagtaaaagtgctttgctggatgcgcagatcgttggcttcgtgaacaatacgttgcgctttgaggtccaagcagaagcaaatgggggtattgagaatccgcctgcggcatcgtatagcgtgttcatcaagttcttttacaacttcggtgggttttgctcttcttattcaggtgtgcattgactgactttgaataggttacggtggaagggcaatgtaagttcaagttggaggtgactctcgagctcaaagctgacattgtctagtttcaagtggctgggggattacgcactcaagcgtatgtatcgcaccccatgctagataagattaatgctaacggctcccagcaagaaccctttggtctggtcttggccgcgagaagatcctctgggagcaccatgggtccactgcagcctccaagcgaggtctcctgccagaagcagggggcccagacaggtttattcccttgtataacctatcttccatgtcagaaacagacgggattctatcccctcgctcgctagagaaacgagtaacgctagaagatgtcccggccttcaacggcggaaaacccttcttcacctgcaacgacggaggccagtgttcgagcggtgggtgcgcgggcgacgcctgtgagtggaatccaaatacttcccagtcaactagcaaacgccaaggtgacgatgacaacgacgatggtgacccaatggacgtcgacccaacccaaagctgtgtgaattccatccccgccatgatgtacaactgccgctactttcccgacgagacactcccaggatacggagttccaatcggggggatctgccgcaacatccttgaaggcctcagcaagaataatctagacggacaaccattccccttgacatacagtatggccggaagcacagaaagggatgaggatcgtcgctatgttgcctgtgaagggggctctcgccacgactttgttatcgttgatcgggagggaaatatgcatgattactacgacacatgggctcggcaatgtattgaggaatcgaacgtcctctcggacattactggtgatgatccaggggagccagggaacgacaactggcttagctgtgacgagttcccctttaacagtgtggaggaagggggccaagactcgacccttaacaggatgtgtgtgcctgggtaccagcagtacattcaagggaatataaatcagctcccacgacgagtcgtgcaggaagtttcctggatcgattcgaaaggaaacacaaaaacggccaccaaatcatggacgcaggactggcttggttacaatgccaaaggacgccagggcaacccggacaaagattcggcgtggaactgggctgagaataactggaagagatttacctttcatctgttcaactccgagtctgatactacagtgacgggatcgcggtacgaggtcttcaatcacaacctcgttacgaagtccggcttcgagagcgatatgggcaatgtggttgcggccatgaattttttcaacaaccctaagtatacatacgaaggcttcaacgcctggtgtcggagcgatagaaatggacggaggaatcacccgctatggggagaaagataccccaattttgttcggatcaaggggtgagtttcttctgaggccttgtccttgtcaacttctaacgtttgaatagatgcaaggtcgaatttgacaatggggctgtgagtgcaaagatcaagagaggcgagcagccgactgtgaaggaaatgtttaatatcacacgtacgtcaacagaagacaagatatcatagatatagctgacagcgcctaggtatcgagatggtcgatgatgcgcctgagatcgaagtcccagtaccagagggtgtgcttgagaattgaagaaggatattaacccattccaccaggggtaaagcaattagaaagagataggacccagaatatcaatcccatccaccgcccccagccccatgatccatatacatctccacgtccgcctcagggtcctgcgtattctctgtcaattgctgcccatcacaccaatttccgtagctagccgaaacccagtccgccccgttcctgatccggaaaggaagaacctgccccttgtggttgatcgccagatgcagaacccatccttcttcacacgccttgcgatctgcaacaagcacaagaagcatctgccgtctctcagcttcttcagcaggcggaaggtcatgaaggttctcaactcgattcccttcgatctggtcagggcaatgcatcaacgcggccagaacatacgagggcatacatccaggtctgggaatcgcgacatcgtcggaaaattcaacgtctctgctctgagtagaaagaagagaggaagaaaactcctccttctcatcaaaaataaagaacttatccatcataagccccatatccccataatcggacgaaataacctcaaccaaatgcgcataatcgtcatccgccttctgctgactcgctgggtcactaggtcacccgtccacgtccgataaagaacgtgcgctcgatctgcccgtcatgggcgcgttctttgggagttaagaggttttgggggacgttgcggggatttcctctggcaaggggattgtgccaagaaattcctgtacatccattattatctagttgtttatttgggataggaaataaaggactactcttcgtccgtatctgccgagcttaatccattctttgacaagttgtttcttttgttgcatgacggagaggggggaggctgggttccattttgcctgcatcattcgcgtcattagtaacagcagcacaattagtagtaccttggtcaatgaggttcttagatgtggcgagaagtgagacgaaccatgacataaaggtcgaaagggagggagccgaattcggggaggtcgaggccgttgaggtcatcttctgatgccattcttttaggtgttccttgatgatgcgcggaggggaattgcagatagtaaatattaaataataagcaatggtattaaatggcaggcgcggagggaggggtatctctagttagttccaaatggagtcttggagacttggcgtactagattagggctagctggagccttagcgtaagtaatatcagagatattatagggctactttggtctagttcaaaaaacacccttcgaatggatttgcctgcgagcgaatcgacttcttatagaggtctagagaatagattccagtaga

SEQ ID NO: 5078 - DNA, 5920 bp, Emericella nidulans
gcccatacccccggggaatgtttcaaagccagtaccacctgcccacttcatgttgctaataagttgctcagtcccgacgtgattgcaaattagatctttatcgccgctgaagaggaggatttcgatacccgactcgagcaagccggggagcaatttgactgatggttcggatttttgcggccgaaatgcggcccccacattgccgtcacattcgtcccagcctgactctttctctgggctgatattcaatgcttgaatcacctcataggtatgtaaatatggcttcacatccaccaagtctggtggccaggtcgtaccacaagaaccgtccctgagccgaatatcgtacatattgatgcattggttgttcgaatccacagtcttgtccagaagcttattcaaaacagcttcacagtccgttatggatattttaggtccagtttccatcttagacttgcagatagagagtaaagtttcaagctcttttccaagcttgctaccttcctcaacaagaccttcttcataggcaaagctcaaatacgccggatattgttccgccggcgatatccaaccattgccaataagaagaccgcgaagattccaacgcgcactgctagattgcttttcgtggatgtctttgtttcgatcctgaatagcttttgcaatgtatggaatatattggcccgcatatgattcgccagcgatgtagatctgtcaggtcccgcaagtcagcttagaagacatcataagacagacatctaagttcggacatacatcatctcgctcgtactcgggaaacacggcgaaccatttctccaagaaagtgatgaattgggcagccatttcatctagctcatgcagatagctattggtattggcgaagctgaaaccggttccaacaggctgatcaacaaagagaagatttgcgaactcgtcccatgatccctcgttatattctagagtttcgttatctttcagacggtacgggccaatctccatcagcgcgccatccatggagctgcagccgggtcccccattcaaccagattattgttcgctggcgatttgcaatgtgccgattttgatagtgccagaaaaaaagatgtccgttgtgctccgggtctacctcaatatgtcttgaagggggaagaaagggttaaccgtgcatcgacgcgggaaaagggctcggtgtaaaactcacccagcatgcatctttagtaacgggccctctggggccccgggtaaagattccacataatagtcggctgcagactgagctaaaactgcgatgggattaaggaggagttgtgacaatgcccatattggatagaattgtgagcggcttatcctccaagagggttggcggaatgacaaaagacccattctatgagcaggagatcgccggcgtagtgaaaggtaatagttcagggaactcgattggaggtttcaaggactcattgataacggtagtcaaacacggtgccggaccagaactcccgcttcgtgagcgccgcgagcgcaatgtatatactgccggaaaaaaggaagaaccagcaaaagcacgagtgatacaaaagtgaagcagatcgaggggagatattagtgggaagaaaagtgaagaatactccgtttagaggaggatgtgactatggtgaaactgaggcagcgtggccattcgtaagcttcttaccaagccttaccttatcgggttccactcaaagcggccaagatgtattttagcgtacaggggatgtcagggtcggtcggcttgccgcatttgaggctcaaaagacttgaagcttgaagacattcgcagtgattatgtcggtgtattaagtgttcatctgtctctatgcttgcgctcaccttctgcattcacattcactgtctgcttcgctcaacaggctaaaaaagatcctcaatacttttctcagcatcctttttaattagttccaccatgccctattgccggttagtatgctcaggctgtgagcgagtttgggctacagtgacctacctcgggcatgataggcttgcccttgctgtcttttacgtagcggaaaggcatctcagtccgctcatgttcattgatcacgatctctggattgtcgatgtactgaatctcttctaagggaactgctagaggtcagtgacttaacgcaagcgatctctgaagctgcatcttatggtggttacctcggtcgtggacaaccatgcgggtgacccgtacagctgtatcagtcgtcatctgcacgggtcctagccgccttccttcataaccctttttcctcagttcagaagtacgatctggttccagctggtcagttcaacatattcatgcagctatctgagtcttagttacctcgtggagggtcatcacctgcatgtcgcggtcagcctagaagtaatctagattcgtagttcttgagggtgcgtacccagtatccctccaaagagaaagacctcaaaggtatcaccatcagcggggctaagttcgaccttagcagaagggtccaacaggcatatcttggattgtcggtctgagaagacctcttcgacgctgcgatgctcaacctcgagcccttttgtagccgccaggtcgtccggcatttgcagcgacttgggaactgaactcaggagaaatctgctacctgctgcatgagattctcgggcgatgcagccatactccagggcagaccatgtacccaattcgggatctaagtgttcaaccacaatggtaacgggcgtccgtccactcatattgaacctgttatattccggtcaacgaaaattgaaaaacagctaagcaatgggtgtttatctatctacctttgaagcagaaagagattaaagcgtggactaggccctggccgtggtgagagatgaaccgagttttgatgaggacttgaagaaaattgtgtgctgttcccgggcgagatattctgccgccgcaaggcctgggattgctgtcctcgaacagcaccctgtctcctaaatctataatctagcacttaaacttgatttttcaacgcccaaaagatgttaatcttcttgggccagtgacatacgagtctaaactgatacggctaaactatgatatacaggttgaagaattgtgaaccaaccctgggctcttttgcagtctaacaaactatatcgtgaagtaaactcgctccttcctcatttcctatttacaaatcactatttgaatcaggatagttatgtctggcaaaatccatggaatgaatttgatgcctggaacagaataatacatacctcatcaaggcatttcggcagcattaccagttttgtgctaaccacatccggtaaggtacactatgagataataccatgccggcccaagtatgggaccgatggtccttagacttccaactactattattctcccaagtacttcttccctccaatcctctctatacaatcctgctctcctcacccgatttccgtttcgctttctgcgacatttcttatcattttcaatacccgataatccgcttcggccgctcctacgtcttcgaactacattacatttccatccccgcccttggtggggtactctgacgacacccaacttacctcgtccaacctcccgctcgacgccttcactgaatcctaatacctacatacgactgtcgttcttccctctcttactcttgtcttcaacacactctcctcagatcgtgatattcgcggcgaccaataaagatgaacccccatcagcagaacaagatcgataccagcgtaggttttcctgattactctttgttttttttacactggactgcttctaaccgtggcctagaaactgagtcccgatgagcagcgtctgcttcgtctctatggcaagatgcctaacaagaaagatctgctccagaacaagctcaaggtatgtagtgactgactttcctcccgccgttttcgctcactaatatgcctgatctctatctaggagcggaaatattttgattcaggcgactatgctctcagcaaagccggaaaagcctcagatgtcggtgtgaccaacatcggctcacaacacccagttcccgagaacattcctcatttgacagctacctcgcctggtgcgaacgctgcgggcaatgggggaagcatcagcgctcagggtggacagcatattcctgggagcatcagcagccatccggggtctgttggattccaaagccgcagccccgtcaaggagggcagcttccttcatcgcggaagaagtgtggatgaatctgacaacgtgccccacacagcggacaataagggctcggatgaagctgtaagcccaccccctgctactgaaggcgtcccaatccggcgatgattgagcacaaaagacgatcgtttttcatgatcctatcttcatccacgctccctcccttatcataacagttaagttagtacaaaaagagcctggcgccttggttttcttctcttcttttgtgtaataatgttggtttcggcttcggaacatgttcacagttgaggggtcagaaaaagcaaattgactgtgcggggtattcgaaagcccttggtcacctgaacacctacagcatagggagtactttgcttcgccttgtttccttttgctggagaaaggaagagactgctggcttacggacggctgtctccccatacaatcctgttagctgggctcatgcagggtctgcgtttgtttcgattcggcgcttgcttggtcatgatattattattccctctgccattattcctcttctttgtttatatccacaaaacgttaccttattgcttgcttcgctgttaccatttatcttcgtcttacatatcttgaatgattctttgagacagttttggttggcctcgcgaatttgatgtttgccatgaggcgctgggctgtatttagtacagattgttgatatcctgggggtacttcaatcattatctaccgatttacaggctgccggaaagctagttacggcgaagtgctagcaggcccttaagtgaatcttatatcgaatttcttgtaatgatgcactattcttgataagcctctcattttgtttaacaggacccattcgccgatccattgccaccgcacaggccatgcatccaacgatgaaaatgatgaaggccaagactgagcggatgcccgtctaagcagaagcaagtcggcagatcttgggggatttagaaatcgaggttcgtcctccagacactgccagcgattaagtaggaagcctggaaaaatgcagttcagccactaatccaggctacatatggtacacaaggaaggccgtaaagtaagatagggttgagagcctagaaagtatatcttggaacatagatctgaggagaagagctgaaccgataaggacaagagtggatttggggtatatcaacaagaaaggaaattgcagggagcagtaggtagacatgtataaatagaagcaaatgatgtatgagggagaggcatcacgcagctgaataccaacggtactctagcagccagaagtggatggtaaccatgagaccctgaagggagacacggtgttgacaagatcttcgtattcgagggtctgttttccgtgtacctcacaggttaggcagccggaatgcatactcatactcagattgatcaagtgaggtcaaagctggaaaagaactggtcctagaggctttcgagaatgtgagaaagcagagtaactagaagtcgatgagttgacagttctggcccaggataggcggtagtaccgttcggtgcttccagaaaagacatcacctctttagcaaagtgcagagaggactggcactgtcataggatgcctaatgcttataggcgctcgataacaagttgggggagccgacaatcaaccactcgagaaaagtcattcgggcatggttagcgagggccgggc

SEQ ID NO: 5079 - DNA, 10001 bp, Emericella nidulans
catcatcgaccatcctcccacaagaccccagataatttactggatcgcacaactcgctaattctgtccttccccatcttctccaagacctcctgattctttagcaactcctcctcgagactccctccactctcgattgtcccttggcacgcctcatacacaatatcatgggccctctgcctccccacaaacggggcgagccccatcataacagcctcagccacaatcagccccttcgtagaatgtaagttcttcagcatggcctgctcatgcacaaccagtccgcccagagcgaatttcgtttgctccaaagcccccacagcaaggacaaaactctcgggaatagcaacccactcaagatgccacggcccactggcgcgctcaaagtccgcaaccatgccgtcgagaacgagagaggcgttcgagcggagccgttttgatgcggcgagtatgacttctgatgaaatcgggttgcgcttctgaggcattgtgctggacgctccgcgatggggcacgaaaggttcagacacttcgccgagctcgttggaggacatgatgatgacgtccaacgcgagcttgcccaaagacccgccaaggagcgcaaggaagttggttatttccgccacgccgtcgcgtgcaacatgccaggtaatcggcgggttcgtaagacccagttcgtcggcgagcgccttgcggacacgcaggccgtcatctccagaacccagcgacgctagggatcctgctgcaccgccaaactgcacaaataatgtacgttcgcgcagttgcttgaggcgctgcgcatgtcgctggaagccagataaccacacggcgcacttatatccgaaggtcacgggcagtgcgtgctggagatgtgtgcgtccggccatcggtgcatctctgtatttcacagataggccacgcagaaccgcaataacgtcgtctagtagcttctccacaatacccagcccctgcttcatttgcagcacggacgcaagatccatgatgtcctgcgtcgttgcgccccaatgcacgtacttcccagcgtcctcgccgcacatggcagagagctgccgcacaagtggaaggatcggatacccgactatctctgtctccttgcgcaatcggtccatgtccagagacgatgagagagctttgtctgtgaccaacgagccaatgtgcgaggggattacattgcatttagattgtgcgcgtgcgagggccgcttcggcttcgacgcagcgcgctatataagattcatcgtcaaagacctgtttctcttagaacttgtatgtaggttgttggggcggatgaaggaccttccgaatttcttctgtgccgaatagggtgcggaatatgctcgagtcgattgcgctgacagagccgacgctgcgcttgcctatgacgattggagcaatgcgaaagggtttccgagagatgcgggagagctgtttgaggagagccatgatggattgattgaggaagcgaggttgaggtgtttgaggtctcaagaaatacgccagaggacactcggacggattccggggccccactggcggtgttttggtaacctgcgtggggcacttggatagcttcattctccgcacgccttacggagtgcttgaatatgttacaatcatcgctgttacctttcgctcatccaaaatcttttgtttatgaactctttagaagtccttactagtctcccaagggcgagatctctatcgaatccacgcaaatagctccttctgtaacgaccaatccaatgccaccctccgaatattggtcatcagaagcggtgatttctacgccctgcactctcccacggatgcttgttccgtcagcctcaagcgcaaagtcatactcgccgtccacgctccagtcaaatgtcgccgaagcaagtgttatcctttgctcgtccttcgcctttaccaaggccacacgacgctcctcgacaaggagcaatgcatagtagcggttcaatccttgcacacggacagccatgccgacaggtgtgcccatgctgacctttagctttgggaccaagattcgatagttggtccagcctcttgcgccgtacatggcaattccctcgccgtgagattgtgacaggactaaagagtgagacgatatatcagggtgcatcttggtcacgttgttaatccacgagcggtgccacgcttggccgggctgcgtggaggggcggcgtaagaccaggcgcggacttccatcccatcgcaggctgtccagccagatggtgccgttgacagaaccagggtcagtagattgaatgcataggccgactctctggagtggccggccgtccgtttcgtctgggattgtccatgacaaggactgcagactcccggagagggcgctgatggacggcccgtcaagaatcttgatgctgtcatcttcgccatatgcttgcactcgtaatcccacattcgctgacgagccggactcaatgttgctcaagaacttggcggaaatggtttgaccagggtaaaggagcggcgatgctgagaaggaatacagcgacttcgtcaactcctccagtgacccaaagacaggcgtagacacttcgattaaacttttcatggaatcgaggtggattgccagaccagcgtttccctccacatcaacgtcttgtcgtacggtaacactgccacggtcatctggagtatgctgattaacgacctgaaagccctggacacttcccggcagtccaaagtgaaactgggcgccgcccttgggcggaggaagacgactatgtccagcaagctgccgacccatgttcacaatatcgatggcgatcctggccgcattgttgatagaatagcctacctcagccgtggacagtaacacccggtcagccagaggtcctctccagtcatacttcccctcaaagcaagtcaggccgagcatgatagcaaccaagcagcctacattgcccgagttacagtctgtatcccacccgcacgtattgatgatatgcatagcttcatcaaaatcatggcccgcgtaaatgacggtcattatcatgattgcatggttggggataacatggcaaacaccatggaacttgtcatatccgtacgtgtcctcgatccgttgccttgtcttgagccagtccctgtcatctttaacccattcgtgtaccctaccaacaacatgggctactagcgaatcccccggaataacagacaaacccgtatccaaaagatgatcaatgtctttcgacacaaacgcttcagcttccatcgcagcccacagttgggcggcgtagaccgattcgccgtcgtgactcacagagcctgcagcatgcgccagcttggccgcctgcaatggatttcctggagagacaataccccacccgtcgatgaaaatctgagcgccaatctgctcagaaacggttttcccatttgtctggcaggagccgcttgacggcgcgtgtatcccgttcttgaggttcaagaacgccgtatgttctgtggacacgccgcgtcctccccaccagaagatggtccgatcctcgatgacggtatttagccacgtccgaccaatatcttcagaggtgattccatcggagatgccatgctcttcgagagcccgaatgaattggaaggtgcccgagatatcatcatctacgacgacgagcggctcgttgaacttgtcgtgcacataatagcggatgtggcctagctctgcgaggatgcgttgatgggtccatccttcaaaagggcgtcccatataaactcccaccagttttccgaggacgcctgcgtagacacgttccaggtagtctggaggtaagtatgtggagggcttggcttgtggtgttgaagtcatgatggatgatgctctattattgtagaagcttgaagaccgttaagtactgccaatagcggcctgtgttactgttgattgcggtgagctcgatgatgtggtcacgttcaccccaggtacccacagtctattcaactcaccagcactataaggaaatgggtttatctcactgcaaagaactgatattgatattgaatctctgcatctttattaactaggaatcaaagcaaattgtcgatattaccccgatttgaaagactttgctcctttcggaggcagatttcatagtatcaatgtacacatttttgaacaaatatggccacgtagttgtcaattagagtcaccagggaagacgccaatacttacaatgaactgcaaagtaatggtggggaggaatgcttactatactatgtaaatctctccacagtaaatagagggaaatggggcagcgtgaccccacaccagcgcatctactccgcacctattctcgtcagtaacacattcatttttataaccatcaacagctaaccttattttctgtattttttgtcaaactatagcgataccgaagttcatagattatttcatattactacaatcatgtttcgttctgccttaaagaaaacccccaacgacatcgtcctcctctccgccgtccggtcacctataacccgcgccttcaaaggcggtttccgtgactcgcacccagaggacctcctaattccaatcctccaggcctcacttcagcgtgccaatatctccccagacagcgtcaatgacgtgctcatcggcaatgtccttgcagaactcggcttcgccaagacgggtcgtaccgcactcaatgccgcgggctttaatcctacaaagactacattccacaccgtcaatcgacagtgcagtagtagtctgcaggcgattacgcatattgcgcacgcgatcgcagtagggcagatcgaggtcgggattgccgggggcgtggagagcatgagcaggaattacaatccggctcggggcattccaagagacgtgagtccgttgttgaaagagtgtggagtgaaagaggcgaccgattgccttttgccgatgctggtgacgagtgagaatgttgcaaagaggtacggggtcggtaggacggagcaggatcagtttgcagcagagagccagagaaaggctgtggttgcgcaggaggagggtaggtttagcgagatcgtgccggttagggcaaggaggcttagctcggagacggagaatgagacgtttgagtttgtcgatagggatgatggggttaggcagggggtgactgttgagaagttggcggcgttgaagccggttctggaagggggtgcttctaccgccgggaactcgtatgtcttcttgcctatgccactgttctatgctaatacgtagtcttcagctcccaaatttccgatggcgcttccataacgattcttgccagccgcgcctgggctgaatcccacggtctaaggcctattgcccgttttgccggaacccaggtggccggctgtgcccctgacgagatgggcatcgggcccatcgacgctatcaagaggctgtacaagcacagcggggtctcacagagcgatgtggatatttttgagctgaacgaggcgtttgcgagccagagtatccattgtatcagggagctaggcattgatatggccaaggtaaatccgaacggaggagcgattgcactgggccacccgatcggcgcgacaggggccagacagacggctacgttgttggcagagctggcgaggtcagataaggaggttggggtggtgagtatgtgtgctagtacgggaatgggggttgcaagtttgttcatccgggagtagctacacacctctgtggtagcgagtatataattccgagtaatatccactctataaagcaagcgagcatctagtgagaatagtgacaacagtagatccaactatatttatcattctaagcataaaatcattcagcagcaacagcacaataccgacccgaggaccagtaactcaatcgagcggaggatactaatgccaatctactctagaacagcctcgatcagcccgaaatggtcaggcatcgtatggatgctggtgatcttcagccccgccttcgccaacaactgggtccactggtccttcgtcctctccagcgcccccagagtcgccatcatgatcatatcttgccaagcagtaatcttatcagcaccggtttccggcactacacgatccaaaatccacagctttgagtagcccggcgtgaagctggccgccgtatgcttcagaatcactaacgccttctcgtccgcccagttatgcagtacggtcttgaaactatacactctagccccctggatcggctgaggagtaaagaagtcgtatttgacgtacgtaaattcctcatcgtgtagatcggcaggaacctcgtcaacagcggagggccggtcttcaacgacgagttgccccttcgtcacagtataagggagagactcgagttccttcttgacgtggtggagatcctgtccgtagccgccgccgacgtcaacgaagaggggcgcagtggtatcaatgtccacgccgtcttcaaagaggagcttgccgatcttgaattgagtcgcccagggcgcgccggctgtgcgggggatcgtcatgaacatgtcaaagtcgcgctcgtgttcgggatgtgcggcgttccactggaaatggccgagtttggtctggaagctgtattgaaacaggccgtcttcgtagctgttcgggttacggtagttggtttccttaaggaatctggggatattgtgtgtgctttggcttagcaggtggctgcaagactgttagcctggagctgcaatgggagaaactagacgtgaaaatagcaaataccaataacggaggccagctgcgaacgagggatgtgcaaggacattcgaagcggctgttggagcatagctctgcggcccggtttcattgatatagccccatgctaccgcgacgcgcatgagacgcactgtcaagagcttggtcagccctagatcactcaagctatacattgactggtcaaaacagcacttgaactcacctataagattgtggtctgcgccagtttgctgcgcgagtccggctgccgtcagcggtccctgagagagtttctgaaagactcccaggttctcaagggttacaagggacggatacatggtgatctataaaggttggtcaaccgattcgcttattgaaagcagaacttacgctggaaatcaggtttccggcaactaatagggggctctggagagcgtcgacaacagactgacattgtcgaacaatctcaccgtgcgagcttgcatcagaagcgtcaagtgacgccaaatgtgccagagctgtcttggctttgtctactgcgtgatcagacatcacgaatttgcgatatagtgcggataatagaatgtgcgggcgaaatggagactgcgggagatggtaatctgataaagtcgcccaggtaagtctataaagagtatttatagggcatctcccacgcactcgaggggcagcgcttcgaggactagccgcagctaagatacaaaatgtgatatgttacggccgcctgcattgcctatctatatcaaaaagtagccaagcccagtactgactcctgattggttgctgcgtgggactatgcttgctgcttgcatcgccgaccagcagggatgatgcctgctggacggccccgtccaggcccgctccagcaagtactaaggtttactatcggtgacgtgagcactatgatgttgccgatgatcgctctgttagacctgtccattctcgcacgagctcaatatgaaggttgcaggaccgtgatgaaaagggacgagtatcgagcaagccttgcgagcaagtactggcataccgcggtcagtgcatcccatctcagctgtggatatgacctcataaatgagatttccctaataacttcatgatttgcttcagctggcccagagtacaggattttgacagatgtcagaagcactatatctatctatcaagagaccgttggtccactcgtagagggtcggcgacttggcatgactcgacggtacagctgtccactgcttatacgatattgtaactaccgtttgagcggctgagaaaaccaagacggagattatgatcgagaaatctccggtcgacgagcttacaccgaactggcactagtccaggaacggttagaccgcagggacgcatccgactaccccaaccgtgtggggccggaccactggaggcagggcataaatggctgttattagtcaggatttagtcagccccgttgccgatagtcctccccggcttcggatggcggcaaaggtcaagccgcagtgctcggaaaaggctttagccttgaaggtcttccccacgctggtccgatccgacatggagctcttattatttccccagtcgcctgatctccaagtctttctcacttcccgttctctctcctagcagaactgacttccatcatggcacgacccgtccccgcggtcgtccggccgttcgccgtatggacggcaattctccgcctcatgctcacgaccagctgttgacaagcggtgcaattcggctgccgaagccatcaaagacatgaagggcccggcgacggtccttgttggagggtttggattctccggtgtacctaatactctgattaatgccgtccgtgaccggcccgacatcaagaacctgaccgttgtttccaacaacgccggtatgcccggtgctggtctcggccagctgcttgagactggacagattagcaagatgattgcctcgttcatcggtgaaaacaaagtcttcgagaagatgtatctcagcggagagctttctttggaattgactccccagggtaccatcgctgaaaaatgcgctgctggtgctgctggtgtccctgctttctatacccctgctgcttatggaactattggtacgttgatctcccagcatacgagtggccagtattcacgttatagatactaattctatttgtagtacaaactggtgaactccccgtgcgctacaacaaggacggaacggttgcggaatactccaagcccaaggagactcgtgaattcaacggcaaatcttacatcctggaagaagcgattttcggtgattacgctctgatcaaggccgacaaggccgacaagctcggtaactgtcaattccgcaaggctcagaacaacttcaacgaggccatggccaagaacgccaagtacaccatcgttgaaaccgaccagattgtcgaggtcggcgagctccgcccggaagagattcacgtacaggccatctacgtcaacaaggttatcaggagcacggaaaagaagcagatcgagaagctcacctacgccaaggatcctagcgagatgctccaggctggtgagtcaaccactcaaatctgggacactgtagctgggcacactaactgtggaactaggctctggcgatgccactgcccgtcgtgagcgtatcgtcaagcgcgctgctaaggaattcgaggatggcatgtacgtcaacctcggtatcggaatgcctctgatcgctccctcctaccttcctgaaggtgttgaggtcttcctgcaggccgagaacggtatccttggtctgggtggctaccccaagcccggtgaggaggaccctgacttgatcaaccccggaaaggagaccgtcacccttgccaagggtgcttccctgtttggttcccacgagagtttcggcatgatccgcgctggccgcattgacctgaccatgcttggtgcgctgcaagtcagccagtacggagacctcgccaacttcatgcttcccggtaaggtcaagggtgtcggcggtgccatggacctggtcgccaaccccgagaagaccaaggttatcgtcactatggaacacaccgacaagaagggcaaccccaagattctctctcagtgctcgttccctcttactggaccccgctgcgtgtccaagatcatcaccgaccttgctgtgtttgaggtcagcacgaccgagggtctcacccttgtcgagcacgcgagggcgtgactgtggatgagatccgcagcaagacggaggctccgttcaaggttgcggctgacctgaagccgat

SEQ ID NO: 5080 - DNA, 5070 bp, Emericella nidulans
agaccattacactctttcacagcattgaatatgcaagcgttaagtcgtacaacttgttagagggtagaaaatatctgcacataggtatttagtaaagaccaatttggtgactgcagtaggtgctctgatagacatctcgaaagtccattatccctattgctgaaacaaatttggtctcatctatttgcatatggccagtaaacaagaatgatagaaggtatagaaccagtaatgtctacgaaatcaccagagtgttgttggtcacattgaaaagcctttgttccctccgcctcacctaaaattagggctgtacatcttcgatcgaataatggtaatatccgctacgatcagtcattatctccaataacttcaaggtttcaaaggtcctcgtcaaagaataacgagaaataacagttagtattaatatagctagctccctctcaacccagtaattaatgtaaactacaaacgagataaagatatgccgagtttgcgttcgacttgctcgacgagcttccatacatttgctattccgaaatctgagtgtctgataagctgtagtattcaacatggtaagatattctttactaagacaggtgtgaggtattttgtggctaatatcaacagagtgtaaaccaggatcccaacggtcaatctggccctggcctcgacttagctcctgttgcttttgatgccgcaacgcccgatcttcttgccgcaattggtgctggcactagttttgctccagatacattccctgctgtttaccctgttgccccagctcctcccgttccgcagcgtaagcagaatataagcgaggggttcgcaaatccaagaggcgacaatctctgctatcgaaacgccgaccttcttgcgctccttcatacgccagccttcagaacatgggccatgggaactcatctacgctataaccccctatatcctcaccacccaacttgcaaaggtcccacgatcccactggatgaagtgctgtctcccaacgagaacaagagtggatgtcttctttgcaatatttatacgctgtttacttggtaccattctggcaaccgtgataaggattgctatatttataagcaggttgagggcacgtcggtgacagtgaaaggcttccacaactgggcaatggacgctctttggcgacgataccggaagacgagagacgggaactgggcaacatcggggtctcagcaggatgtctttgagctgctggagagactgatcaaggcccttcacaggttggtacagcatctgccagcgcaccctattgcgggccccgacatggggcaacccatgggtctctttgtcagcaggatacaagacctcgagcaatgcaaaaactgccccagatataggaacttgggtgccgcggattactacatgtatgtcggtttgccgctaccacctaggactacattcgtgcccaagttccaagacatgattaattgggcctggaatcaggatatcatatctgacaacttctgcgaatgcggtgatctggaaaagagagccgtccgcaaacgacgattggaacttgcccccgaggtgctcatgttccaaattgagcgaacggtccagaatcagaagtcactccgtgcattcaagctcgaggacgagtttgaagttctctcttccgtgttaccagagggtcaggcttcgatcaagtacaatgtgaaggcagtcatcttccaccaaggtcctagcctgacagccggacattataccgtcggcgtgagagaaatcggcaccggacggtgggcatttcttgacgacgacaagccaccagttacttacaacaacctttggaagcttgttagtagcaaacagcagcatgacccaaaagcattccaggtctatgcggtaattgccgagaaggacaagggagaggaaaacgcaccgccatcaatgccagtttccgagagaaatgttgctagcctgctgccactgcacaggttcgaacttgatatccagatccaggctcgtcatgtagagcttggctggcttagcggtcgagcgagggtcccactacagcctgggcagcttccagaatcacgaaacctcgcaatcgaaaagatgaggctcgaacaggaactttcagaaacccggcgggagctatacgagcttaagaggcttagagactgcagaagaggctccggactcccagcagaccaacattactaacagcacagataatggtgaaaatcccggcactggcaacaacagactgatgaagctatgaacaatgctacaaacaaaaatgtaagcagtgatatgaagtatgcgacgagtaacagcagaagcaacagcgcgcacaatgctacagctttcacggcagatactggcgcggatagaaacaagcaacgacacaaacaatacatgagtggcgggaacgacgacaccaaaaactctgtcaaagaggtaggaatgaccgcctgttctgaagatagcatagacgttctgtttgagaaaagcaagcccaaaccatcctctccggtatgtttcactcaagggaacgaaatcatctctataatcccatcagccctcgccagctacctagtaaagttatgtcctaaaaccctagctaacctgcccaagggctattatcagtattaagggcttaatatgggaccacctgagaagggttgggggaagagtgatctagacggctctggaatatttgctggacagtattcctagtctgaccagagatacttgaattatttttaaagttcaagttgaagtattattatagtagacggctgattctttgcctgtcataatgtatataggtttattccgttttatggaatatatatacatagtgcgcttagggttcgtcaggctagggagtatccttgcacgtcttgccatgcacgtcttgacatagctagccctgcaacaggatgtctccttctctagtaaaatgtacccaacaagcatccttatatgaaatttcagagacatatgttaatagccctagaattggcgggtcagcgggcgcctgggcatcggactcgctttcctgtttgacaagacgggaagatacgactccaacgttcacgcaaccactgactcagtaaactgggattcaactacctagactctcagcgcttgacgccgccttactcagtagtggctcgttacttatttttctagcgaaagagtccaaattgagctagcaagacacccgattgtcaataagatacgtatctcgacatgtaccagccataccaggataaaaaaaatagtggaactccgaaacatcatctggtctatatgctatatcgtagaactgctaaaaatcttcatattaaagtgtcctggcttcagcagcaacagtctcagcaatatagtctcctaatgtccccttgactggctcccatcccaacagcttccgagcacgtagagctctgccacgcgcattggtacctaggaccacagccccatgggcaaagaacaaactgtcgcactcctgcggtgtgatagagcgaactgagcacggcttgtcggtgtatcccagcttgtagatttcctcagcgacaaggccagctatatttttgaaagcctattggtggtcagcgtacggttggaaccgatgcctgtacatgagagcatacctcttccccagactcggcaaagtatagtccgttttcatcccagaaatcatcatttccaccgttaacagccttctcaacaagttttacaaacagctgtgcaaggtccgcgatatggattgcgccccaccggctcagaccctggccaacataaacagcttgcttttcctgtagcgcgtttttagctattgaaggaacttgaatgctccgctggttcaccggtccactgccggtgccgaagataatcggcgggaatattattgccgttctgggaccgcttccggcaagaccaaggatgaagttgtcgacagcacggcggtccgggtatatgcgaatcaagtcgcggacggcttggattccgccgaggtcatcgtagactctgtctgatagctcgccataggcattggagtcgatctcggggcctccaaggacactggcacctgtgacctggacgtagtatgctgcatttattctttagctattcgttgtgggaaggagtaaaagcagaggcttaccgtcacgtcggtctttcaacgctctggcaatggcctccacactagcaatgtgcttattacttgcggcatctaacttgcttgtcagaatcacagcatgacgtggagagcaatgcacaaacgcacgaataacaatgtcactcttcttggcttcttcctcgatgacagaagtatcgtccaggttgccactgatcaccttgactcgaggataagctgcgacgaccttactcgccttctccgtgtttcggatcaacgctgcgatttcatactcggggtgagtattgtctagtgcgtgaaggacttcgcctccaatatagcctgtagcgccaagactgcaccagtcagggccgggtagtagaacaatattgctggcgaactcacagaaaaacccgcattatagagataaatattcaaacgtgccttttgtctttctagagtaagcggaatttgcagcttcagtgtaatatcgaaatggaggattcgcttatcagcattttgaaccctgtcactgtcagatggggcaggcgtttccgatacggattaggaaggccatttgacgcttttacaatccaagtaatagaactgcaatattgcgaacacaattggcctctcagagcgtgccacgaatgtctgtagcatctccttgcagggaatgcggtacagaaacctcttggttttctccatagtgggagcatattggcgtagattgaaccgctcgataatgagcctatgcttcgtatatcagctctggggccattaaacactccatatcggcattggagcaccatataatggaagaccatttaccaactgacaagaacttacatgcccatctgcgatccgcacatccacaacatcaagccatacagagagttgggcgggccaggccactcgccagccgacaagagactcgacacgttgagatg

SEQ ID NO: 5081 - DNA, 9436 bp, Emericella nidulans
cacatttatacttagactcgccttacgaatggtccatacttatcaggacatagtcggaccctaaatattactttctagctgccgtaacaaaacagcaaaccatagatctaaaacgagacctaacgtagcttctaggggcttcacaaactgcgagggtacaagtacacatacgtcctagatatgactaggtgttgtgtgtttgacaagaataacagcgagcttcagtaagccccatgacttctgcagtggccacggttcgccggcatcccatagtatctacgtcagaaataagagtatgcgagacatagatcagtctcaaatccgattaatcaactgttgaaccaaccaggtgttcaacgaggcaccacgcccaatagctagttctttagttttgaattaactagatccggcctacttccccttacctgagctcaactacatctatccactagcttagaagccaaggagtggagatacttgatgttccttttatcccctaatagccattgcaatacccttggtcggtacatatctccaacagtcactctccatccgcatcctcttgtcgtcaacttcaaaatagatcacgtaagggaagcggatttcccatgctgcgtcgaacatttccggaacaccttcaacgctggcgaatacacaggccctcggcatcctgtgttgacgtttcccagtaggccgcagaaggttacgttattggtgccactcggtctagtgtctgatgtcagccagtaactggggatatactaccattagcgagtcaagtcacggcttttctgaggattgtctgagtttgagactggcgagccgtgaaagactaggagtgatgtgggagctgccggttgcagtgttgattcagggaggattgcattccagatatccattatcaatcatcatgctaccattgcaggaaagtactgatagagacaggggtggccataactctagtttcaacgtctaaagtcctgtatgaacgagacggcttcttgagacagtctgttgacgacggggcggccagcaatacggttcaattcaattatcggctcggacgtacgttgagtgtcaatgatgtctttcacttaacggtgttgataatgatatattcaaagtctgggttcgcaactagcaaaatattgatcgaaaggagggatatgagtgcagggcttcgttattaacgcggtgctctgttgtgtatgaggatacatcgcgttgacttcaaagaggtagtctgccttatttgagaccattgcgacggtgagcaagactccaaccaagatctcaatctgagtggttggccttttagacaggccagactcgtaaagaggagtctaggctcactgacggataagcggaaagggcagttattgggagtagttgtatagctccaagttattttaggggagcagtttagggctgaagctgggctataagaggagcaaatcttgttcttcaggatagaaagccccagttcactttcattagtacctgcgagttattgcagtaaacaccttgaccagtcgaccgtaatgactcctaagattgattaggctcgtaccaaagtgtatatagttccaatcaaggaagatcgtcggtagatcttagtaatcacatatcacgtgcggggcctcgcctcgagcgctgatccaccactttcaggccggggaaggcttcgtttgttcctggctaatccaagctcaacgcgcgccatgtatcttttggtcggttgatatcacagctggagtgccgctatcacgctcagtagccaccgagcgttcgaggcactttacctgttgatccttgtctgaaccattcttgttgatgtctctggaaagttatatcgtcgatatcaccttcttaattactatacccgatcatgatggatgaagccacagcatccgctgatgcttccttggaggatcatcacatcgtgaaagcagatgaagtggaccagacaggaacagacattgtccagattccggatgatcagatgatggaagaagttgcagagggtattcgacaggagcaggcagctcaaacttcggctactacagcaagtaagccatcagttcagatgcgggcagcaaatgtgcctatgtctagacgtcctgaactgcagcggaatacttcagctcctccgcctccacgtcaacccccgccaccagctccggttcagcacaatcccgacgcgcctacggattcgctgagcctggctcaattaaaacaactggtccaggagatgccgagggccgaacagcctgcctatgcatttgaatatgctgactgtcagccgtttccggaagagcttgaggagtggttccagtatagcgaattcgatagagccatgattcttgccatgaagagctcatttgagcggacgtggagcttgttctgtgaagtgcaaccttctctctcttccagtacgtcttggcttgatgctcctgaggcaatgcagaagttgttcttgaccgaggtacttgataatttgcaggatagcgaacttttggtccgtcttgaagctttggaatctgtgtgctacgttgttaccggagtgtggggaattactgctggaaagagcacgccggactatcctcatgattccccaatcgctgccgaaaatgccaaatccaaatctttgcagattcaatggatagtgactaacgcaagactcattcacgaatgttccgggctgccgtcgctctatgggtgcttgctgcgggctttcgagaaatcccgcgtgtcagccccctctgagtcaaacgcagcgtcagaaagcgctaacccaatgctccttgctgcagcagatcgggaggcaaatctggttctgactgccttttacttgatggttgaaacggcgcgcatgcaagaaacacgagaccctaagcacacgccgcttagagatgcgattacagcgctggagccagacttgatggtatttttaatcgagattatcgcacgtttgcgatgggatgacgcttccaatattcccctcacgagaattattcttttattttggaagtgtatacttctcttctttggcggtagtgacatgctgaagcaagccaaagaaacattggaaccagctttcgactgtgggaagaatgacccaacaagaagaacacccttccttactgcatctccgctcgattaccacaatttccggcaagagatcacttctaaatatcccgcttactagcagcctccgcctgtgatcccgttaaagctagaaaataactcaatacttcctcctctgcctcaacaccccagcagatcatactcttctaatggcctgttctccggagttggaccttctgtagctggtggtaacggttccatcctgcaccagtcggttcatattgcaacgccagctccatctcttccgccatctcctatcggtcctggtggcaaggcaggaaaaaagcaaaactaccagaccaaccagaatttccctttcatgtatcctcccttggataattctagcaataaccttggaggcaagggctcgacggaaatgcaagacgtgctcgtggggaagaagtgggatggtagcgatgttcctgcgtctgttatcgaggctggtcagcttttctcaactcacgtgaagatgacaagggcaatgaggcaactctgggaagagcgtgagcggttcatgaagtacgaccgtgggtggcatgcagaaagagcttatgcaagtggtgatgtagatgccgaagatgagattgtagacgacctggaggagttctctctcgacgagaagaaagtgccgaagagcaatcccccaatggagaaggaaacggataacgaagaggttcagaaacgcttagatgccgttgaaactttctatgtgagttccactttttgcgtggttgaagagtttctgacccctaccagacacaagcactcgtgcatcttcaatccgttgttattgtgttcttgaagattgtgttgacgaatgtaagcgccctcgtcaacaatcaagccaacggacagaatggtggttctggaaggtatgtggtccaatgtgtcaatatctatgtctaacaagcctttagcgaaagcttcagtgcagtgcatgcgggtgcttccagcttcaacaacgacacggaggatctgacatgtgatgctacaattgatgagcttgacaatatccgagtacgcgagattacgagcaaagcgatctctggttctcttcttctcttgcttaagtggttcaagaggtcacgtaagtatacctgcatatactccgatcgtagctcaccgttactagatattttgaagttcgagtatatgacgcagctcttacttgactcaaattatttgccattaatcctaaaaatgttcgcgcaccaggaaatcgaccaagccgtagcacaacggacggatcgtgacgaattagggtatgtaataccttgattttgccatatatagtaaactgatttatctagtttctttcgtttctgtcacttgcattcggaacagccgccggacattaccggcttccaacaagatagtgatgatgaggcagttccccctccaattgcccgacacagaacagagacaggtcgagcggacagcgtagacgaaaccggattaggtttcattggaggacctcatcgtccagaagtcgatgagctcggatatcctacagcgccgccacccagtgagcctatcactaccttctctttccgaaatttcttctcggccatcaactacctccacataatgcagaaaatcactcgcgacaaagcccaccgttgcctgcttcttgtccagtacaaatccagtactatcctccgcaaaggactcaagattcccgaccccgatctccgcttctacaccctgaagctcttcaagtcgcaagtcccctattgtggccgcaaatggagacagggaaatatgcgtgtaatcacagcgatatatctttactgccgccctgagctgcgggatgactggctggctggatctgatattgatgcggaggttgaagaggcgctacctctcgaacaagccctccgtggtctaacacattggtggcatctacggcgctacaagcatgtcatgggcggtgaggaaggtgcgactatcatggacgaagagcgggatttcttcgtccgtgagcttgaggccatggggtggggctatgctggagacgagctgttgaatggggtggctgatgaagccgagctggctgcaggaccgctggcgaatgggacggaatgggatggcatgctacaggtggagggggcatagtagatctgaaatatctcgcatatgatgggacaatcacgaacatacatttgtagactacgaggtaaactcaaattctacttcatagtacagttatgtacctcgatttgatgaccaataagttagcgttcacctcttatcgataaaggtatttgtccaagtcacgtgcttgtagtctgaacttttttttctttcccgctaaacaagcttgcaacatctccgcagaaacttatttgtcttccaactccactgttgtttaactgccagcccgggttggcctacatgtaataaaaatgtcttccgatgagattgtctggcaggttataaaccagcaattttgctcatacaaactcaagtatgtgccaaccgttgagctaatctttcatcatcagaaactccctttcaattagttcagctttctgaaacccatagactaatgattttcttaccatcaggacaacaaaaggtcaaaatttctgccgcaatgaatacaacgtgactggtctatgcaaccggcagtcttgcccgctggcaaactctcgctacgccacaatccggtcagaccccgagacaggcgctatgtacctttatatgaagactatcgaacgcgcacacatgcccagcaaattatgggagcggattcgactgtcatcgaactacgcaaaggctctcgaacaggtcgactcgcgactgatttactggccgaaattcttgattcacaagtgcaagcagcgtcttacgcgactgacccaggtggcaatccgtatgaagaagcttgcgcgggaggaagaacggttgggagaaagggttgtgccgaagttggcgcccaagatccgacgcagggaggagacgagggagcgcaaagctgagagcgcggcgaaggttgagcgggcgattgagcgtgagcttattgaacggttgcgcagtggagcctatggtgatcagccattaaatgtggatgagtcgatctggaaaaaggtgcttcgtggtctggaaaggtccggtgagggcgagagagatgaggacatggatgatggggagcttgaggaggaagaggatgaagagggtgtcggggaggttgagtacgttagtgatctagaggaggatgaagatttggaagacctggaagactggcttggcaatgattcgggcgcctctagcgatgattattccgacgaggatgaggaggatagtgatgaggcgagtgggtctgaggatgatggggaggaggagcaaaagaagacgaagcctggctccaagaggaagtttgctgctccgccgccaaagcctaggaagaagggtcccagagtagagatcgagtacgagactgagggcgctgggaaggagaacgccttcgcttaggtgaaagtctcgtatatggctgatgcagttgaagtatggtggcagaaaagcaagatactatatcatggttttgtgacttttgtctggcgttcggttttcgtcctgttgatctctcgctgtctcgcaatgggcgtgtcatacccagcagttgcatctacatagctacacatctggctcctctctgtgttggacgtggtacataatcaaaattggcttgaggttctcaagaattatgcagttaaagttaaaaagcaaccactttgtttaggtcggtataccgatctatgccgatcacgtgcgggtactgaaacaaagcgcaccccataaacccatatcaactttcttccaaccctctctccgttccggacttttctccagtataccaccagaatgtcctcctacttctcctctataacatcctcttccgcaatatccaacctcggaacccgcctcaattctctccgccgagctatcacctccgacgaagcagacgaccctgacaacgaagactgttcgcacatctccaacgtcctccgtgcatactacctagagaaaggccgccgtctccccccatggctcccacctgacccgaaagaacgttcttcatcctcaactcgtgtgatcgcaacctctaacaacgtctcgtccgcctccgtatcctcagggcggggcggagggcttggtgacttgtggggtgactctggcagcgccgccaccggcggtccaccacagtcggctacatccagcttaaggcgtggaagaggacaccccgggtccagtgcgacgtcccttcctagccaaacgtcctcaagtcattcgccttccatgtcggcatcgtccttgcatccggctggagggaggccgatgcccggtgagcgtagtggttcgtatcagtctgtgactagtacgggttcagggtcgtcgcctggattggagagggctgcgtccgcgcaggaacggcttagggctagactgcatggtgggcggtcgccgagtccagggcagttgtcggatccaagtttgaggaagccggtgggtatgagcccggggtcgggaagatttcgggggtgagatactgggcctcgatggctttacatacctgggctgaggtctattcggatacccgctacggcggtcgcttctctcaataactactacggaacaacatattgtcgggtacgatatgacacggtaactcgcaggtcgacatgcttgccgtcatcccctgtggcactggtacgtattggaatgctagcggccttttctctttcgaaagaacaagttagtactgacttatcctacagtatattctcaatagcctttctacttcgagtcagcgctctaatcatccgtgatttcactttaggggcgttcgttttctgctgctcatcgtctgagccactgattgtttctcctttcttatgctgtgctttttgttatttgttgttggaatatgcataacagcggatgttgtcggttcttcagcctgttcgcgctcctttcctcactcattttggcgaattgttctttcagcatgatcgaattgactacgccatttaaaggcattttgttcggaggtcggtcgggtcttgataatttacggaaagactgtattgctattggagttagctcaatatattttgggcatgcagcgtgaaccgcgtaagaacggtgtgaacaagaagtaaatatgttacagcaacgacatccatttttggttggcattcgccattctaaagtcttgtggatcggtggggcaatgaagtagccgtccagcaatcaattaaggcagattgctttcatgtacaagttcattctttatgatatcactttctggatccagtatggagcctgaaacatagggatcaatcacattgattgcagtttatcatgtgactcgtgcggtagccacgcatcacaagggaacaggaataggccgcgagattttaagccccagacgtctgcgcgacctttacgaccacacctattactggtagcggctttttcttcatcgactgcattgtctgtgcaattcggcctacgtgtacatacctcaaatccggcccacagcttccgccaaccataagatggtcctatcgggacaccctggaagcaacgcaaaataaacacactaagcgggacatgacagctttccttgtggcactggagcctacggactgctcccgcacaccggaatacaaatttgatcccgtgctttttaagtgagtcgactgacagccgtcaaaatgccttcgtcctcggaatacctacgcgctcacgaccgtgcgagcatagagagtgacaatgatgatctcgacctggaggagctggatccctcctcggcatttaacgcatcacggctttcgcgggatgagccggttcaacagagaggtcatagtggtccagggatagctcttaggaatttgcgtgtgggtgttgggaatcgccgattatggaaacggagcatgtctggttcacagggggaagacacagctggcttgcttgaggatcgtgagggggaaagaggtctccgaccgtcgcatgcgagttccagaccctacaccgacgatgatgctccgctgcttgaccgccggggctccgtacgctctcttgcagatggaggacgaatgccgcagcggagatctcgattaggttggttgaaatcgagtacgttacttggcggattacatggttcgacaggaggtgggaagaatacagtggatgtggtgaagcccccgtggatgtccttgttgccaggcgcacgagcgaatacccgcaaaattgtctcaagcgaaattacgccgtgagcttctgc

SEQ ID NO: 5082 - DNA, 6943 bp, Emericella nidulans
caaactccgcaagcctcacagacatggttattctgcacgaacaccgtggtacccctactgcgatgacgatctcacatcttcctcatggcccgacagccagcttctccctgcataatgttgttctacgtgccgatattcccaacgctgcccgcgggactgtgtcagagagctacccgcacttgatctttgagggtttcaagacaaaactgggcaagcgcgtggttcaaattctgaagcatcttttccctccccgagaagctggaaaagttggaaaccgcgtggtcacctttgtaaataaagaggatagcattgaggttcgtcaccacgttttcgttaagacgggatataaggatgccgaactagcagaagttggaccgcgcatgacgatgagattattcgagatcaggggaggttcgctcgaaaaaggctcgagtggagatgtggagtgggcgcttacacagtacacgaggacttctagaaagaaggattacctctaaacaagtgtacctgtgcattctgggtaaacgactcataggagagttgtaaaaaagtttcggccggcgtattgggtgttacggagcattcactaggcaaccatggttactattgtatacccatcttagtaggaatgattttcgaggtttatacctacgatgaatgtgtgtcctgtaggcttgagagttcaaggaagaaacagtgcaattatctttgcgaacccaggggctggtgacggaattttcatagtcaagctatcagagtaaagaagaggagcatgtcaaagtacaattagagacaaatatatagtcgcgtggagccaagagcggattcctcagtctcgtaggtctcttgacgaccgttgatctgcttgatctcgtctcccgaaaatgaaaatagactctgctaagctattcttctgcttcgccggagcctgaagggcgtactagggttgcgaggtccaatgcattaatgcattgcagatgagctgtatctggaagaggtaaacccgaaacgcgttttattcttgttgacatggagctattaaatcactagaaggcactctttgctgcttggacaaatgaacgtatcttatcgagatcctgaacaccatttgtctcaactccggagctgacatcgacaccaacgatcttatatccagattcgtcaagctgtttgatgatttcagtaacgttaagtggatccaggccaccagctaaaatgacccgcaatccgtcatcagactttagaatctgcttaacgcgcatctgatccaagagttctccagagccgccagctccggaatccagcagcggcagcgtgtgatatgcccttcgggcgatgccgaactcatcaagcccaaatttgcggataacgggaaccggtattaacctagaccattcaagcggttcggaaccgtgcaattgaaccacgtcaaggcccagcttttgctgctgggctaggacatacgataggggctgattgaggaatacacccaccaacaaagcacgagtggggtgccgcaaagtcgtggcggaatggtcgaaatagtcaacagaggtagcgtccgtatctccttgtggcacctcagttggataaggagtgggcctcggggtggactttacaactttcgagatttgcaacgcaacatcatcgggaacagtgcgctttcggccttcgacgagaataatgccaattaaatccgcgcctgcttcaatagccgcgcgcgccccttcttcagtccttgtaccacagatcttgaccagaggtgaatttcgtgactgcagaggaagcttcttggattgtcctcccagaagctcagcgacgaatgctgcagtgtctggcgcacgcataagggcctctccgacgagaatagctttcacaccatccttcttgtaggcttctacatccttgggtccagaaataccgctaagtgcacaaacaatagtgctctcgggtacctggtccatgagccggctggtagtgccaagatcaacttcaaagcttgttaggtctctgttgttgacgccaatcacttgagcgccaaggtccactgcgatcttcatctcatccggtgtattgacctcaacaaggggttccatcccaaggctctgggaataaagataaagtcttgtgagaagctcagtgtcaagcattttcacaattagtaggacggtatctgcgcccgccagacgagcttccaaaatctgatattcatcgaaaatgaattcctttcgcaggatagcaggtctgttagtcagtccctctagacttgcacgcaccgcacgtaggtcgtcgatactgcccttgaaccattcgggctcagtaagcacggagataacactggcaccagccttagcatattgccgggcttgtgcaggagcacatgcatgctctgctatcaggccctttgatggagacgcgcgctttatttcggccattaaagacaaaggatacgctgattgtctaaggcgatcaggaaacgatatttgaggcggagcaacgctgagttcataggcagcctgaagatcagatgggcgctgagacggaatagttttctgcttagcaacagccgctctccggtgatcataaattttctccaagattgacaccttcttagtagccttcggagggttgggagcggcggcggtgaaattgcctccctgagcaacatcctttccattgccttcccaggtgccggcagtaagcttaaggaagtttctaaacatcgtttgaccatgttctgtcagaatactctcagggtgaaactgaacgccttccaccgcaaactgcttgtgtcgcacgcccataatgacagtcttgtcggcatcctcacccaattgagcaaaagagctcacttccaggcactcgggtatggtagagtgcgttcctgccagagagtgatatctggtaatgataaccgaagggggaagaccttcgtaggcacctcttccgtcgtgtttcaggactgacgtcttaccatgcagaatctctccggtaacatcgactttaccgccgaacgagtggatgatgcattgctggcccatgcacactccaaaaataggtatctttccagcaaaatactgaatagcagcgttgctgatacccgcgtcagacttagggtggccagggccaggactaaccaccagctgcgtcggctttttcgcaatcagctcctccagagagatctcatcgttgcggatgacagtgacggttgctccctctaggaccaagtattgatagacattccaggtgaaagagtcgtagttgtcaatgagaatgacattggaagcggtctcaagtcgtggcgccttggtgggatggtgcggggagtggtcgacgagcgcggtgtctgccatgatcgaggcttgggtagaataggtaagtcagattgaatctgaaataaagggaggaagggcgaacttaagaaggtatgaccgggtcgttcacttaccttgcttgacaaacgcaccaagttatcgtgcaccaagcagcagatgataataatgtcctcgttcctgtctgctaataagagtcacacttcgagcgccgccgctactgctacaagtggggctgatctgaccagttgcctaaatgaaccatcttgtcaaacgacacaaattttgtgctcaccgcctggacgactaaaccaaaataggcattcattgttgacctccactagctccagccaagcccaaaaagtgctccttcaatatcatcttctgtcgacctctaatccaacgcgctttcgtcggcttcaggcatacggaggtttcagcactccgtccgcttgctcattacatttgtttacttagaatgatatagctgtgctgccaatggctcccgttccggaagcctatttcccgtccctggacaagtgcttctccggggacgttcagcttttgtatgggcgcattcgctatacattgatggtctgctgctgattttgctatacttctaggtcttggaagagagtctttctttacgcttgcgatcccgaaagcatcaccgatgaatcccgggttttcgagtcgtttttgtcacatcctgatagcatcgaggtgcttctgaaccgcggcagcgtctttcctacgccatcccctaagacaaaatccgagtttgataggagaacagcagcgatccatgcggagaccattgcacaagcctcgtatgacctgaaggaaatcaaagccgatgctctttggttgagcgaaaaggctgggattgatgaaatcaacgcgcttcggatcacggtcttggaatggcaaacccgtcctgcttcacgtctccttggccgactcgctgatgaggaagccactagcttgaaacgggcagccggagtcgatacttttcgggtgtcacttgccgggccgagtttcgctgacatcctcaacgccagacccggtgatggaaacagtgcagccgagtttgtttcggagaagaatagacgcctgcgactccgggaactatatctgtctgaacgaagccatatcgtcaagacagcccgcaaacttctcgccttatctttgaacagcgacggtcatgataacgcgcctcggccacagccaggtaggccgaataacttgcacaaattgggagtgtccatcttcgaaacgaagatcactgggaacaactggcatgaattcgctcgagagtgcatcgacggcgtagaaaaacgtctcgcggcccttgatggcgagggtggttggctgggcgtcgctgaaagcagcgaggatattgagagcttgtggagaacgacgcttgtggaagaagtgtcgcatctactccagagtctgtttatgctgctccagtcttcatcggagatccctcccgcagacctccttctgtcttggctccgtctaatggttgacaatgttttcctcgaatccctccaggctgtatgtttccccaggtttcatctcttcaaagacttactaaatctcggcagccctgtgataaccctctagaacttcttttaccgcttcaaggctttgtgtgcctgattactctagcttttctaaaactgtccctttctatccctgccattcttgataaagatcagaggaatgatacatcctccaagccaccttattatctttcaaaagacgacattggccagatcaacgaattatttacagcagttgggcttcagtcaagaactgcaagtcccgcagcgtttgcatgggggcttattttgcacaccatggcagagcttgctcttaacgataaagagactcgggagttggaacagtatcaaagtgccgtggattccttccagtcaaacactcctcattcaaactcaggtcgcgctgccgaaatatctctatatgaagagctccttgaagttgctcgtacgccgcgatatagtattgatgagtcgattgcacttctcacttcggatgcaatgaggaatattgcgttcgataccattattgttctagcgcaaaagattgggccgtcatcgactatcgatgatatcgtgacgaatcgttgggctcgcatggcactgctggatctcatccggtcgatgatgatttacttggattattcaccagaaatcgttcagtctgtcttggctgtccttactgggcctctctcagactcagcatggcccttggctacgtcaccggtgtcgtcgaacgatccacgtttgattttcatgagagatgagaatttaaccagcaacatcctccacgtggcgcgctcgcggttcccttatgaaactgtaccctttctaaagctatgccgagcgctactcggtgcagaactggtcgatgaagaaggcttcccacaaattctgagcgagttggaaagcatggaatcgttcacgcaggttgttccagacaatttccaaggttatgaaactattcgggaggatgaagatgcgaactacgttagtctcctccagcctcttccaatgacggaatccaagttgcggaaacagacacgccaggagactagtaatgctctcattgttaccggttcgtcggagcttcctgcagcaacagtgggtcagatagtatctgagtccaaacctgcagtcgttatgtggcaacaccggtattcctgcttgagttatttgggcagccggctagaggagtggagcgagaatggtggattctcagaagagtttggcgatgactgcgttgcggagacaatctggctgttcacggatctaatttttgcgtccacgaacaaccaagcacgtagcaacgataattccgctgcgaaaagcatcctggagatggccagcgatggtctttctagtcaaactgacatcatcggacttgtttttgacatattcgagcgcaatcttcaaagtgtcagcgcaaggactgcgtcagaaggtgtagtcgattcggcgatagcctgtctgcacttcattcgcgccctcattgcggttctacccaatagagtatggcccttactatctcgaagcagcctgcttgggacagacggaaagggcggtatgatgacggctattatatccgctacggaagtgacttctggggaatatccatttcttatggcctctgtccgtctatttgaggctgttgttgatgacgcaatgtcccgtgctgtcctaaggcgatgcccagtagggaaggcaggggttgtttcggactggacttcaggagtcccgtcgcacatcatgagacgcattctgctcaactatgttcggataatggtcgaggtgtacaacagcaatggcaactggaggttcaacgctccggagaggaagttcgaaattaccactgcgattgcaggggtgctcgaaagaatactttactacgcttttggaacgaacgatcctgccaacggcaaattggaatcgaaacttaccggcgccttctcgtcttcggccacatacatcctagacgtcctccgaccacaatcagctgccgatttgccgttcaatcctattctccgactgataattgatggcctc

SEQ ID NO: 5083 - DNA, 10588 bp, Emericella nidulans
  unsure (1)..(10588): unsure at all n locations
gaataaaacagcaaagtaaaaattaaaagacgaaacaaaaacaagcacgaagcttaggaataataaaggcctaaaaaatcaataacgcctcataagaaagctcataacataaagatatatagtcaaaaaaacaccaatagcaaataaacaaaccaatacactacaaagcatggataatctaccaccccatcaggctgcaaccacctatcgaggaatccgcctgctttacgctgcccactcaggcccagatctctcagcagcatatccacgtacgggatggcatcgaagacaaaatctgggttacgacggcccaggccaccggggtaccggtggacaccgaactgcgtgtgcagggctgtctcgtagagggtgttgtagtagccgttgtctttcccttcggattcaacggaaggttcagtggtggtggcagcgggtgtcttgctgtcggtttcggtagtaggcgtagtagcagatggagtggccgtcttctcaagcagtgcaatgagttcttgagggcatttctctgttgcgatccgatcgagttgaatcttgcccgagaagaagctactgatccacaatgcttgcgtctgggcgaggagcggcgtgttgatcgtcatggcaacacccataaatgctacgctgcgctcctgcgcgagatccgacgccgggatgaggaaccgcgttagtcggtaggggtgcagactctggctctccgtctgcgcgtctggagcgaggggctcgtacttttcagggctgttgtgggttggccggtccgtcaatcgtgggaaccggcgcaggatctcggcgtcggcggcttcgaccagggacgaaggcagggggtcggcggcattgggaaacccgagccgggaggcgagggtaggcggactgaaggtgatatctggggtcggggcccagccggatgcgacgaccagcgcagcgacattctccagggcgggcgacttggccagatggaccgtcccctcggacaggtgtgtgatgtggtcgacgtgaacgcgcactttgccctcggtcaccagatcgaagaagttggtgggatagttaaggatggagagacccgaggccacccagaacggcgcgatccacggctgcagcttcttgagttccggatgggagtcgaacttgttcagcgcaaccacatcgtcgccgaggactttccagaaggaatcggtgatcttgcggccgagccacgtcccgtgcaggaacgcgcgggctctgttgcccatcgcgtcttccgcccccgtttcggcccagatgcacgggctgaagaaagtcagaagccgcgtggtgacgagcttctccagccacttcttcagcggggtcacgtacggcggcgccatccagcagggcccatgtccgttgtcgcggatgatccagtcgacctgggcgccggctgtagcggccgcgtagacggcgtcccaggcggacttggtgccgccgagcacggcgatgcggttctcgggcttctggagcgtggactcgaggtatttaggcatctcgaccgtgtggaaaagcgggcgtgcaaacgcttcctgtccgcggatcgggggcaagtacggctgcgaggtgacgccggtcgcgaggatcagcctgcgcgcctgcaccgtcacagtcgtttcttgccgtccttcctgctcgcctgacgaatcgacgtaggtgaccgtccactttacatcaccgtcgccgtcgctctcgctctcacccgcggactcttcattgtgatcaacaacgctgacccgacagttcaaccgcacactgtccatgacgccgaaatgttcggcgtagttctgcagataccgctgcagcacataacccgggatatgctctccgttcttgacgccgtacgagtcgtccatcgggaaatcagagtactcgtaagtcccacgcatattattgctcttcaggccgtcccaaagccggtgcttggcccagacgccgccgaccgaggacgcggactcgaggagacatactgacgcagaggggtggatctggcgataggtcttaagcgccgcaaggccgctccagcctgtccctgttagaaatcaagtgcaaccactagaagggagcgttaccggcgccgatgatgaggagatcaaaggtctccattgttgcaatgcgctgtgatatggtgctagtgctgtgatgtgctgctagtgctgtgatgtgttgctagtgctgtgatggttgctagagctgtaatgcgttgcgtgagtgcaatgccacaatgaacaaacaaggacaatgccaacaacagacagcgagacgaccgaccacacaagaataggacagaatatgcagaaaacgacacccaggagagtgatggtcgagacggctgcgaggggctgggaggggtagaggccttggaatggacagagaagctgcagggaaccccagacgagacgaacggaacttaaaaaaaaaattacgaagcaaaaataaactctgtaagacccgatctatctcctgcagagcgtagagctcgaatgcaccgcaggatgcaggttgcagaccgacagccaatctgccagtcagttgtgttgctaagtcctgctagtctcgcaccgcgttccccatcccgcgcaaggagaaggcgagcggacgcactagcaccgacactcatctcctggaccttgggaccagtcccgccccatttgacgcgctacaacaccagtccaactgccgtcgagacttccatacttncagcgtactcagaccctctgcagagatgacgaacccagactcgagcgagaccgttctctggtaggcagcaggttcattccgcgcggcacaacggcgcccgcatctccactggctgccccatagcggcaccgttttagtgctagcctcctgttatttgctatccctctatagcactgatctcgtcgactcttctcctgcagcgttgggggcccggcaatacggaaattaaggattggcatacactgctcggcaatggagactcagggtgcagaatggacgccaacctgccgagttcggaaggactccctttggcagcctgactgcttctgctgcttagctgcttggctactcggctacttggctgctttcactgctctgattgatatgaacgcttggcttcttagctgtcttatttgccttaccgccatactggcatcgtggcttactggtttcactgctgctttggccttggctgtgcttggctgcctcggctgtcttgtgagcttgtggtttgtgtgtttttgtgagcttaagttttgtgcttgatgagtcatctgtgacctggctagaagatctgtgacggatcgggcggtgcgtaaactctcccctctacccctcctcgacgacggcgatgatgcatccatcaagattacagattccatgcaaagtctatgcagaatccttgcaactccgtgcagaaacttctgcccaaaatagcccaactgtcagtgtcaaagctgccactgctcgctcccagtggccattgggccaggtggccccccaccgccgatccaatactggtccaatctcgagtctccagttttggtgtccagtcgccagtatcctgcatcccgttcccagtatccatggtccacggtccttgacagcccggggccgggctgtaatgaacatcgactcatccactccgttcgaaggcccctttgactgttccaggcctctgtgaccgactcttgcgatgggccgtcgcggtcggcattgactcctcgaaaaggcagatactgatacgacctgtaatttgatcgccagtggctaccactgcaatcttcttagcaccacaacgatacccagaagatccgccattccggatgaccgaactctgctgccggactggcctcggggtatggtggagaccgtactcaaggaacaagagagatacagagtatgatatgaaccggtcaaaccccttagcctggcctccgactaggtggtttattttcgacgccgttcccgtggctagttcctagttccgagttgctggtgctggatggttcctggcattcccaaatggttctgttctgtttcatctacattgtcttttaatctcaagttaagtcgatcgcgttcaagccaatctgaggcgagccctttgcgattgcgaccagtcttcagcccgtcacgcaagccggacggcaagcaagcaagcaggcacgaaggaaggccgccagcaagtatggcccagtttgaagtcgaagcgttcacgcttctggcccttgcaattgtcgccatcgccctccgcgtcgtcgcacgatgtgtcattgccgggcccaagaacttccagctggacgactatatgatgccgctggcgggggtgcgttccctcctgagcctgttttttgggttccccctgtctaggagcttcgatgctaaccggttacatctcaggtggtttatgggctcgaaaccggcgccgcatactgcgtcggcgcatggtggatgggtctggccaacaatgccatgacggacgcgcagcgcctcgagctctcgcagcgccccgatagcgaggaataccgactgcgcgtcgggggttccaagacgcaggtgctggggtggtcgctgtatacgacactgttgtggctgctgaaggcttgtatggcggtgttttattcgcggttgacgtgcgtcactccccctcccaaaaatccaaccttccagccccggccctacggtcgtgggcgtgggggcggaggacctagactttagtgtgctaacgaagctgggtgcagagctggacttatcaacatgcggatccgtgtacagatcgcttatgccgtcatcggcgccacgtatatcgccgtcatctgctcgattctgtttgggtgccatcccatgcacaagaactggcaaatctacccgaatccgggcaattcctgccagcctgcggtatcgaagatcgacgtctacgtgacggtaacgctgaacgttgcgacggatatgtatctgttgagtattccgatgcccgtgcgtttggcggctctcaaaagaagagaacaagtgataacggctaatgctggcttggtactgtagattctattcaaagcgcgcctcccccttcgcgagaaactcgagctgctggtcctcttctccggcggaatatttgttatggccgctggcattctgcgctgcgtgctgatcgtcacggtacgtctggtctcctagccctgcctttcctacctctcctcccatctgctatcataggcaaagctgacagtagaatatgtaggccggtgcgaacggcgcccagcaagcaggctcctgggcgtgccgcgagaccttcgtcgccgtgatcatcggcaatgcacccatgatatacccgttcctgcgacgcatcgcaaagcgcgcgggcatttacataaccacatacacccatcgcacgggtcaatcgcaatcgtacccgctgggatcagccgacgacaagatgcggagtgctgggaacgggcgcagcattgggatgtcgcaggcatccaagaaacggcggttcagacatccgctcagtatcccggacacgcagtggcgcgacgacggcgagactgctgtgtttgatgaggacggcgatgagatggcgatgttgagcaagaaattcaatcagacgcagggccaatatggagcgcataagaagatgagccttgagggttttcgacgggatgccggtgctgcagaggcagtggtcacgagtggaaacggaagtcccgggtcgggaacgaaggggctaggacttggaagcctggggagtagtctggagtcggaccatggagagtttagcgggatcaaggtagtacgggagacgattgttgagaggagggatgtttgacgcatctccgttccttactcattcattcatttttttggggcccgttttttctggtgcttctggtgagcataacaatctttgctagttttcctttccttcatattctttcattctttctctttctccatttgttgatgtcgatgtcttctctttatctatatctatggctaggccgttagggtgggtaggcgtgcattacggtaggatatggatggatattttggaacacttatggttgctatatacctctttgacagtttaccaatcaaggaagcgctattttccgctgaaaatgctcggtccagtcccttgagtcctaatctaccgattcatcgaatcctggctgcacaagcgctcaggaatccattagccaggtcacccataagaagcccatctgtcttgcaatggaaagccttccatgcactttccagtgcctggtggtgagcaggctcaggctcaggcagagcttgccgcaaacattccttttagataggggtggaccgatagaatgcttacctacccacaaacctcccccgtcctttttcctagtaaccacgccattcactttacaaatgcatcctagatgacttggtcgcttgtccgctcgcagccacattgagttttgcttcctttcgtatagactgctacagtccaacggtccatcgagccggaagcttagggcttcttcccgcctgaacaatagctactaactccctacattacccatccttaactcttgaaggatatggcggtgattaggagtttaaacaggagatttacccacatcacccggtgtctggcccgaaggtccggattctggcttgcctctaagtatccaaccctggatatctgtgcggagacacagctcatctagtggtagccctcgcaataacgctttccgcataacatatctgcttgtcctgattcctgatctcttcagctggtatggatatgtgagtaaatcaccgtcatctagatagggaccggagatgatatacctaggtctcctgcccggccaataagcatctagtgacagtacttgctcaaacactttaggactagatggtccagcctaagaggtagaaacatacatatgaagccagggctaggcagcggtctgtttcagactagagcacaccaagagtgcatgtagtacgcacatagtcattcacggaagaactctagttaagatctcaaatggtgtaggcgctacgacagcgtcctaacaatgttgttctcggcgcaaatacgataaaaaaatgcttaatttcattatgattagggccctaggaggaggtcgccgtgggtcaggtagatatgaaggtattatactcttcaggcaaatagaactcaaggcacgtatatgtccactcataggctagaacagcatgagctatacgggtttgcaaattatatccaaggtatacagagaataattataggtccagtcctagatacactacggaaagcccgcccagcaacactcggccagggagtgcaatgtacttcgaatattggtatttaggttcttgtacatgtaggcaggtaagtaggtagatagatgaatggatagtgagatagagcacctacaagtacaaatacctaggtttgtcctgatcaagttcaaaattgtatcctatctatgcccctcctctggtttatcttcttatagtccgtcttccattccagtctactcacagacatacctaagtacattgcagcctctcccctcctcttcttcctttcaaggccatgtgacctaagccactgcacctaatactcaaacctttcgaaaatcgcaccaccctcctcatcattcccctccagcactcccctcgcccgtccgacccatcgtacatggcccccattgctctcactctcttccatatccgtcgcaacgctaacttgtgcccctgggaacgcaatctggaacccactgaccggtccgccctcggtctgctcagtgccagggttgattcggacagagcccgcttcacacccagcgctcactgtcgtcccatcacgactgaggaacgaggagacaatttgcgcactggaattggatggcgtgtaagagagccagagcagcgagtatagccccagatgcgcgcggccgcgggtcagcgatttcgtcgatgaggtgaagggcttggagctccatatctttttccagaatttccatggttagcatgaactgtaccttatcacctatcttcctaccagcagaggaatcctgtgcactggaatgtggggagcaagtgtagtgatagggaccaaggggaggcaacagactttatcatgatacccataaccctcaaacatcagtttctcaccgttgacgctgacgtcgacgtgcgcaattgcatcggggaggatccccacccatccgagtccctggtcaccaagagcgagattcgtgctgaagtttgcggcatcggagcagagcgagtgcggcggcgtgatctttatggccatatcaacattagcacccatcagagctcaggtgcaggaagggaagaatatacccgctccatactgatccggcccgtaacattcaccttcttttcaggctgctgcatcccaatctcaacctcgtacccctcctcgctccccatccatccgccaacgccatgccaaatagcaacagacgagtcgccagatccgtggaggcgtgcggagtcggcacgctgcgagtggtgaaacttccttccatcaggaaaggtgatccaaagatgggcccagatggcgtggtcctcctgctcttcctgcaagtgcgcctctgccgcaccggtaccattaccggggagagagctgttggtcggagggtaagagagtggaaacccggccggtccgccgttcgagaaggtaatggccaccgaggcgttggtgttctcgagggcgatggcatcgaagtgccaccagtcgaaagtagaggcgttgctgtgactgagtttggggctgtccagatcggattggtcgaggctggcggtgatgtagtcggccgttacgggacctggagtaagctttgcgggaagattggctgtgtagcgtgcagacgcttctcctatcgtaaggagggcggcggccagcaggggtagcattttggtcgagttgagagatactccagttgctgagcgagcgtttggtgagcggttgtgagtggataggaaggatggtgggaggtatatatgtctctttgtttagagtatagtagagaagtgtatgtagtatagattggaaagaaaaagtaatataacaatgtagtgcaggagactttgtccgaggtcatacagacacagagactgaaacacaacataggtagagtcaaagcaaacaaatcccaattccaatcccaatgccagtgcaatgcagtatgagtgcagttgcagtgctacaggtacatacatgcgtacaacatacatagatagaaaagacgacaccaaacaccaacccagcccagcgcaaactaataattcgaatccgaagctcaagttatggtgatccccgccgttccacgtgtggaatcaatcaagcaattcgtctttggaataaacgccaatcgaacaaacatgccatcgactcggcatatcgacaactccgtgtgcttgtgtctgtgccttttgcctgtctttaaccgccgtgcccaccgacccctgtcattgtttccatcgacgggttgcggcttcatctcctgcggcctgcgacctgccttctgtcctctgtcctctgtcgtgtcgtttcccctccgttgtaggcatggtgcagtttcactttgagcgtgaagaatagccgcgtcgtgttccgagcgggcacggagtcgagttccgaatcacgttgcgtacaagtgaggagagaaaattaatgctcgccgctctcaaccttgaccgatttctcctgctcgttcgcgtccttacaacccttaaccaattgatggcgctgaagcacgttagttcaggcaacgctctcaaaaccgatacaaatgaaaagggaaaattaaaggtaccttcaacgcatcctttcgcgaaaactgcttgtcgcagctatgacagggatacggcttgacagcaagatggatccggctgtgtcgcttcaggtcgtgattccggttgaaactctgcccgcacttgtcgcacttaaacgggcggtcgttggttgggcctacgccacgcctacacccacgcccattccgtgcatcgcgtgcggcggatgccgccgtacatctgctgcatgctagccaccaacccgctattgaagcccggcagaagtccggactgcggcgggcccatcagcgacatctgtccgccggggctgtggacattggacatgacagggccggtcatcgccggaagcgtatatgacggccagggctggcgctggtggggataggaaaggtgtgttggtggcggcggtggaggaggcggaggattcgacgcgactcggggcggatgatgcatggcgagcggtggcggtggtcctgatggcgcacgggcgggtattggtagcccggtggcgtggagaggacggctccataggccggtgctgagctggacttggccatatatggatcgttcgacgggacggacgggtgcggatttatcactggatggctgtgggccagatgcgcaactggtcccggtgctgttgctgctcctcccagctgctgctgaaacggagggagttggttcatatcgtatgctgaagggatcgggtcggcgccgggggtcgaggtcgccgggttacgatggagagacgggttgaaag

SEQ ID NO: 5084 - DNA, 3472 bp, Emericella nidulans
gtaatatgttcattcggccggattctagattgcgcttcggtctccgaaaccgggcagggataagcagggctggagttgaggctgaggcttatgttaagctgtagacgcgcctactctggcagggtcaccatcaagaattacctagctacttactagtgatttggtactactgctgaatctagggcacttatataacagtactcttgtaatctgctgggctcactacggggtttggcgccagggttatttcgtagaacacaggctgcctcattgctcgatgatagagcttcagtttatcttacagcttcaagtatcattgattttaccttcttgcgttgcggctgagagcagattgagatgcctttcaggaaatagtgataaatctccctgcgggaaatttctgacgttcaagcaatgaccctgcgcacatgtggtgatactacggcatcgtcagcagtttatccctcgggaccgaatgcatagcggtatcgtaagccgtattcagatctccccgccgttcttcgagcgctgccgcaagcgtatcacgcactgggatcagtcagcttatctaaccctaccacgaccataagacgagcgcaaactcattaccttgtctttatctcgcgtgatcaagccacgtcaactggaatacgaggcgattgccatcctcatggggctgctatagttgttttacttcatggcgcacagacagagtgggatcgagaaatgcgaacaatggcatggcacctatgaagcgccatggtatcgatctcttgtgccgcgtgcgggccttacaaagcagttctcctggccctgggatttacggaccggtatggcgcaatgcaactctgtgatatcctcacaagtggaaggttctaacaggtcccagcacaaactacgaaagcctagaactgaagaaaatcgacccagtatagcggaagcgtcccatgcgactgtctgcatgatctgaaacgctgcccctcagccattctgaatcctcctcgacatcgatagcaccttctcaagctccccttgcgtgactgcttggctccttggcacgtctgggcggaatcttggcacggcgtccccgatttctcaaacatccacttactctacgcagtgcgatacagctacgcgccaaaacattatgaaaattgaaaaatagcactagctcaagatggataggcacaggatacacaaggccaatgaactgaacttggcccctgggtcctccactgcagagttttcactcgagtgctgaaatctcactctcgccggtttggggccgccgagccaaccctaagctggtaccccaccttggctggcctaagcaagattgtgacaggccaccatcatgctatcggcgcgccacgaggcgaacgccaaaccttggcgccataatcgtattaaccgggggtttgcttgctcgccaagtcgatctggggtgacgttattgcagttgcttgcgttgcatctttttcttttcctggagtttctttcagtgaagacctcgtcgtctacccatgtgctcgatatcttaacattcgacaattttcgcagagcacgatggtgttggctcagtatctaaagagagccgtagcctggctcgctccacccccaaaacaatctgaggatggacgggaccaatggccctcccgcgcagccttccttctcgctgcgatgggcggatgcgcaggacagggaaacttgatccggtacccgtcagtcgtatacaacaactacgggctgcagtggtttataccgtacttcttagcgatcttcttcgttgccatccccgcgcttatcctcgagatcagcattggtcaggcctaccgcggcggaacagtgatcgcattcaacaatatcaatcgccgtcttaaaggtgtgggcattggacctattctggtgagcttcatcgtcacgcagtatttcacggtgaatctggcctggattatgaattacttccggaatagttttcggtctccacttccttgggagggccgaatcgaggagttttacatgggcgatgtaatccacaatgttgatcctgtgggcggggagttgagtacggacggcaaacacgttctttcgtacacggagtaccccggcgtccggcttttgggggaaacagttggctggagtgccttcatctggtttctcatctggggtgtccatttttcgagccgtgggcctaaccggccgagtcgtctactggacaatgggcctccccatcgtcacgacaatcatcttcgttggccgctctctatcccttgaaaacgcgtctgagggcgtcaagttactctgggcaacctggcgcggcggacaactcgcctcgggaaccgtctggcaaacagccgtgggccaggttttcttctcgacgggtatcggattcggctatttcacctcttatgcgtcctacaacgcgaaacacagcaacgcggttatggacgcactgcttatatgtgggagtaacgtgctctttgagaattttgccgcatttgcggttttcggtgtggttggatacctacaccgctggccggaggatggtgtgcgactcggtgcatttgtggtaggtttcttgacgcttcctgaggcggttctgcatatgcctgggtcgaacttctgggctatcttgctgttcttcaccctcgttgtgttagggtttagttctgcattcgtcatgcttgatgccgtggctacacttgtcgttgatagcgggcttaaggtctcaaggcccatcattgtgacggttctgacacttatctcgttcctcatgtgtcttccctactgcacggaattcggattttatcttcttgacggaatcgatcgttggattaacaatatctgtttgatcttcgttgtctggtctgaggttgttagcgcaagcactgtctaccgctggcaggacgttgtggaccagactggtcttccagcattcatcacgtacaactttgcctacttcggtggacaggttattggagtgtctgtggcgcatggtaccgagaaccccggaattggcgcaggcgccggattcggggtctacgtcgtcttctcgatcctttcggctctccttgctaaaacaccgattcaaccggccccgagcttctgggggagaaactcattactcagtcggttctggtatcttgctgcatactcggttggtcttgtcactcaccctaccttactacctactaatagtgcgtttagggcaaccaaattcgccgcgatttgaatgccatcatcggtggggaaaagaattggaagatcccctctgtgtggcccgtcctgctccgctacgtatgcgcgcctgtgctcgcgatcatcttcagtttcgcgtaccctgagttccacaccctgcgctacgacccgctcatgatcacgggattcatccttgcgaatattcttcttctcattattctgctcgggttggtgatgccgaggtactatgatgttttcataccgcgcaacgtta

SEQ ID NO: 5085 - DNA, 3728 bp, Emericella nidulans
gaccacttcattgtgtactcccgactttttccctggtgcatcaaaaccgtgctcagaagctgctcgcttacctgggtgatgttgccgtgaacggtagcagcattaagggtcagattggtgaacccaaactcaagggcgacattatcaagcccactctccacgatgctgctggcaagcccatcgacgtctcctccccatgcactaagggctggaagcagattctcgaccaggagggtccagaggcttgggcgaaggcggtgcgtgccaacaagggatgcttgattatggacaccacctggcgtgatgctcaccagtccctgctcgccacccgtgtccgtaccattgacctgttgaacattgcccatgagacaagtcatgctctctccaacgcttacagtcttgagtgctggggaggtgccactttcgacgtcgccatgcggttcctctacgaggacccgtgggaccgtctgcgtaagtgcgcaaggctgttcctaacattcccttccagatgctgctccgtggtgccaacggagttgcctactcctcccttcctgataatgccatctaccacttctgtaagcaagccaagaggtgcggtgttgacatcttccgtgttttcgatgctcttaacgacatcgatcagctcgaggttggtataaaggcggttcacgccgctggcggtgttgtcgaagccactgtctgctacagcggtgacatgctaaacccctccaagaagtataacctggaatactacctcaaattggttgataagatcgttgctctcaagccccatgtcctcggaattaaggatatggctggtgtactgaagccccaggctgctcgccttctcattggtagtatccgtgagcgctaccccgacctccctattcacgtccacactcatgactctgccggtactggtgtggcgtccatgattgcctgcgcccaggcaggtgctgatgctgttgacgcggccactgatagcctttctggaatgacctctcagcccagcattggtgccatccttgcttctcttgagggcactgagcaggaccccggtcttgacagcgctcaagttcgggctcttgacagctactgggcccagctccgtctgctttactcgccttttgaagctggtctcaccgggcctgacccttgaagtctacgagcactaatttcctggtggtcagtagaccaatcttatcttccaggctagccagctcggtctaggccagcaatggggcgagaccaataaagcctacgaggtctgcaacgacctgattggcgacattgtcaaggtgactcctacctacaggccgtgggcagatcggctcaattcatcgtggtcaacaaattgacgcctgaagatgtatcaaccgcgcaggtgagcttgatttccctggctctgtccatgagttcctcgaaggtctcatgggccagccgtacggcggtttcaccgagcctttgcgttccaaggccctccgtgaccgccgcaagctcgacaagcgccctggtcttttcctggagcccctggacttggcgaagataaaaaatgaccttcgtgagaagtacggctccgccaccgaatacgacgtggctagttacgctatgtaccctaaggtctttgaagactacaagaagttcgtccagaagtacggagacctttctgttcttcctacccgcttcttcctggccaagcctgagattggcgaggaattccatgtcgaactcgaaaagggtaaggtactgatcctcaagctgcttgccatcggtcctctttccgaccagactggccagcgtgaggtcttctacgaagtcaacggagaggttcgtcaagtctccgtcgacgataaaaaggcgtccgtcgagaacattgcccgccctaaggccgatgtcaccgacagcagccaggtcggtgctcctatgagcggtgttgtagtcgaaatccgtgtccacgagggctccgaggtcaagaagggtgacccgattgctgttctcagcgccatgaaaatggtatgtttgtgtctttccattagagttctaggctcttcgctaatcatgcactaggaaatggtcatatccgctccgcacagcggcaaggtgtctggattgctggttaaagagggcgactctgttgatgggcaggatctcatctgcaagattgccaaggcttaataatgaaaatctgaagggaacatacgttaccgggattgacggctggatcttttgactctatttctactttcataaatgaacggaggagtggttgcacggcgaagacatttgaacagggatactttatcgttggttagagaaagctagtgaccacggatatatgtctatgggttttgggcctctaaggcttctttttctgctctttatgttgtttgtttgttagtttagttttatgatatgatgatcaacaaactcagttcatgatacatgaatgaacctatagactaaatgatatcagtggttcatccttagtagttatgtttgattcgtcgacatggtaaatatctacatataacgccgcaaatttaacccccatatatccactatatatctcgctaaagggtatttttgctacttttcatggaggcaatctcttaaaaaattagaaaagggggtttttgaggtttgtaattcataaaaaaaagaaggccatgggatgacccgggatcgaaccggggacttctagatacctagaacaggcttaggatgaagtttgatcttcagtctagcactcataccaactgagttatcaccccattggttgatcatagctcattgctttcaaaattcatactgaggcttttataccggttccgctaaggaactctaagccgcatcgtcatagtgagtaccgcaattgttttctaactacctttcctactagaacaatcctctgaaattactcaagaaactttcactagccatgccttccagtccgccgccggacgggaacggccgaacaaaacctcaataaaacccgtttccctctcgctgggatcctcaaaaaagttacccatcaaaaaacccgtgtctagccacacccttgcgcgccggccacatcataatctgccatatcaccatgactctgactccgatgataacggtggcgatacgagcctgcatttcagtctgttacgggcttcgacactctcacgggcaggacgttagacgcatccggtgcggaggaaaagaagccgttgacgattcctgtggcgagcggtaataactggcgtgatcggccgggtgttattcggaggtcgaagggaaaaaacttactgccgaaggaggtacaggcgttgcaagaggcacagagtaagggagaggtcccgggggacggggatgctgtggggccgagtatgcagtatgggttgagctttgcgaagcagcctcagaatgatggtggtgaccagaagatggaagatgcggcgctgccggctgtagaggccgctgaaaaggcgaaaccgcttacggaggatgagattgcgttgcaggcacttgtgagagagagtagaggcgaggtggaggggaggtcggatcttgtcatagagtctacgcgagcgggagaaggggaggcggaggaagatgtcaacgagttctatgacggtcataacagcgagacgagatctttccgggcagatgttagagcgagacctgagtccgcgacgctggagcagtataataccatcccgtgtggaagagtttagactgcttgg

SEQ ID NO: 5086 - DNA, 2600 bp, Emericella nidulans
  unsure (1)..(2600): unsure at all n locations
gtctaagatcgtgctcagtcaatctatggtggtttcctgaaagtacgtgatggaggaagtataaaggtggagctgcagacaaggccaggaatgcttaggacgtaggatatgacgcgtctgcactgtatacgaccggcaagggagagtagggggatatagtgtcgtcagctgcatcagggaatatgggggcaggagttgtttaaagttgtgtgttatgtggacgacgtcgagggcccgcaatgtctcaaaagcttgaccctcgagcagaagaagaaatttcaagaatcggccagcctggggatgatttgcattctaataatgcactgatacacggttagtgctagcggcccgaaaatctttgatgggtttaatgagtagatgtcccagggcgtggggcatcaagcagacagcaggaattagcggccttggagagcatcaagaatggggttctcgccacaataatgagcagaatttcaggttcagccgatcccagttgcagaaagaggcagaaaactagaagggatggtgaaccggggctgcgatgaattacacattctggcgtaataagagtgcgactgtcccttccggaaacagcacgtatctatcacgtatctatttcgacctcggcactccgctgggggagagggggacactcagatctccctgggtagacacccgttgtttagccggacagaatgccgatgacgaggcgaggactaggacaacgagaggacatgatctgtcgacctgacagtgcacaccaggttactgccgtacgcggttgaattgcgggtatagatggaagacctaattcggggtgactggaatcattggagaagggtggactgagctggaccccagaatctacggccatatgatccatgaacccctaagagagcctgtagatggccgactgcactatccattgtccagcttgcgggttccttcgagaaactcgacctctatgaaacgcgtcaacataccatcctccctcccagcagcttcgccccgcatccgaaactaccagagcatagtctctatgctgcctatagtacgcggtgggcggactatttccgggccttcaaggaggagttgccgcacctgcggaaattcaggttcgggcattcgccagactggtgggaggatgactcaatgccctttgagaatgaggagagtatagagattggatttggttctgagagctatctggtgttttgtgatggatatttgccgagtgaatatatggagaggatgatctgggataatcccgatgagaagggggaggcgttggagcctagcaaggaggatagggttgcgttggaggagctctgtaggaaagtcggcgtcatggttactttggaggattagacttggaggtgatctatacaatgggatagcgcacatacataggacaactaacgtggtggaggaatagtgacgttccaagttatctcagatatattcgagcaaaattcggtagacgagcgctatctagcatcaagcacacaaaccccagataccaatgcaaaataatcgtgagaaaagaccggtcacttcctcctaacctcaacaatcaatctcaaagcatatatctcaataatatttcttccttctatatccctccagcggttttccatccgtaacgaacggactaatgaccatcttctgcaccctcatctgcctcttcacagcgagcccttcgcacccccattaaaacagcccactctttgattctcacccgatcactaatcttcgtccttgcacagatcttcgaatgcactccaaaatccacgcccttcccaatatactatgtgcattgaccttgatatgctgtaggagactctggactgtgagtttgttcaggaaaccaacttgtctaggaaagggatttagttgcagacatttgtgagagggcattaaggtccagatagtagtagtgaaaatgaagagagagatccttgaactaccgtctgaatgagatttgttttcttatttttgcacttcgttccgagtaggcttgaaacaggtttatgactacacttgcgtcttcggaggaagggaatgaggctgtgacttcttatgcgttgtgatagcagtatttgcagtgtgatttattctgagtacgggcctgtgggaagatacggtagccaatagtcttgccttgactcatctcatccagttaaaatagagcatttggtgacgtggtagctctgtactgggaaatggatactgagtgcaagcaaaagggttctatagatgcgctacctgctaacactctcgagtcaccttgttatgcaatcaaggataccctaacactgccaactgcagactccagtgcatgccaattaccctactctattctagtcccatgattgttcatggtgttccaatccacactgcgttactctacagtgtaagtagcctttaaaagaatactctctatagtatgtacggagtaatgctaccccttacggaattcacaaattccatattttccggctctcggactgcttgccttgagtatatagcactacagagcgcaactcatgccgtattccgccaccagaagtcatgctgtaaacntatgcaccaggttttat

SEQ ID NO: 5087 - DNA, 2523 bp, Emericella nidulans
gcgttggctgtcggatatctcgcacactgttttcttatagctttgtatgcgtttcggagccgccgaacccaggctatcatctccccttgaagccatgtcgcggtaatttatagcattcaatccacttttgtttggacaattctctccacccttctttggaggtttttaagctgcaatgcacaatggtcgtgtaaggatagttgaagtgcttgtaggagtaagagatacactcatggtccacggccactcatgctcatatgtggagataatattgcttttagccctaaaatcaggacaacgtataaattcagaacctgataccactccagacgcccagacaaatccttcttaccagatatcataattcccaagcggaagttttaacttgatgcgaaaaattcaccagaaccattatttccctccggacttccgggaattccgctcattcgccctcatctttctctcattgcggcgtatcctttccttgcgctcagcacgcgacataccacgaatcgagctgccctttgccgcggcctcctcctccttcttccaatccttctcctttacctcaaccagccactgatcatcatccttattcttccccttgtatccccatcttggtacccactcgcccgactcctcatcataaaccagcttcttgcgacgctccttatccgccagagcagccccgggcttgttactgtacttgccaatgcccttcttgcgagcgaacagctcccacttggtgggaggcttgggtgtcggaagaggcttgtgtcgtggaagaatcgtcgagggggcagggagagtaaggaggacgccctgttgcgaggaggtgatggggcaggtagttaggagctggttgaggaggctttgtacgccgtcacgggcggtggcttttagtgatgcattaagaggctctgattttgggagctcgagaggattcgatcgttagcaagaaggtggccaaggtcgaacgtgtatggtgtaggcttcgagccagtgatagggctgtgatgctttatgtgagcggatgtattatgaaatttatttcggcagggttgaactcacagtctctttggtttgggtttgatggtcgacttggcctctgggtgtgagtttgccataattatctaggaaccgtatggttacagtgcagcaatgaaaatgtcaatgttgcagattatcaaaggcgggaaaacagaaaaaaagttcggagataatttaggagcgctgcttttgctggctgaggttcccgcacctagaccgcctgcaaaaagcggcagcgacgctaaccgtatacagaatcttgaggaacgaccaaaaatgtgctctgaccttcagttctctcccggtcttgcggcgtacccccggtccagcgtccacaatcgccgtttcgtcaacattatcaaataacactggccgtcgcgccggtgtatcgcatcataatggcttcctccttttgctcaggatgcctgacgcggcttcgccagggaccttcgcgccgtttaccaccaaccacagcagtatctcgagcagcatgtcacacatacaccgctctccaccgggcagttcagaaacctaaagccttaggacatgagggtcccaaatatcgcgctggagcatgctgtcaagagcaagaagaagaaaccgatggagaagtcgcgcccccctgccttcggagagcgcaatagccctccgtatgcggatcattctgagcaactcagaatgctttcgtggtatcatagcattccagtaccttacactccaattccaatccgtgcattatcgctccatatcctctcccatacttatcccttctatccccttctaccatccttcgttattatatcaaaagatcttaccatgtctttctactcctctacatcatcatttcattcataccataccccctactcccatcaatctactatttcatacttctttctatacttcgactctacatttctatcacatttactcttttcttccataaccacccatataccctacaacttttctcacattctcaattactccccacctaccatctatctctcacacttattccatctaacctccctccactttatcctctatacacacgcaactaatcccactatcacctcttccgtcaccttacccccttctatctctacacctctcccctctacctctatcaccaacttcccctacttcacttcttcttccatctagcctcaatacccacatatttctctttacctccttctttctctgaactctaccttaatcttctccttctgtcactctaccctactccccccatatgtcctccctttacacctatatcttttcattgtcctaatcgctacccttatccttcctccttctcacatcgcacatgtccacttctacaaactatcctcctatctagtctattaattccttaccttctattaccacaatctcttattcattcatactctcttaatatacaccatcttgtctatttcaatatctccttacctattcatactcatc

SEQ ID NO: 5088 - DNA, 6426 bp, Emericella nidulans
agcaaagaatcagtctatagtcctcaccttcgcagacacctcctcctggttatccggaacttcaaatttcatgtttcgcaaggaggtttgaatgtcggtggtggcgtcacgaaccttgggccagctctggccttgggcgatcgccttctgtgcttcatcgtggtagcccatgaatgccttcatcatatactccgtcttccaaagaggacagaactggtcgtagtcactatatccgttctgctgaaggaagtcatccttcaccatagcggccacatccaatgtgatcttgtcggagtcaccaagcgcagcctttccgactagctgtacgacctgatcaagatcttcagatttggagagcagctctcggacttgctcacgcagacgagggaactcggggtggtgcttctcgtagtaacggtcgagcaccggggtgtatttgctgtaagagatacctgtgttgattgaagggaagtgcttgcgctgggccaatttcttgtccagaccccagaagacctggacgatactcatcgtactggtagtgacagggtctgagaaatcaccaccgggcggactgacggcggcgacgatgctaacacttccctctcgctcggggcttcccagagcagtactcttaccagcgcgttcgtagaaagaggcgagcttggcgccaaggtaggcagggaaaccttggtcagccggcatctctcctagacgaccagaaagctcacgcagagcctcggcccatcgggaactagagtctgccatcatggccacgttcttgccctggtcacgaaagtactccgcaatggtgatgccggtgtaaatggacgcttcacgggcagcaacaggcatgttagaggtgttggcgatcaggcatgtacgtttcatgataggctccttgcggccaccaatgtcgatgctgagctacaagcacgttagtattggcgatattcggcaacgtttaatgagcatacctctgggaaatccatcaacacttcagccatctcattaccacgctcaccacatccgacatagacaatgacatcactgttcgagaatttggacacactttgagagatgacagtcttgccgcaaccaaaggcaccgggaatgcagacggtaccgcccaaaacactagggaatagagagtctagcacacgctggccaacaatgaacggcgagtcggcggactgcttctcgttgaccggcctggggacacggacaggccaggtgtgcatcatcccatgtgtggtcttgacaccgttgaattcaatctccagcagttgttcttcaacagtgtagctaccggcttccgctatccgggtgatcgtaccttttgcgcggggaggaaggaggattttgtggtcgttcaacaagctgttctcgaaaacggtaccccaaatatcaccgcctgtaatgtggtcgccgaccttgtacttgccgggcttgaagtcccatttcttcttgcgatccagcgcattgactttaataccgcggggaatataaatactacccgattcgtcggaaatggctttgaggggtcgctgaataccgtcatagatcgtttccatcaaaccggggccgagctcgacggataagggcttgccagttcgcatgacgggatcaccgaccgttagaccggctaagaacagtattgtcagattgatgacatatcataataggcggaggcagtacctgtttcttcgtagacttggatagtagccttatccgcatcaatacgaataacctctccgactagctgatcatgaccgactcggcactaatcatcgatggtaagcaacaaagcccgcgtagaagagcttcaccgatggcagcagcttgagcgatagcccagaaaggcactgcataaactagtgtcactcaccaactcgtacatggcacatccgatcatgttctcggcgaccacaacggggccggagacggagaagacagcaccgagctgggcatcttcagagctcgaggagccctttccagagggggccatggtgtgaaaagccggagattgaatggaggtggtggacgaagagaagggctgcgggatggaggtatcgttagaggtatcgttgctcgagctgatgctgtcactgcaggtggagggagcgggcgaaacggggagcggtggcaggtcgtctggcctgggcggtgatggcgggtctggaggctcggactggacaacaacaccacggtttgctatgaggtcaagcaacgatgggcgagatttcagtcgacggacgcccaatcccaacattcgcttctggaattagtcgtgttcgaagaggcatcgagtcaagctggcggatcgtggcttgtaaattgcttagttagcctcacggcgctgagtaagttccgagctttgctcatcatgctaaaaggcgtctaaagactaacaatctgtctttgtaccagcaagtaaattcagcttcatgtctgtcgctgatacgaattagcctaggttcattgacgagctccagacagctctacgtcgtacaaccatcgactacaatttctctgctaaagctccgttggcgagcgggttatttatccatgcccagtgaatatcaacaaatctctaattgtccgcttgcggctcaatatagacaacaagtgacgcttttgatctaaagtcgttctgcgcctgaatacttcgaacatgaagtgccgtatccagtataatacgttgaacagcaagtgtcatgagctctccacagtgggatccccacgaaatctgacgaatatgggaggggcttccccgcatttcatatatcccactgttatggacattgtctgttataattatgttatgtcctggaggccgattggtttgactgggcagcagtttctcacatgcctcgagcatgcttaactaacttcctcgatccgtggtttggatgccgagaggcggccctttgcctcttcggggatgagcttcgacatagacgtggtaaggatgctagaaatgctaggaataaagcagacttgaaagggagaggctatctgatcatatgctttgtcgctcggaccaaaataatggtttatatggcctgttgccacgggcatacggttgctgttgtgctatctgctcgccatcagctgcagtgaaacccaaacaaaaatgacccctcgagacgtccatactcattgggatctctcgttcgaatggacggaactccaccggactgcagaacaactgcgtccattgaccttctcatatgacaaactagcggacgattgcatcgcaaagctcaacgagctctcgccttcagagaagtatcgtccaaaggctggcgagccgccgaaaaaggcacctaaacgtgacttgctagcattactagaaaagcacgcaaaagacgacgccaagctcgaagagttatggactgaagtcaatacagtccctgattgggtcgactgggatcagatacaaagaggacaggaggtcttttaccgatacgggatgccaatcatgaatgtggtatgcacagtcgctacgatacaggcgctctgctaatgtccatagcttagcttccaaagcttattaggtgggatgtgggtgttaatccgaccgggaccatggccggagagatactgactcacttgtaggggcgcgaaccgtgtcgttgaaacattggcgagaaccggagggttctctgcagaagttgtccgccgaaggctgctggaaactcttcagtttgtcctccaggtgtccctttctgtggactctatgaagcctggtggagcaggccaccaatcctctgtgagagtgaggcttctacattcctcagttcgatcaaggatcctcagacttgtcaaggagaggcctgagtactacgacctcgaagcctttggtatcccgatcagcgacctcgattgcatcgggaccatcaacacgttttcaaccagcgtggtctggataggtctccctcgacaaggaatctacctgcgggagcgagagatcgaggattacatagccctttggagacttgtggcgtactatatgggcactccgcacaatgtcttcggagacaagccgactgcgaaagcctttatggagtcgatttttgagtttgaaattgaccctaaaccgattggacaagttcttgcgaagaacattgtcattggtcttgaaaatactgcgcctagctttgcgtcaaaagagtttatggaagctatggccagacatcttaacggggataagctggctgatcgccttgacatcccgaaaacgagcctgtattaccaaacactcatctacggctactgttattttgtcatgataattgcgtatacgaatcgaatattcccgctttttgacaaattttggattgcggttcgtccgctccttctactttgtctcctggtactgaccaaacgcaggttcgccggaagatgtactactcaatcatcaaagacaaggagcacggcctcggcagcgaaacgatcttcaacttcaaatacgtaccctggtttacgcgcaccacgaagctagggacccgcaaggaaagaaatgtgtcgaagccgggcatcgaaacattcgcgcagctaggagttcttgccgtctgtgctctagcggcgactgtgatatacggggccgcggtaggcttacatctgctgagtctagagaaactgttgcgtgtctgactccagttcgtaaagcagctaagtctatctcattatctgttctatcactacagtgagcagcagccgattttacattggaaaccattttttattgtttttaagcttcacagccagacactagctttcaaaactaggtgcgtcacaacatgttatgttataatatacagacctgaagaaaatgcaaggattaacccctagagcatttgatatctgctttgcttgtcaaccaggagccttgccacagcctcatggccattctgtaatgcaggaacaagcagtgtccgttcatattcatcactggcatcaatatcagctccatggtcaatcagcagctcttccacagcctcatggttattctgtaatgcgtgaataagtggtgtccatccatatccacccttggcttcgacatcagctccacagtcaatcaggagccttaccacagcctcatggcgattctttaatgcgcaaataagtggtgtccgtccatcttcaccagtagcattaacatcagctccatggtcaatcaggagccttgccacggcctcatggccattatgtgatgcgtgaatgagtggtgtccatccatctctctcactggcattaacatcagctccatggtcaatcaggagccttaccacagcctcatggcaaagctctgtggcccgaaggagtggtgtaaatccatctatactactggcattcacatcagctccatggtcaatcaggagccttaccacagcctcatggcaatgctctgtggcccgaaggagtggtgtccatccatctctattactggcattgacatcagctccatggtcaatcaggagccttaccacaacctcatggccattctgtgaggcctggataagtggtgtccatccatatctatccttggaattgagatcagctccatagtcaatcaggagccttgccacggcctcatggcctttatgtgatgcgtgaatcagtggtgtccatccatctctctcactggcattaacatcagctccatggtcaatcaggagtcttgccacagcctcatgaccattctctgaagcctggatcagtggtgtccttccttctttgctagtagcattaagatcagctccatggtcgattagtagttttgccacagtctcatgaccattctttgaagcccgtaaaagtggtgtttgaccgcccaggtccaccgcatttaggctgctacccgtttgaagaagtaacttcacaatgatagctcgaccttcctgcgcagcccaagatagcggtgtccgagtctcataatgtttcaagtctttccggcggtttagaccctctgtaatgtcaactccgtcgcaaaatcttgaacgcgtcattaggagagcagcggcagcatcccttttacaattggctaaagcagcaaataaagggtacttgtatcttcccccaaacacatgaacagtttgatcatctttcagccttgtgtagatcaactctgaaagtcctttttctgcgaggaggtaaaacaagtttatgtctgggctatacctgcgaaccttttttttttcaaaaaggttgctagctttaacccaatcagaaacaggaaaggcagagaggaacttgtcttgaggtactgattttgccgcagtattagcatggcccagaacatgctgagtagcataccccagaaacgggtactttcttggtatttccataagcccgtcaggttcggtctttgccaattgcctgctgacagccaccacggctaaaatatagtacatgtataagctg

SEQ ID NO: 5089 - DNA, 4427 bp, Emericella nidulans
tccctcccagtatcccactacagcagcgactggcagtcttattgtaggacaagtatcatttttctttgatgttgctggcttctcctaatgaagagatacagcccgctgctgccaaatgcccagcatcaggcgaccgcttcttcgtaagagtatcaatgtttcctcgtccgcaccactgggataactcttatacatatggcgaagatgcattccccaaggatacttcgggtgctttcctggctgggtgaagcgaaaatttcaatgcaaattcagatagtcacgtaaggaaaacagtggtacaatagctttgaagcggccaaatgaagccaccagagatgccaaatgctgtgggattcgttatcagggccacccacaaacaaggtggaaggacaatgagcgtggcaagaccgctaagtgagtctctgcctctactcgtcgaaagcactggcgcgcccgcaggactaaggttagagatctcgaggctcgatgtcatttgaagctcatggtcctgaaaccctcgcaggggaacccgccagttcagctggcatgctggatcagactcaggacagaaaggggaagattcagcttctaagtcatgctttttaatatgaggacttgtatgatagtagacagttgagcggtaatctgaagcggctttcagccctacgtattcgaattagaagcggccattttcaagcagaactttgcagctgccagcacaggctaccttggcttcaaagtgatagcttcgtaaaagtttgaagtctccggtgagtgcacaaggcacaaacaacttgcaaaaatcaaaaacatacagcagctgggattcgcatgtggtcacccaccatactactaaccagccggcgtgtggcttaagtacggctgagcggacgggaagccctgttttccacaccctatggtcgtatgtacttgtggtagccggattctggtaaataaaatgcttttctcttaaaacgctgcactctgttagacagaatagacctaaatcggaaagttgtgttctttatcatcttgtgaaactagtcataacagcgaagccgtggtgcttgagcggttattgacgtagaaaagataccaatctagacatgaaataactcagtaagtagcctattacttcaggaagcgagaccctcttctgttggaaaacaagctacaacgcgggtgacgtagcatggacaagtaggtccaggcccacgggcacctgttaatcgtcctcgcgggaggcagttgcgttggagcgcacagcaatggcgagattggcagggtttggcgctaaagaaggcaatatgtatctctggttaaattgaaagatgtggttttgctggccgaatagactgtcgtgttgccataggccacgcactcgagggtgtcgaggtccaagatgctgaatccatagttggtcacttcagaagtcccgaggatgccagtaaccatgtaggactggtttccagtggttgtggtgaggaatgaggagatgtagtaacctgtcaagggattttcattggaaggagtgtttgggcggtcgttatattgtagggggctgggatacgaggctgggtgcttgttaaagtacgtcgcgagcggatcatgatgattaaggatcatgatgattaagagtaacctacatctatcactgctttggcattgtcgggaacaaagacatacctaaagcagtgggagatgaagtttagaatggggagagtgcgtaaggccatggccagcatgaggggcgagcatgcaataacaacacaacatgtggcctcaggagttaaagatagaggccaacactttatatcaagtctaggcagagattttggacttggatccagtcggccctgcaaaggcctagaattgcagagcctgctattgcttacggcgaatggtgacacaactatggctgcttcttcgtctcctctccttacacagagtaagtcagatatataactggcccagcacgttatgcacggtcaattttgaaccctccacgcaccagtctttgaaatacaccgtccgggtcaaacttctccgatacgcgccgcagaaattctagattttctagcccatacccacggagcgggtcctgcgtgcggcccgcataattcagatagatgtactcattgtacgcgcctgtagaccgcgcgtactcatccaactgttcgcgcgcggactgcgccaactcgtacagaagctcgtcatctgccgagttgtcccagctgtagtcccaggcaatgtcttgtgttgacatctgttagcctggaataggatagtaggtctagaacaagaagggtttttgacgtactgagcaaattagtttcgaaacgctccagtccaagcacgtctccaccacgcgcctcgctgtgctcccagaataagggaacccatggctggacgatagcaaagagcgcgtagtcttttccccgggctcgcaacttggccatcttcacttggttgttgaggatgatgacggctttttggatgatttcggcattgttggaatatgttccagtctggaggacattactaggcgttattagtactggaccttctaattcctgtaactgacatgaaacttaccgatatccgtaaggaaacgagttttccactgcaagatccaacaccgtggcagacctcaaggtgtgtgtaatgttgggaatcgcgtagaattcgctgaacgcttggggccaggactgaacgggcctcgtgtaggccagagaggtgaagatcgctgtctggtctgtggttgaattgtacgcaaacattccgacccatgaggcgtaggggtcgttgggtatgttgtcagtaaacgctgtgcccgcggcaatatactggtccttggtggaaatatcatataaaacagtcccgccccatatcgtaccttccgttgaaaaagcttccatgtcgaacaaggtcacgatgccaaagttgtttgagcctccctttagagcccgaaagaggttcggatgggaatcttggtctacttttgcaacctcaccgtctgctaggacaatttcgtatcctttaatgcttagacatgctagaccaacacgcgcggcatggaacgaattcccaccgccggtcaggtaacctcccacgccaacagatgctgtccggccgccgggaaccaggacgttatcccgcaaaagggtttcatacacagaaccccagcgcgcaccgggttgaataaaggcagtattggtgctggaatcgtatgtggtagtgttcattcctgacagatccatggtaacgcccggcctctattgccgacgcaccgagtgaggtagtatgacccccgctgcgaatggcaaaaaagcatggatctggttgcgaggttagggtttgaacggccaccgagacgtcttgtgccgagagcggtagaacaaaacagcttggaggtagttgcgcattgacgccaaaataggaactaagagactcgttgtatgctgtgctgccggggaaggcgattctgttgccgatgcttgtattgagggctgcacactgcagtaacagtcattatagagtgtataacaggcaagagcgtatcagtccgcgtacgcatagttcggagaccgtcgccattatgtccaggggtggtctcatagcgggtgaaatgatgagatgatacagaatcaggagtcgaccagagatcacgcttctttttatgcaccgcaccacatgtctcactggaatccaccagggacacaagttctgagccatgcaagactgtcccacctcagtagtctcctgatgcaagactgttgtatagaaatcacttcgtttgatagacacaataaaaccctgttggctatacccaatatttcccgttaccgcaaacaacaacacgcacgcaatggacaagagaagtttcaaagtgatagttgtcggtggttcaatcgctggcctgactttggcgcacagcctcgacctggccggtattgactatatcgtactcgagaaacactcggatccccttgctaccgttggcggatcagtcggtctgctgccaaacggatggcgtatcctgcatcagctggggcttcgccatcagctagagcaagaggcatgcccagtcaaggtcgcccatatgacgtacccagatggattcgtctttagtgacaatttcccagcggcaatccaggaaaggcaagttcctgaaatccagtttcctatcggttatatgccagctaacgatgaaagatttgggtattccctttccgtcctcactcgccagcagctcattgaggtgctctacctcggcctacgtgacaaaagcaagatcaaggttggacagagagtaataaagatccagcaccatcagaaccgcaggggcgtatctgtctttaccgagtccggacaggaacatgtgggggacttggttgctggtgcagacggagtacacagcataacgc

SEQ ID NO: 5090 - DNA, 3545 bp, Emericella nidulans
caaagtcatgtaaagtcaaaaagctgggagagaaggcttcaggaactcgcactgaaggctgacgtagtcttttactctaagagttgggcacagtgagggtgatcatgaatatccagctcgggcgtgctgatactccccaaggccaatggatacaaatcagcgaaagaatgtattgagaagcaatcattccagctgggcaaagcgtacgtcaactgcccggacaatgatgtggacgttaactaaccaagtgccaagaacccttctctgttgcacatggggacaagatggagctgcggctcttgaacctcgtgttgggagcgccgtacagagtccggcttacacgccgaagggctttcaagttgtggagtatgtctgccagcactacattgcctgctcgagtcgactcgctaacataatctcagtactattggggcaggagacacttttatagccgggatgttgtatggtttgactgttaagggagatacttgggatctttcgcagaagctaagcatagcgaaccgacttgcgggaacgaaggtagcccaggagggctttgataatcttggaagagttcttgaaccgctttctgaccattgaaagattttctgaccgcatattatgcgcaacggttatgaagaaagctgatgaaatgatgtatatttcttccaattgatagacactttttaggatttttaggatttgggattacgccctcatgcctaggaacataacagtgcacattttctccatataattatatatgagccgcattagctcgacgggtgtagttcagtaggtaaatctgtggccttggctcggggcgggcttgtctggctatagtacatatatcaaatgcctaattagtgtggaatgggatgatccattgtcattattggatggccgacgtggccgcctctaaacaactagcttactaaatgatgacaagttcgaccactagttagcaggcgatgccataggacagtatgccccgacaattagagtaagtcacgtgatttgcatgctgtatcgaaggcggtcaactaaaaattattctgcccgcgattttttgtttcgccgaagctttcgctggctgtcaaagcacaatttggtcttttcttcattttagtcatttttgctcaaaatggcttcagtatacaaggcagtgtccaagagaaagtctcgcgacattacgaagcagcaggatcaggatgacgaagacgttatgatggaggaaatgctcgccgatgccgacgatacaagcgatagcgatgaagatgaagaaaacacggctgacgcagcaaagaagcagttagccgctggaatgatgccgaagacccgtgtgctgatgctgacgtcgcgcggtgttacatctcggtaagtccgcggcagcaatatgcatatcaattctcgcataactaattgtcctcaaattcagtcaccggcaccttctcaatgatatgacctcattacttcctcacacccacaaagaaagcaagctggattcgaggaagaaggcagccggttacaatctgctcctgaactccctcgccgacctccactcctgcaacgtgattttcttcctcgaggccaagaagaatggtcaagatctatacctgtggctttcacggcctcctaacggcccaacggtcaaattccatgtcaacaacttgcacactatggcagagctgaacaccgggttcgctggtaactgtttgaagggtggtcggggtattgttgttttcgacaaatcattcgacgaacagggtcctgtcatgagccagccaggcaacgagtaccggggactgattagagagatgctccgcagcgtcttttgtgtgccgaagcgtggcgtcaagggtatgaagcccttcatcgaccgcgttatcggaatctacggtgtcgacggtaagatctggatccgggtttatgaaattcgagagtcggaaagtggaaacaaaaagaaggatggcgaagaggtgaccgaaaagcctgcgcacaaccccaaggacggtccagagatttctctcgtggaaattggccctcgattcgtcctcacccccatcgttatcctggaaggcagctttggcggtccggtcatttacgagaacaaagagtttgtcagcccgaaccaagttcgtcgcgaaatacggatcagtaaggctgcacggtatgcgaagcggagagacgtacaaaccgagcggctggccaagcggtcaaacttgcagctgggacagggcgagcgaaaaccgggtgctcttgatactcggcggctcttcggataattggcgccattgtttggattttctattgtctttgttcgttgtactcttagacttgatatcctgaaggatgcatatgcgtgggattcttgttcatgaccttatcaggcgtctctggttgacataatcaaaagttatgaagctaaactcctggccctagatattggctttctccgtcttttgccattatcacgcaaatgaacgttcagagagttaagtgagtgtgctgtgccagcggtcgattagataagcgataggaaccatagttaattaggagcttggactcgtccctagctcctgaacttctactcgcagctgtcatggcatcgccttcgcaatatagccctctgtggctgcagggaactcaaaaatatcttcctgacataattcctagtactctaacaatgcgcaagtcttctaacccatcagacagccccaacgccggggtcgcgacttaaaaagagtcatcactagaaaaggcagctggttcactgagacagcgaagctgccactcgcaattaaaacgacaactcgaatcacgcgaaaccgttcttgctatatctaagagattacacaattataggtcagttgctgatggttatggaactattctcggtttttgcttacccgtctggtaaagaatcaccttcagccatgtcattccagtacctagtcacggagcttttgctccacatattccgctcatgcgatacgatctccgatatcataaacctggcagcaacgtgtcgtagatttcgcgatgtcattaatcgatccaacaagctacagatcctcatggatgtcgctgagatggagttcggtcctgttgatgatatcatacagatagccacgcataataccagccaaccagcacatctgttccgaacagcacccctcacagcatccctcctcaaacagattgcccagattggcagagccgcacagaaatgggcgacaatctaccctgtcaagaaatggaagctcgactatgagaaccgacgttccctcaccgacgaggagcagttccgcctgcgccgcgctatctaccggctctggttataccatcgtgcattccatagacgcgagtacgagcgatatagcataaatctgctgaacactgtcgttgagcgtgcacagctgcttcacaactggaccacgtccgagctggcggatatcgaggatatacgcaccggcatggctgacgtctgtcaaaccacatatgtccgagcaacgggaccatgcacgggaagcttcgaagcgctt

SEQ ID NO: 5091 - DNA, 6668 bp, Emericella nidulans
tcagtccaagtgtggttggtaataccctcgactaagtgcttgataacgtggtcgtattcactacggagacgggtgtgggacgtcatagcaccaggggtggcatcagcaaggaaagcagtatagacaatgccaataccaccgttatgctggcgacggaagatctcaggaagaagctcgaacttgggatcatcgaaggggtcctcggacgagtccgcatagacgccgagacaattgacggtggtcttgtggccgccgtacaaagcagcggcggagtttgcagagtcggtgatgaaggagtccatggaatgggtcatctggtgaccgaggacagggaacttgtctaattgcagcttggtctggtatttgccgttaatgctcttgtgtgcaatcaggcgagcagcagtaatcatgttggtggtcatcccatcgccaacaaagaggacaacgttcttagcgcggcgcttcttcgggatatcacgaacgagccaattcgcaacggtctgttccttgccatagtaagtcaggatagcctcatactcgcccggttcgtataaggcgaggtttctgtaggccttcgaggtgacgttgacaacagagggtgtctcagcatcctgagcaaacagatctgcagtcaattagtgcctggaacagcaacaggccgtgcgggaagcgtgtccgtaccttcgtaccagctgaactgccagttctcaagctcagcatcctcgatgtcaaagaactcggttaccgggacaccttcttgacccttcttcccaacggtgaacttgaagttggtgtcgggaacaccatcgcgtgcctcagatccgttgacaggagagtgaacctccaaacgaatatcgaagtgttgccccgggaggaaatcggccctaaaagctcaattgtcaatgttgtcgcaattgcgaaacatgcaggaggagctcactggtcaggagggaagacacaacccagggaagggcagcctccgagacgctggaagtactggccgaaagcgccagaagcaaataaagccacaccggcaaaagaagtaggcttcattctgatcgtgaagcactgtcaacagattcagaccggcagtggtggtacagatctcaatcagggggacggtctcctctatttattatgaccgagcgaaccaagaggcgggcgagtccgacagattgtgctcgcatggcagctgcgggctgtctcctgaaaagaaaatttccataattcacctgcaggcgcaagcactgacagtgatgacaaacacatctccggaccctgtctagcaggacttggcattgcgacgcattgtgaggtctggtcaggcaacacgaatgaaaagggaagacgacatccacgtgcggtagctaaaggttgccatgaagcttgggttggggtcacggtccggcgggctgcttggcgccaagtatccctgcgcaggtatacccctacacgtgcttccattccctgcctttgttcctcgtacgtctctccaacgcatttggagaatgactcggggcaatctgccacgagtggagtcgatacatggaaggttggatcaggaatcctttggcacaatactcgacctccaacatctgatggaatctcacatcaggcgatgcagctcatggtactccaccaatctggatggcttgattcagcatgctctgtccagtccaggagtaacgggattttggaaatgaagtcggtcctttggtaggatttatatccgctttgggctcaccttatggatgcatcatcctttactggccatgatttggccgtctgaagtcggtggcagtgcgttggatatgagggatattcattgacggttatcgcatttgcttagcacactactttgcgcttttgatttagctgatgccaagcgtcgtagtaatgcatgccctaatttaattgtgacttgcagaggtacagttgcagtcggcatgctctcctgtcttgacatagtatccaggtgaacgggcaccctcctcactggcaactactaaagctaacgcgaacgctagtctacattcatatctctgagctctgttcaacttacccgaagtgcagcagatatcccaattcacccgccgagcaaacatgattcggggattggcaggctcactcggatactaaggcatgcgttcctgttccttgtcttctgcagtatttttctagaaggcttctgcatgaacagctgcagagtccccactcacccctgctgatcctccgtatgttgctgtggtgttcactttggcctgccctcatacttgaggaagagctaatgccatatactcggctcgattatttctatccctggccctaagacaaaactacaacgtctgcattggagtacttgttcgccggatcgaaagcttgttgaacaagcttatctagcccctgtcgatctccacaaggtcctcgacagtgttgtatccccaaattgttctgcagcgcgtaccttggggacaaggaattgttgcaaatatggcaaggacagaactcgccattatgggcctgtctttgatgacataatcgctttgagcccaggatacctctagatagggccgagtcaatgcgtaccaattccgacagtgatgtgtgctattacaactactccgtcagaatcatagtttgctgtctgcagtgcctactgaattagcctgcttgagcctctgtagtgcctttggtttgcgataagccattcgggtattcaattagaatagtcggccttccatcgccatacctctagtaaagtaacaaactcgagcgaagaaagatagctgaaccttgggagaattctcggttctagaggaacgttgattttcttaaaatactgtctgtagcaatatatgtccgggtgaatagattgcttgacccaatatcaattgtgtaggtggatagctatcgcggtccaatatataacagaagtatatcagttttcggtaaccctactacgtaacagtcacaaacccgtttatgcaatatcgaacctagactgaccaatgaaccataatactagtcttaaaccagaggtcgcttttaatctctttgccttttgccccatagtctcaatcccaagttaatctccgagtcagatctggccccggcaagctccgaactccagaaaaagcagtttggggccaaactcgcaaggccgggtgactccttggattctggcggggttgattgataagcgattatccccccaattcctatatatatagctccattgcttatcgctaaggaagtctagagctggttgttcctttccgacgttgcaatccgtttctatgctatcggcttggcagaaaattcagttttcgttgtagttaggtacgatattgcgcggggtctcttaactacggctttttgaagcaacacgggatcatcaatatattagcggcgatttcagcatggcacaaggtattattgaaaaccacctctccaagaggagtgcattactcgagcaggaaaagacgagcagacatgattacgccttcaagcagagcatgtcgccggtcgcgaaaacagccgcgaaagtacttgcagacattcgcaagaaggaactgaagtcgatctggagtcctacaactacgagcaatgagaagcgcgatcttaaggatgtcacattcccgggaatgtcctttacgctctccagggaccggatgcagaagactgcgctgtggaagattgttagtgccatgccgaagggttgcctgctgcatgctcacatggaagctatgattgatatcgactggatgattgagcaggcgattgaactgcctgggtattatatctcgagtccagtgccgctgtgtccgagaacggggtctgcagggaagtggtcggagccatttcagttttcgtaccggcccagacttggatctggtgcaaatgcgcggaatgggagtgagcctgagatcagtatctggcaggcgggatatactccgggtcgactggtaccggttgctgccgctgctaagatgtatcctgggggagtggaagcctttaaagcgtgggctgtctcgaggatgactatcaatgaagaagaggctttggagcatcatcatggcattgatgatgtgtgggataaatttcgctcatgctttcttgccatcggtgggttgttctttacggagccgatttttcgacggtgtataccgaggctcttacagcagcttcacgacgacggcatcaaatatgttgagttgcgtctagctcccaaccctttttaccgagaaggttcgaacgaggccgagcccgatttcttgtacttcttgcaatgcttccaggaagaagtggatgcctatatgtcttctccgacagggaggggtttctggggcgcaaagattatctggacggccatacgaagtttccctgatgatttaatcaaagagtccatgattcattgcttgaattcaaaaaaagcatacccctctgtcatcacgggctttgactttgtcggacaggaagatgcaggccgtccactggttgatcttctcccgctctgcaaatggtttcaacaacaatgcgccgatgaacagctccaaatacccttcttcctccacgccggtgagtgcctaggcgatggcaatgataccgacagcaatctggtggacgccatattgctgaactcccggagaattgggcacgccttttcgctatacaaacaccccctcctgatcgacctcgtcaaggacaagaacatccttattgagatgtgccccatatctcatgaagtactccgcctaacttcgaatatactgatgcacccgatgcctgcattacaggcgcgcggtgtggctgtttcgctgaacaacgacgaccccgccgtccttgggcacgggaagaatgggctaagtcatgacttctaccaggttacagctgccttcgagaacacagggcttgcagggcttgcaacgatggcagaggatagcattcgatgggcagcctttgaggacgagacggattctgagtggctccagggaatcgatggtaaaggaaatggtctgaaggcttctcggttagctgaatggaggactgcatttgacgaatggtgtgcgtgggtagtccaagagttcggggcggaatcccaaatttgatatgagatgcttaagagtataaaattatgtcattccaggaataaaaaacgaatgaacaatatacatcggctccacctgggaggttccataaaatgcatatactgtatgtaatatgtggttgcggagcaaaatgccgagttaagggaaccttcggccaatttggccatattcggtcttggcgagctagtgtagctcttcactgcagcttcacatttcccccgcgacaataccctatgctcagcaacttgaagaagttcaaagacctccgctagtcacgccaatccttctcgcttttgataaagaataactctccccaacttcctcatggctcaaccacaaaacgaccaagcgcagccaccaccggcgactctcaccaatcctcgattcacgctcgaacttgaattcgtatcctctctcgcaaacccgtactacctgtctcatcttgcagtgaattatccaagcctgctaggaatttccaaatctggtaacgagaacgaagtcaatgacgacaactcagacccggacgccgaggcgtttgcagcgtacctcgcctatctctactcttactggaagacgcccgaatactcgcaatttttgacacatcccggagcgaccctccgcgcgctacggcttctacaagaggaaaaatttcgtcgtgatatcatccgtccgcaggtgattgaaaggttggcgggcgtggacctcaacggcgagcagagcgctgcggaagcaggagaacagaatacggagcaaaacaaaggggacagaggaaatgttgagaatcaacatggaaagacctgattacttgattgcactcgccatggcaagggcttgacggattccgcgctctcgctctatggccattcggggctgctggctggactgtgtggccggagatcggatggactccccgcaagtgggagagatctataggtcccagaaagtgtcggccgagcatgatcttcttaggcttgaaccatgtactccgcatgttgtggatatgtggtgcttgtcgcaaagacgattttgtgcactgacactccgctcgggcttttggtgcatcatgtgtgaccgaggtatctctcctgtgatcgtcgacggcgccggtaatctttgaggacgtcgaacgcccagtcgtccgcgtacgagcatgcccatcaagctcccagcaatcgccaaagtatcagagctccgagtctccgaggtgcgcatctgtgcttgtttcccaatcaagaagtgaatagtgcgggggagcatgggacgcggaggcatatggccgtacgctccatccttgcccttgaaaacatattgacaaacgcactagttgacggctaaacatgagagttaggcaaacgaaagaagtgcgaattgggaaaattgctgtgggtttccatcagaaatatgtgatttgtacgctctctggtaacaccgaccaaacagagaaggaaccagggcaggcggggcggtacatcaatccacaatgcttaatagcataaataagagtatgcatagaacccgaaagtattagcatatatccttccaggaagactgcttgacagt

SEQ ID NO: 5092 - DNA, 3618 bp, Emericella nidulans
tctggatgtttcgctcggcattggcactactaggcccgttcagcccagcaatttggatgccgcgtcttgcattcagttacatccccgggctatggagagtcaagtggtggttcaacatgctggaattctgcgatcggtgcatggaacagaggatgaaggtaggaggtttactatctgcccaccaacctacaagacagtgctagctgatggacacctagaaaacacctaaagagagtaacattgcttcatggtttctcaaagaccataaggtccatcgtcaaaacgcttggctcagtggtgataccgcaacgctcgttgtagctggaaggtacagcccctgcctacggaatgcctacactttccgacccataaatgctaacctctaggggttacattaaagcgacaccaatgcaccaacactggtacatctgttttatttcctcgcacggtaccctgagcacaccgagaagatatggtaggagcttgtatcagtgaatgctgaggacccagtcgccctggctaaactaccgcacctgaacggggtcattaacgaaagcatgcgcctcctccctgcagttctcacctttggctctcgaactacccagccagagggattgacagttgagggcacttttattccaggcggcgtgaaaatcagtgcgcctaggtacacgattgggagatgtacgcttattccccaaacactattaagctgattcaagatcagtgtctcaggcactcctagtgctaaagttttgtgttagtgaaatctgcattcgctgaaacccacgaattcatccctgaatggtggtattcgcgaccggacctcgtcaaagatcgacgggctttcgcaccgtttggcgtcggtatgtgttcgtggccatatacctagcaaggtttgttgactggttggttaacaggtagcacaagctgtgttggcaagagccttgctcttgcgcagattcggctggtcaccgcggctttggtcagcaagtacaaatttcaattcacgccgggaatgggcagcggcgaggctgtcgagggggagatgagagaacaactcactgcccagccgggtcattgctacctcaacttcataagacatgttgggcaggaataggttgtactggcgatactgtatcccggcggccagggcatgctggatttaatatagcatatgatggtggttttggttctaatcgtagctcaagaaacagcttacgctttattggaaatcttgcaataggagaatgataccagaaatcagtgggccagaagtacagctacagcacccccattccaagctcagtagagtatctgcagcatgcaagtttagatggatacatacaagaccatcttagaccacattgacacagcgaatccccagtaactcggtaatctctgcttttgcatcatgtaacgggcgtaggcagtattttttcaactggctgtcctgtataaacgagtatcacaagcttagagaaagaaacaaaagatagaagcgcagatatctctttcctccctttatcaacctttctgacttcccggacctgtatgccgacggatcccttttccaaagttatgaggacggatctcctttcctaagctttgaggccgcaatttccgaagctgtacactgatgttgcagaaaacttatttagaaccaggttgagggcatggccgacaaccaagatccaggccatagcctgtgacacatacaacggttgccgaattcctggaccaacttgacgccaaatacggcatatggaaagatatgaccagagaccgcgatcgtaagatgaaggaccctaaaaccaaagctcgcccccagagcaggccccaggaaccccatactgaacgccgcaatccggctgaccgtgaattatttaggtatcggccgaatcaaacaagctatcaagcgtcccgctggccctatcagcaagcatggaccccctgggtgcctcctccttctcgacctctacatccgtacatagcgtcgaaccaagccacccaaggatctcagaagattgcagggtactttggcaatgatcaaaagcatgactgaaacaagcatcgcggtacccaacaaaacaactgaaaaccatggaaccaatggaaaagttctgcacagcagcagcagcagccgctgcagccgcaaccagcacagcaagcttacctggctgaagggatgacagaatttccaggcctgttcccagcatactggtctgccgcggcccctccggtgctgtgcttgctgtctagcccaataccagcaaccttgcttggcagatattatgcagatgcagctgaggaaccatatcaggaggggtttgttgatgttacggatctgctgggccccgatatcaaggattgggagcctcaggcaaacaatcgattaagctctaagataggcgttagagatccggaaatcctttcccatgttgcatcatcgaaaccaccggacttggccgccgtttacagataaagtttggtatgactttatcgctcgtcatggtcttactgttgggttacatccatgtctttccacaaatgtatttaggactacgggagatcccccagctgaaggatccccaaggtttagtcttgcaatatattactattcgtttccttgttgttggccttacgtggcattggcatccttacctggttgacaggctgatctgccctgacaaagtagatccttaacagttaaaacagagtattctgataacaatgttgagcagcttgattataaaactcattctgactctagaaatgacctcagatggagagcaggttcttttggcaaatgactaacccattgggggtggaacattgcagtgcaatgggattagggttttaaagtaatatttttgcgggttggagtgcaatgggattttctcagccatgaaactggagtacaatgggattagaatgcagggggctagggggctgaaaattttactgtagacacagcagctacttatctagaacagagcacagtttcaagtccaggcaaccaagaatcatggcatggtattgagctgaagttggttggggttggatacaaggttacacaggagattggtgatatggctgtatagatagttggtatattaaaaacaaaagcaaatactctgtcagcagcagattttagttaggagaattaatccctggttttgaatctctccatattaatatatactcctaggtatgagcctccataggtgcaactcttagcatgtcttatctactctttaaaacaatccctgagctgcagatcatagtctactactaatataagtacagggtttacctaattaaggtagaaacctacctttaccagaagcatttcatgaccagcttgcagatctagcctgtcctcaagactgtccaataatagactaacctgatctaggaccctggtactgttgagatttcttaggtattagatcatcccctgctaattctcctagtctcaaccaacagtatacagtatcaatataatctagactgcctatatattacaactaatcttaatacaaaacacaattactggcagcaggtgcatagatggacctaatataagaaatatagctgagccaaggattctgaaaa

SEQ ID NO: 5093 - DNA, 3192 bp, Emericella nidulans
aattatatagatactctctactaaaaaaaataacttcacgaacctacatccgaaaaccaggtccccttattagactttgctttccaacaggaggggaaccctaacatcgaatctctcaagttcggcgaagcaactccaagaactcttcagcgtcaacggcgtctttccgctagtgtccatctttgtcatactcggctgtatctccatctcgttcgcctttgggtggaaactcgctgccgtcgccatcttcgcggcattacctttcatcgccaccgcagcaaatctacgtattcggtacgagacgcagttcgagcttatgaatgctaaagtctatgcggagagctcggctttcgcgaccgaggcaatcaaggcgtttcgcactgtgtctgcgtgcacgatggagggttttattctggaaagatacaaagtcctactcaccgagcaacgagagaaagcactgaaaaaagcctggcttgcgtgcgcggtgtttgccttttcggacagtgtagatttctgtgcgatggcgctgacgttttggtatcatgcccttcgcgcttgacttggtgcttactggagctgatggtttgtcgctaggtacggcgggaaactccttggttcaagagagtacgacctcgtccagttcttcgtcgtctacattgctatcattcagggcgggcagatggctgggatgatgttcagctcaggcgcggatctcgcacaggcaaaggcctctgctgccaggattttcatggcgcggacgccgtctgcaaccatcagtactcaagatcctgcaatcacacctccagacgcaagagcaccatcagatgcgagtcttgaattctgcagtgtttccttccgctatcccttccgcaaagcgccagtctttgcagacctcaatcttcgaatcgaaagcgggcaatttgttgcattcgtcgggccttcggggtgcgggaaatcaacactcatatccctgatagagcggttctacgagcccactgagggcagcatactgtttggaggagtgccgatcaacacgcttgatattgtatcctaccgcaggaacctatctctcgtcgcgcaagacccgaagctgttcaacgccactatacgcgagaatctctgtctgggaattgacccagacaatcatgaacaggaccatgaccgtgatctcgaggagaggatgatatccgcctgtacttccgccgagatccacccattcattctctccctgcccgatggctacaacacagcgctcggaacaaacgcctcctcgtcggcatctctaagcggcgggcagaagcagcggctctgtatcgcccgcgcgttactccggaacccacgagtattgctcctagacgaagcaacttctagtctggactcgcagagcgaaaagcttgtgcagcaggcgatggagaaactagctgagagtcgagatttgacgatcattgctgttgcgcatcggcttgccactgtacaaaaggcagatgtcatttttgtttttggcgaggacgggactaaagctgggtcgagggtattggagaaggggactcattcggagctgctggagatgaggggggtatattggcagatggtgagttcttctctttctggtacttaaagctatgagaagttgctaacaataagcagtgtcaggctcaggcactggatcggtgaggattccatcttatggtatttacatgtagtcgttaaaccgtcaccaagagccgggacgggtttgctttgtcgcccggtgctctatgctcctggactacgccaccccctacaaatcttgtataatatctagctcctcgctacttatacgaaaaagtccaagctccattttggggctgaagccacgcgcattggctgcaaccctctcaggattacattagatgacaagcaatcgactatccacttatcctagtactgatcaatgacaggattactatatccatttgcagatgtcagcatttagcgtccatagcgggtcagagacatcaaagggcgggttgggtgccgtcactctatataaacaccagagaaagtgtcgaatggcttctcaatcaagatattctacccacatcttcagactctatttcgcctaaacgcaatggtgagcgtcgcagtcgccggcggactggaggtgtcggccgcactatcgtcgaatccctaagtcgatctcgtcataagacattcgtcttctgcgaaaggtacgacagcgcctatcgccaaaataaagcgctccccatgccagtctacgcgctttccatgccagtctacagcaccgggtgctaatatgacatagccactgtaaggcaaattttacaacaatccgaacattacaaccattacggtcgactacatcatggtcgactccttggtccgtattctccagacttacagaatccacaccatgatctgcgccttctccgtttcgggtgactcgttgtcgagatcacaagcaaatctcattgaggtgacaaagctctcgaaagagacgaagagatttgtgccgagctcttttgcgatccaatacccaagggagtatttagaacccacccgcagtagactgggactaggaccggcggaagtagttataggctatactgatggacgaaagagccgttaaagacccgccacaattaaaggactatctcgctgccattgaaaccttgcttgggtccgatctcgaattcacagtctttcataacagaatcttcctcgattacttcatttcgtcaaagacgagattaaagtcatccctgagaccgaatgtcttcgtcattgatattgccaacagatttacagctatccctggtgacgagaatgctcctctgagcctcacgtacaccttcgaccttgcgggattcgtttttcagagtgtgatcctcgaggatggccagtgggaggagcagagtcgggttattgatgacgagatcaactggaatgagttcgtcgatttggcagaggaaatattgggtatgtgtcactcggtactatcccaatgtcgaagaggatacggatcctaacaggttcaaggctgcaaattcagagtccactacgacccgatcgagaaactggagaccttgaatatcacagagttgccttgcacaaagccctgtacgaacacttccccaaggagaggtttcgctggttcaaggcgatctttgaactgttcatggtggatggggg

SEQ ID NO: 5094 - DNA, 2115 bp, Emericella nidulans
aagtagtatggtgccgatgcacaccacttttttatcccttcatttgctaatacccagccttaattatcctgcctggggggtatataaacgacacatagacagggcctatcctaatatggtcatcaacaccaacgaaccttaagaacctccctttgatcccaactatattagcctgtgtgttcttggatcccgaaaagctatggcacaatggatcacaagaaggttgccggccagagggccaggtgaggagttgattgaatagggacctagaccgaggcctccagcccttactgtctttggtatacgagcatgatgcatgtcgattaaatgaagatagtgtgcttaacagaaagccattacatatttttctttgaataagagctctatcaacaaacatgggagcttttatgctcgaaatctgattgtctctgcttctcaaggcagaagaagaacagatagggtggtggtctggataggcgagtgaacttagagaactatatacgcgctcttaaacggccatggctcctaaaacttacctgaacgacgtgaatttagtgaagtgaatagctggtgttgttttaaggtgcaaccggggcagcggcagaggataggcttggagaaaattagagaacgaaatgggttgttgcagtattcaccgaaaaaagataaggagccacagaaatagattatctacaagacccccgtctcagccagagactggccaacccaatctctggctccagtttagaatgatctctatacaatgtgcacatttcatggctcgtaagctgcgtttaggacctggatctcctttcagaaccaggtaggaagccgatcgcctaccgccgttcgaggatgagttttgacgtatactagcaggaaatagagccatgcaaagctaaaatggcgcgataatctaccatattagcagtccactttcctgccaggcacctgcattactttcaagttcccacatgatatagagcccaattcagccctacggccggcgccgatcccatctacaaaggcgcggtatcggagacattccgagccagcgcaaaactcttcctccaactacaccagcacctggactctgaacctcttcaccagcgatcgacacccatctagcatcccagcaaaacatcggagtggaagaaatggcaccggacatagaggccgataccaacaatgtcgccaaggcccgcaaatggcactggacccaatcggtctcgaaccgctgggcggaccttctgtgtctcgtgctctgctttatcacgggtttatgtgacagcgcagcgtacaatgcctggtcttgctttttggcgatgcaaactggtattctaccctttcactaattctacccttctacgtggctttgcctagagaggaaacatgttaatagtaacagggaatacaatcttcctcggcctcggcgcctcaaaccaaccctccaacaaaccctggggctggctgaaatcgctcgtctctatagtagcgttcttcatcggtgcagctctcttctccagctacggacgacacgtcggctctaagaagaggattactctgttctcttctttcctcttccaagctatcctcgtgttcatcgctgtcgcgctcctagaagcagacttgatcccgcacacacctgaggaatctgaaggactcacaggcggtcgtctgttcctcgaactcatccccattgcgctccttgcattccagtctgcggggtctatgactgctgcaaggggcctgggcttcaatgaaatcccgacggtggtgctgacgagtgtttactttgatgttgcgagtgatccgaagcttgtcagggatgttaggggaaatgtgaagcgaaatagacgcattggggcggtagtgtttttgttgctgggtgctattgtgggaggttggttgagtaagagtaagggggggatggagagtgcattgtgggttagtgcgggattgaaagtgatcatcgcggttacttggatggtctggtttggggaggatgcgaaataattagatacattaattattaaggagagaatggcatggaagtggccaggctgaggtttagactatatagatggttagacacttcacttgggtgggggttat

SEQ ID NO: 5095 - DNA, 1830 bp, Emericella nidulans
cacacaaccccatacttcaaggctagcttaagctttcacggcatcaaaagcctgctccagaatccttagcgcagtcttcagctgctcctctgtaatcgtcaatggaggaacaaaaccgcagacatccctctccagctgtaatgatgagcatgccccgttcccgcgcggcagtgacaatctcaccagccctggcggagaagtctttcgacagctgcaggccaagaatgaggccgcggccgcgcacctcagagacaagatcagggtatttctgctgcagcgcctggaagccagcgaccaggatggcggacttatcctggacggatttctgtagctcaggcgaggccaggcggtggatgatatggtgggctacacggcaggcgagagggttgccgccaaaagtggtgccgtggtcgccggccttgatgttgtccgcaacagtctttccagaaacgatggttgcgccgatggggatgccgttgccgagggctttggcggtggtgaggatgtcagggtgtgcagcttcgccggaggacgggacgagagacggatgggcgtgggcccagaagctgccggtgcgagaaagaccacactggatctcgtcgaagatcaggacggcgccgacgtcgtcgcagcgcttgcgaagggcagagaggaactcgggtgttgcaacgttgacaccaccttcgccctggatgggctcgacaatcacaccacaggtcttctcggtcacgagatctttcagctgggcaacatcgttgtacttgccgtatttgaacccggggagcatgggtgagaagggagtctggtatttcgggttcggggtcgcggagagggcgcccattgtacggccgtggaaggagttgtggaaggaaacgatttcgtgctttgcgccggaaggatcgcgggcgcgtccggtcttacgggcgaacttgatggcggcctcgttggcctcggtgccggagttggcgatgaaaacttgggcagcgtcgcgcatggctcccgactcgcgcgtaaggatgatgaggtctttgctgagagcgccaacccaggcattgtgatacaggttggaggcatggagaagggtttcggcctaattaacccgtcagcacttctgatatttgtatgtatagtatgagactagcgtgcgcacctgctcggcgatgatcttggagatctcgggatcgcagtgaccgagggagttcacggcaattcctgctgtgagatcgaggtaccgtctgttctccatatcccacaaataacacccctgtcccttaaccatgatcggggccgggcggacgtaggtagggacaaggtacggcgcgcgctcgttgacaaaagctgcggagacggagtcggcaccggggtcaggagtaacaacggcacccttcacattgttagatacaccagccttcataaaagcaagaagagttcactcacctgagctttcaaagtcgcagagacataccggcgctgcattggtgactcaaccgcagagaccagtctcttcgccagcggcattcgccgcgacgccgcacgaacaaaagacattgcaacggaaactcttagcaagggatgagttgacaagcaattggcgggtgcggccgagttcaagagtgggagggaagggggatagcgtgagaagcgaagaaatgccgcatccaaaaacgagtcgaaatgttggatgattcatgggcgatatcggctcggcacctccgcaacttccatccgccactccgcattcttcacccatctttcatatctctcgactctttcatctaactactcacttgacgttggcaacacaggcacacaatactaagacaacatggc

SEQ ID NO: 5096 - DNA, 5522 bp, Emericella nidulans
catgcgccacgcagcagaggtcgttgtcacgcactgcggttaattagtatacgcagtatcctaatggaaaattagaatggtccgtacagttgagcgcgcatcgttcagcagcagtcaagctgggagtagtggtcggcgcagtagaggtctcggtagaagactcggacgacgaagacgaatcctgggcagcaaccagggcgagcactgaggtcagagtaacgagagagaccttcatcttgataagtcagaaacgacagacgtgggtttcaatgaagagaacttcgaaggaaaaactgaagacttaaattcagcagagaaaccaaacgaaggacgtggctggggagaaagaagaggaggaagaggagaagggaaaggcgaggaaaaaaagggaccgggggcaaaaagcaaagggcacaaagcgccggctactgcagaaccaggtcaggtcagctgttacacgagacaattgggccatgaatcacaaagcttcaggccattaattgaaacccccggcgggcttgtcgtcttttggcgcgctgccattagtcgagtttcacggctcctatcgatcaaccttggaattccctggttagggcgaatccagagcacctacagtcacgaatttagattagaggtgcataatgagctgtcagattggccaccccagtggtggagtttggagactctgtttaccaactctgggcaacaacatgggaagactaagccggtcttcagacggacgcaaatccggggcattctaaatgaacggacccataaacaacacatcattcagaccaaaataaccgacaggtaagcagccgatcacactaaaataagtccacttctatcttttcagacttgggaacctgattggccggactggtgcagaagcctagcctgtggtcgcctgaggcatataatatccatcacatgatctcgcgatgcttcgcgacgcgcttgctccgtcaatcaagtccacgatatcttagaagcgctcagccagacatgtccgacctcgatggaggctcatccgattatttggacagtgacctggaagactttgtggtctacagcaatgactctccaagatcagcaaaacgacgccgtctgagcgctcaagagtctgaagaagctcgcccgcgagcgcgccagaagaccattgatggagctagtagcagcgaggggtttgactcaggatcggaatcataccgcaatagcgacgagcaccggccatcatctcgagaccaaatccgtactctggacgaccctggagagcgaacggccaaatataggacgtttgttcccaagcgaacgttggacatccgcgaaaacattttcgttacccagttaacgcagccaccttcacctccagagaaaatacgtggacctcgatggaagaaaccggatcctattccgccatccccgccgaccatgcgcacggccgtagccgaaggcgatggccatagcactgggcaagagcaggattttggagatgatgaagacctaacggccgcgatcgaggcgtctctacagtcgtttgaggaggagaacaggacagaagccaagtcagccaacctcaaaagctctggcgatgccccggcctttgcgccctcggactcggtcaacctcattgacgacattcctgacgatgcgttcgattcggacttatccctctcaccaccaacgacgcaagcaccgaagataccttggaccacttcagaggctcgaaatcgtcctctaggtgttcgtcaaacaacattattcgatattgcggctcgaagctcagcaacacaacccttggttggtaagcagataacggtcccgccggacaaggtagagcccccgactcagcacaaattaaatcaggacgctttggaaacatgggtataccctaccaacctgggaaagacacgcgattatcagtttaacatcacccagaaagggttattttataaccttctagtagctctgcctacaggtttgggtaaaactttcatagccgccaccatcatgcttaactggctacgctggactaaaagcgctcaaattatatttgtcgctccaacaaaaccgctggtagctcagcaaatatctgcctgtctacggattgcgggtattccacgctctcaaacgaccatgttaacaggcgaagctcctcctggaatcagagcggaagaatggaaatcaaagcgagtcttcttcatgactccccaaactttgacaaacgatcttaaatcggggatagccgacccgaaacgaatcgtgctactcgtagtggacgaggctcatcgtgctactggcggctacgcatatgtcgaagtcgtcaaattcttgcggaggtttaaccagagctttagggttttagctttgacagcaacacccgggtccactgtcgaatcggtacaagccgtcattgatggccttgctatcgccagggtggagattcgcactgagcattcactcgatatccgagaatacgtgcatgcgagaaacacagacatccaaacgtttcagaattcagatgaaatgattttatgcatggaccttttgtctagcacactacaaccgcttgttgaccaacttcgtacactgaatgcattttggggaagggatccgatgtcgttgaccccatacggactcaccaaagcgagacagcagtggatgttgtctgacgctggcaggaatgcacactttggcttaaagaataagatcaacgcaatatttacagttttggcaagcatggcacatggtattgacctgctcaagtatcatgggattactcctttatatcgccacctgcttcattttcaatccaacacggacgggaagaaaggagggaaataccaacgtcaaattgtgcaagacgagcacttcaaaaagctcatgaactatctaactccatggaccaggaaccctgagtttattggacatccaaagctagaatacctgaggcaggttgttttgaaccactttatggatgctggtgaaggcctcatggagctggtaatgagaacaaacagctaccagagtgatgattttcgtacattttcgggacagcgctgaagaagtgacaagagttctcaaaagatatgagcccatgatacggccccatgtttttgttgggcaaagcagtgctaaaggctcagaaggaatgggtcagaaaacccagcttgacatcattcagaagttcaagaagggtacctataacacgattgtggccacctcgatcggtgaggaagggttggatatcggagaggtcgacctcattgtgtgttacgattcttcggcgtccccaatacgcatgttgcaacgcatgggacggactggtcgaaagagagccggtaatatcgttttgcttcttatgcaaggcaaggaggaagagaactatcttaaggcgaaagacaactatgaaaagatgcaacagcttatagcgagtggatcccagtttacgtttcatgacgatagatctccgcgcatcatacctcgtggcataaaaccagtccctgacaaacgacatgtggacattcccaatgaaaatgaagccagcgaccttccggagccgaagaaacgcaagggacgtgtcccgaagaagcccgcaaagcaatttcacatgccggacaacgtcgaaacaggttttacaaaggcatcgagcttgacagggacatcgaaaccggcagcaaagccaagaacaaaacaaaatgaaactcggaaagctcggataccgacgccagagcctgtgccggttccagacataaatgatgtcctgctcactcccgctcaacagaaggaactagagcagcactaccagaatgtaggaggcactagtccagaatttatccgctatcctcgaagcgacgcctttcccaagctgcagtcaattgggcgaccaacgaagatggtgggccatggctctctcacacagcgtgttgtcgatgccttgcaacgaataaatcagattggggcagactgcgaggagcgcttcaaagaagtattggatcgtgaggcaaagctgtctttcgaagagtcccttctttctagcaagtgtgcaactgctgaacgccgtctgagctcagcaaactccggccgaaaactaaatgcaccccagtttccactcggggattctggagatatcgacactgatgtagatttcccctcgcctagcaagctgttgtcagatattttggctatcagcagccgaaaccgtttcaacctccgcgcaaagtcagtcgtatcgaagatgatttcaacttcccaaaccctactgctcttttgacaccggatgccgagcgcagagatcacccaaaacggagaaggattgtgctcgataatgacagtgacgagtaatgattgttcaatacgattggaagaccattgggctttttgattgtataaacattcaggatgatatctaggaatataattacacatagcgcttattcacccgtcttcctgtatataaggagatgggcttcatacaagaatcagtcaggagtcaatattggagtcgattgacttttcgccgacgtttctggaccatcgtatagtcaattgggcgtcaagctcgaagtaacaagaagatgagagttattgctgcttatgaagcaatccgtttacagatattttacagatattcttatttacagaccgatctgcgtactattgctctgcagtagatgactatatagtgcccaggcggagctcttaaagccacatctcggcttgttgcgcccacgcacctctcatcccgcgtcatcttcagggacacctttgaccttaaacaagtaaacaacccaaagcacaacaacaatccccacgaaaccactataatggcggacgcccaatttgatagtgcgctgtaagtccttcacttgaaaactgtcttcgcaatataccccgcccattccaaacatgtctaccccaaaccaaccccgcctgcaccctgcacactccgctgacacggacgccatggctgcaccagcgacctcctccggcgcctgaacccccgtgacacaaagcagaacctccaggcaattacctctattgtgcccgaccttaccgaagaccttctatcatccgtcgaccagccgctcgagatccgtcgatgtcccaagacaaagcgcgactacttactctgcgactataaccgcgacggcgacagctacagatccccctggagcaatgagtttgatcctcctcttgacgatggcacagtaccgagcgagcgagtgagaaggctggaagttgccgcaaatgaggcgtttgatgtctatcgcgagctgtactacgagggcggtgttgggagtgtgtacttctgggatctggacgatgggtttgcaggtgttatacttctgaaaaagggtgcgtcgccaccttatagagtgggaacgaattggacgttactaatgcattcatgcgtacaggcgtgtccccaggcggaaagcactctggtgaatgggatagcattcacgtcttcgaggcgactgaccgagaacgcacggccctctatagctcacagcactggg

SEQ ID NO: 5097 - DNA, 4967 bp, Emericella nidulans
caccactgtttgcgccattttgtctcagccattcctcgccagcgcgcaaccagtcccaatcgcagaaatcctttattatccggtatgcggtaacagggttcacgctaacagtgctaacttgcagtggacttaatcccgtttggtcctcaattttgatcaattgcgactcgtccatttgggcgtgcgtgcgccacgtaccctgccccgttcgcttcatgataacccagtcacccttcttgaggcccttcaccgcggctccagttgcaatgacctcgaaagcaccctcatttccggcaatggcagagggttccagtgtaccaagcttcgtttcgaaaggaggcttgcttgggtatacaccttgaatctggttcacatcggcgggattcaggggcgcagcaataaggcgaagattgacttgtgtgccattgggagcggagattgaatgtgtgtgaagcctgcggcgagaaactcctgttaaaaacaagtcgataatggacgccgaacaactacttaccttaagacatcttttggttccccgtatttggagtagacgagcgctttagcttgggtatatccgtacgctgagatgtacctccttccatcaatctgcgggctcgaaattgggctccggcattgacgcgcggtggttgagcctacaaacgaagaaagacgtgttctcaggaaagatgtctgaattggcgacgttgctgtcgctgatcgcacgacacagcgtgaaaacatattggagattgtcgaacctagaggagtaattataaggttgagagcaagagctgaaatctgacgaagttaagatgaagagttcggatgacgtcgtcttttcgccctcgggccgacggagcttgagctttacgtagctctcaaccttatatagaacagtgtagaataccaggtatattagaggctctgcagtcaatttgcagtcaagactgacatgctatttcattttcatcaatagatgacagctgaaaaaaaaaaaaacaaaaaaaaaaaaaaggtggcagcagctgggccaccgaaatgactatggacctttggatatttggtatatattttttacctggtctatcgttgcttaagtgtctagtggacaaaaatgtccttgatctcgaatacaatgtagccctgccaccaatgagcaagctcaatttgtctttgaagcaagaaaagcattcttagcgtcagttgtgtaatactactatgttgcctacactgtagctggaaagctcagcagcgagaagagcttatggcggctgaagcacggaccactagcggtattccgggttctggccgtctccatccgccatacgcatcgttgtttctcaatctttgcgacaatcgctccagcggcctaatgtccctcctgctcgaagctgagagatatgtcgctaatcagagctcaaatcgcatgctcaatgccttcataactcctttgtgccggcattcagggcggtggcatgatcaagcgaaagatgccgatattcggggaaagcaaggtacgaaatatacttaaatattgtctattccaagaggtggctgagtgctaactaagtacgtggcgcagggaagcttaggtcccgactggatggccggttcatcgcattcaaagataacatatgcactcgcgacttccctacgacatgcgcctcgaaaagccgcgatacattcaccagtccgttcaatgcaacggtagtccagcaactggaagatgcgggggccattgtcgccggaaagacgaatttggacgagttcggtatggggtctcattccatctattcgtcattcggacatgtcctgaatacacgccggggtgatgattcaaaattcctctcggcaggaggaagttctggcggaaatgcagttgcggtcgctacggatcagtgctatgcgtacgtcactcactgatccgatacgagtaggaagacagcctaacgtatggcgaatagggcactagggacgaacacaggcggatgaattcgccttcctgccgcgtacaccggaactgttggctttaagccctcgtacgggctattatcccgatggggtgttatcgcgtatgccaactcactagacaccgttgggatcttggcaaagcgagtttcagtggctcgagatgtatttggtatgcagttgtcctaacctgagatacgagccatggcatttgctgaccggattttacagatgttttaaacaaacatgatccccgtgatccgacgagtatttcgccgtcgtcaaggtccaggatatcctcgaagttgaacttgcctcagctcacctctcgtctcacgtcccgcccccttcgcatcggcattccgctcgagtataacatctctgaactcgccccttcagtgcggcaggcctggtgtcactccttggaatatttgcgtcagcagggacacacaattcaacctgtatctttacctatgaccaagctagctttgtcagcgtactacgtacttgccccagccgaagcatcttcaaatctagcgaaatatgacggcgtcagatacgggactcgatcggacgacagcacagagaaccagtcagaaacctacctatatgcgaaaactagaggcgctggatttggcccagaggttaagcgacgaatcatgctaggcgcattcagtttgagcgctcaggccattgataattacttcatccaagcacagcgcattcgacgtctggttcggcatgatttcgatgccgctttccaggcagaacatcccctggccgccgaaatacgaaatgtcgaactttggcagcaagcttaacaaactgggattgacgttcttatctcaccaactgcgcccaccccgcccccaaccatctcagatattacggataccagcacgaaaaggtcaaacttggatgcttatataaatgatgtgttcacagtgcctgccagcttggccggccttccagccatatccgttcccgtctctggaaaggataatgctggcaatcaagaaggcgacatcctggctggcattcaggtaatcggccagtacggcgacgatgaacttgtgctcaaagtcggggaattgctagaaaggcgttaactgtagatcatgtactataatcaagttttataatgtggacatgtatagtctatgggatctactaatatcgcctcacatccgactacggcaaatccccagcttgacgtacagttctgtcgttgtaattgatcaccaatcccaccaatccatgacccagctggtctatagaagacatcagaatttgagttattatacatctgataaagcgtgatgaatattgcattataatacagtgaccacgcaggcagctgaaagtacaaccccattcaacctccggtcataggggtatcctccggttctggcggtacgggcacgtcagtaattggcgtatttgccacgccgagactcatagtatcttcaaagccagtgtggcatgcgtcctcgtcggcaagcttgatactcgcagtgccacttccgttactctccgcaggagcagtcgacaaagtagtggcagggtcataggcagcaccgacgccgcctttgagaacgtctgtgccgccaacggctcctacgccaggggcgtccatctcagcgttattaacaacattaccgtccacgctgccccagacaagcattgcttcgacctcgtctacaatatcggccagtacgtcttcgacaatttgctcgtcgaagcgctctccaattcctttgactggctcaccattttctgtagcggacggcggactaaaccaccagggaccttggaagcgacactcaacagcaccacctccatagcagctaacagctgggtagtacccgatcataccatcatcggcattttcacgctcaccgagcccgaggttgttcgtgccattcgcaagtctgctagcaggtggtagaaaggcgtagagctccttaaatggcgtacccatttttatgccgttcttgtatatcgtgatacttgagccaggtaatgtacgtagtgatggatcctctgcgttcaatggggatggagggccgaatgcaggggtttctttgagattgaaagcgtagtcacgcagttgcttggttggaaagacattggactgttgccagcaaaagtcatttttgtagtgaaaggggatgcgatcacggatgatattagtagctgaagcaggcccgggcttgaaattatcacaagccgggtcatatgttccctcgacaatctttctgtggagtgaaagcggcgggagagtgatgagcatgccaatgacatcgccttcgcgaatcgactcacccttggggaagaagtattcgcaccgcatgcgattgaccacctcgccgtttacatcacggattccgtaaccgtaacagtcgactcctacattgacatcaagatctgcttcccgtcgagcaaatccaagccgcacatgacctctcgacggtaaggcattgctcccgtttgaggtagttgcttccgagctactcattatacccgttatgatgcgtgcttcataatagtaggtccctttctcttgcgcacacattagcgcgagccgtgtgccatggtttattggtcgtgacagcaagggcgttcttggagaatagatcgaagccgggagtcctcgagctaaaacggtctgataggaggaactccgttggcgaatttgaaatagggagtccgtttgtttagcatacttatcaaaaccgttctgttgtagttataacacttttaaaatccaacttgccacacactcctttggccccaaagttattcaggtttgtgaaagacggccggttacacccttggtttatccattctccccatgggtatgaatctcttttttgggggcccttctactattttttttttttgttgtgactgcgctcccttttctttgatgggggcggataatacttcctattttaatcctcatacatctttgttgtgataggtacaggagaccttcg

SEQ ID NO: 5098 - DNA, 3544 bp, Emericella nidulans
gatctagaggacccaaaatttctttacaatggcaacacctcaagccgacaagcaagccgtctccaaggccgccggccagtcactggtgattgaagaaggccctctcatggcaccgggccccaacgagatcctcgtcaaggtggaagcatgcggtgtttgcttctcagatgtcttcgcgcagaacaacgtgatgggtgggggcttgtatgtttcctccttctttactcctcctgcaaaggcgaacactaaagcatactgccgcattctagtcccatcgcgcctggccatgagattgttggccgagtagcagacgtaggcgacagagtgtcgggctgggcaattggagaccgcattggaggcgcatggcatggttgacatgacggtatgttgatttcccgtttcgagttggcttttgttactcattgggtaggtatgtttttggcagactagagaaaagggtcatgcaaagcttgccgcaaggactggtatcagatgtgcgactcgcaggtcatcaacggcgtgacgaaggatggtggttgtatgttttcccacttcaattcagcttctatgcaaccgctgagcatcacagacgcagagtattgcctcctaaacccagaagccgctgtccgtgttccagcgcatctctcagccgccaaatacgtgcctatcccctgcgccggtgtctcggtctctaactcatttaccacatgaaagtccccgtcggcgaaaccgtaacaattcaaggtcttggcggactaggccacctcgccattcagtacacgaataagatgggcttccggttggttgctatctcacggggagcgacaaggagggatttgctagagagctaggtgctcatgagtatattgactccagcaaggtgaatgatgtcggattggcgctgcgcgagttgggcggcgcatccttaattgttaccacagccccctcggcggaggtgatgaagccgctcttggagggtttgggagtccttggaaagtcgttgattctatctggtaagtcatctcctgctcctccctcccacatagggtttaaatatgctgatcatgggtcgcagtgccgggtgaattgcccatagatacggtaaccatggcaagttgcaattcttcctataccggaagcaactccgctaacaaacgcttagcttaaatacggcgcttcggttcagttctggccatgcggccacgccgcagactcaaaagaggcgattgcctttacggagctgcaaggatcgactgtctggtggaagagttccctctagccaaagcaaacgaggcattcggtaagcttcattcacagttcttgggagatactgattcgaatactaacttccgcgatcacaggatcaatgttgaagaggacagtcaggttccgggctgtcattacgatggaatgattcaacattacggacacggtaacgaaaaagtgtagttaggcttagacaggcggctcaattgagaacaagtgcaagtaactggtagcaaaaactccacgcgtttgccatgatttgccaacctgcgtacagaggttcgaagctgtagaatgaatcgacatcgtaggctaggccaccgcaccaggcagcgtgctctggaacatggttggggaaccatctggccgcccaaccgcattgattatggccaggcctaggatgccattcatctcgattggcaaaggctccacgcccaggcggctactgagaatgtcagcttgagcgacaagcctcctagtgacttcggcaaccctctttgcaacagcaaagtactcaccaaacacttcaaacacagttatcgccgtgtcgaatgctgcgcgggcgcccgcactctctgagtgagtgggataagccagcacgaaacccataaaagaaggatcgcgttccattgccactgataggcctcgtaccagcctttgaggaagtcattagtagccaacgtctcgcagaggacatgggtgatggtagccgcatgcttcgcacaggagactgcatgtttttggacaacgccattaggtggcggacatgacggagaaggaaaactgataaaggatcggtagatattcatgaccatgttatggtagagatgctccagcagaagccgttggcgctgcaaccatggtgtagcatagcgttctgggtctaacttagagccgtctgtcgaaaaaggttcacccgcccctctgcgtcctgtcttcatagcatcagggacagtctctaaccattctgtgatgacgcccatttgcaacgcaaaaaattctgccgcctgtttgagagaggcggcgtctgtgtacaaacttcttgctccattcgccgccagaaggtcggcacatttgtcccagtacctggagtggacagtatgcgccgccagcaccaaagttgtgactaggcagcagtaggtaaaccaggtcactttgtccccacgagccgcaatattcgacagtgactgccgagcaagctcatggtcatcagcagggagctgacaggcctctgtcacctcggacacggatgatggtcggccaagtttcatgcaagtcttggtttcaaccacgtagagagtccaccagatgcatctacgcagttccctctgtggtcgcggcaggtcagcgggtgggtcgagatgaagaccgagaatttgggccgtacgcacagcaatagtcagcgtggtatgcgccatgttctggaatgaggcattgcagaggtaaacagcggcgaagatgtgacactggagagtgctgatagacggagtctccagttcaaacatgaggagggtttgtgagcgacggtagtactatcgaccagcggcactggcgcctttaatactgctgccgaagcccggtctgttgccgggtgtaatggcaacgccgaactgcatgcacagcgcaaggacgatgtcaaccaaggcagaaggggcccgcgtcgtggctgaatctacccacagagacttgtaatgctcgcgaaactcggcctcatccaaaatttgataggttgggtggtacgaatgccagaacatatccagaaaaaaatcctcttggatcggtcgaggtatgtctccgcgcttccatgtccacctgcagtagagccctctccggcaaggtgtttcgacttcagcgaggccggctgcaacgtatgatcatcctggggttgttgaagagcagaagaaaggtatgcgttcatacgaccgatgaagtaaaacgaggacgcgggcccgtaccattgggtctgggccgagtgcgcggtgcacgtctgaatcccatcccagcctctcctatttatcccactcgagaccgatcgatcatttttgcgaggtactaaattcttggtcgcatatttgagctggtgttcgagatcgtggaccttttgctacagtcgctcgacttccctactccagttagtctaacggctgaagggtgcaggacaggaacgaactacctcaaacgtgcggcagcgtctgcgttgcgacggctctctttagcccattgcgctttgtgcagctccctcctctgttctgacagttctgaaaaggcagatcgctgt

SEQ ID NO: 5099 - DNA, 7485 bp, Emericella nidulans
actctctggagacatcattcagttcatttatggagaggacggtctcgatggcgcacatattgagcaccagaaggttgatattcttacatgttccgatgagaagtttaaggagcggttccggattgacctcatggatcctgccctcagcctaggcccggatgtactggagcaggccaatgagattgctggagatgttgaagtccaaagatacctggaccaggagtgggaagagttgttgaaggctcgagaagttgttcgccatgttgcgaagggcacggaagattcaatgccacttcctatcaacattcagcggattctagaaatggctcgaaccactttcagaattcgcgagggaacgatgagcgatttgcatccagcggaggttattccccaggtgcaatcgcttctcgataggcttgtgattgtgcgtggtgatgatcccatctcaaaagaggcgcaggagagtgcgacaatgctattcaaggcgcaattacgcagtcgccttgcgttcaagagactggtaactcagtattctatgaacaaattggccttccaacacgttcttggtgccattgaatcgcgttttgctaaggcagccgccgctcctggtgagatggtaggcgttctagcagctcagtcaattggtgaaccggccactcagatgacattgaacactttccatttcgccggtgtctcgtccaagaacgttacacttggtgtaccccgtctgaaggaaatcttaaacgttgcgacaaacatcaagactccctctatgacagtttaccaagagcctgagagggcccatgacaaggagggagctaagcagcttcgaagtgccgtcgaatacacaaacctacgctccattacagaggccacggagatctactatgatccagacattcagaccacggttattgagaacgatcgcgacatggtagagtcatatttcatcattccggaggatgttaacgacgactcttctcgtcagtccaagtggctgctccgtatcatattgagtcgtgccaagcttcttgacaaaggactcactgtgcaggacgttgctactaagatcaagcaggcgtatccgagggatattgctgtgatttttagtgataacaacgccgacgagcaggtcattcgtatccgccagatccaggactataaggaagatgaggatgacgatgatattgagtacgatgtcaccttgaagaagcttgaacaacaccttctggacactctgaaccttcgcggtgttcctggtgttgaacgtgctttcatcaatgagaagaagaagatcagagtacaggaagacggggccttgacggatgagcagtcagacccattgtgcagagagtggatccttgaaacaagcggctcatccctcgctgaggttctggcaattccaggtgtcgatgccactcggacatactcaaaccagttcattgaggttttcgaagtgttcggtattgaagctgcgcgggcagccgtccttcgcgagtttacggtggtgttgtccttcgacggatcctatgttaaccatcgtcatttggcgcttttggtggatgtgatgactatgcgtggctatctgaccccggttactcgccatggaatcaaccgtgccgataatggtgcacttatgcgctgctcctttgaagagactgttgagatccttctggaagctgccgcttttggcgaacttgacgattgccgcggtgtgtcagagaacctgattctgggacagatggctcctgcgggcacaggggagttcgatatttaccttgaccagaatatgctgaacactgtcgtatcgaacaacgctcgttatggagtgatgggagctttgggagcaaaagatgcgatcatatctgatggcgccgcgacccagtatgacaccggatctcctatgcaagaaagtgcctacattggaactcctgatcccgactcgaacttttctccaattcgccaggcgggcgccgaaacccccggtgggttcaccgaataccagccttctggtggctttggtggattcagccctgcagccaccagcccagcaggttactcgcccagcagccccttcagtgccaaccctacatcgcctggctattccccaacctccagctactcccccacctctcctggcatgggtatcacaagcccgcgcttcatgacatccccgggtttctcccccgccagtccgtcatttgcgccgacatccccggcctactcgcctacatcgccagcttatgggcaggttcgccgacgtcgccatcatactctccaacctcgcctgggttctcaccaacgtcgccgaactacagccctacatcgccaagcttcagtccaacttcacctgcatttagcccaacgtcgccaagctatagtccgactagcccggctatcggtggtgctcggcatttatctccaacttcgcctacttctccgaagtacacacctacgtctcccgggtggtcacccacgagcccccagacgtactctcccacgtcacccaactttgccggctcgccgacttcgcccggtggaccaacatcccctggttacagccctacgtcgccggcattcagccccacgtaagtcaataccttcaatacctcttgagattgttccgctgcctaatctttcctaccagctctcctcgccagtaaaactagaacttctgctaatggtttgtttctggcgtttgatgtattcttgtactatcacttttcgcattcaatttcccatgaaacaagaaaagataacatcttgcatcttcccgcggaattggttggttatatgttctgcaatttgggcatgcttagcctcttttcagcctcttcgttcctccccttctccctttcccttttaatgtatgtgatctatctcacgtcgtgacccgagcctcctgtcgatgtttattctttccagccagacccgtgagattgcgaacaaatcctcacgggatggcgatgtgttatgttgcgtttctttttcggacgtcgaatggcaagcgattttattttagaaccgaggacccttgggttattttctcgagccggacgtttcgagaagcgaagcgatggttgctgttattttttattgtttctcggtttgcatggagacgagactgttagtaccgcgcgcgatggagttctctttttatcttgtacacattcttagagaagatagtcctgggttggaggggagggaacgaatcacgtttaaaacaaattgaaaatgaaaagacctgagactttgaatgagtagtttgatctggtaatctagaagtattccgtagaactgcctgccaagaaatcggcgaaataaagctccgcaacgccaggtggccgatagtgtaagaggagctccagcgctcaccatgaccctcggctgacggcagagcttcatccatatttccttccatatttgccattgaactggtagtgaagtggtcgccatgcgtttcaccttgccgacacctatacagtttccccaagcaaaatgaagaacctgtggctatggcacttcctgcccttggtgctctgtaagtccccgcaagtgagctagctggcggaagatccataaaggcttcgctaatactgacaattctcgctctagtgtttctctgtacattcgcgcttgatacccataatgaatacaccctttcagatgtcactcggggttcaccacatccttccggtgatacgtccaaccccgacactcctccaaatggtagtccctcctctggctgattgctgactgtgtagctgctcctgctgactcacaaatcatcctagagcgcgtccaatatgctctcagaatcctacgcgaggctaagatacccgttatcccgtcggccgggaagccgtctggtttcatcggctacacctggtattatgcgcaagaagctttccggatactgtttatgaatggaccaccatcaagcagcggtgcgcagaggaaaatacatccaagtattgccagagcggtcgacgcccttaagattgcggctgtggaggatcacgatccggatgcgatgtttctgctagcagaaatgaacttttacggcaacttctcccacccccaggatttcaagcaggcattccactggtacaagagtctggcttcgtgggacggaaatagcaccgctcagtatatgcttggtttcatgtatgccacagggattggtggtggagttgaacgcgatcaagccaaggctttgttgtaccacacctttgctgcagaggcgggaaatacgaggtccgaaatgactcttgcctatcgccatcacgctggtattggtactcccaggaattgtgacgaggctacctactactacaagcaagttgcggataaggctatcgactactaccgatccggtccgcctggtggtcacagtatggtacgcgaatcataccgttgggccgacgaagaaggcggcgtatatggtgaaggtgccagcgcatccagctccggacctagtgcacttcgtgatggttcaagttcgactgaagccagtttagaggatgtccttgaatatctcgatctcatgtccaggaaaggggaggtaaaggcgacattcagcttgggtaaaatgcattacgaaggcacaaagggcctccccaagaattataagaaggcactgaagtatttcaaacaggtgactaaacggtactggaataaggacaattcgctaaacccaaaccaccctgctgggattgagaaactggcatccaaagcagcgggccacgtaggcctaatgtatttacgcggcgaaggcgtggagcaaaattttgaaaccgcttatacctggtttaaactcggactggccaacggggacgcactctgccaacaccaaatcgggctcatgtatttgcatggctatggagtacagcaagacgctttcaaagcctcttcttatttcaaagcggcggctgaccaggattatccggcagcggaaactcgcttaggtgctttattcctggatcaaggagatgtcactacagctaccaaatatttcgaacttgctgctcgttggggatggatggaagcattttattaccttgcagaactagccaacaatggcgttggccggcagagacattgcggactcgctgcgtcgtactataaaatggttgcagaaaaagcggaagtaatccactcctccttcacagaagccaacgccgcttacgagagtggtgacaaagagcgagcatttatcccgatgcttatggctgcagaacaagggtatgaacatgcccaggcgaatgtggcattcattctcgatgaacagcgttcattgttaccattggagagatttctacctggattgaggaagtcccagccccctctgcttaagaacgccgctttggctcttatccagtggactcgctcagccaaacaggcaaatgtcgactctctgctcaaaatgggcgactattacttaagtggcaatggcgttgacattgacaccgagaaagcttccacatgttaccacacggctgctgaagcccatttcagtgcgcaggcgtattggaatttggggtggatgcacgaaaatggtattgccgtcgagcaagattttcacatggctaagcgctattatgacctggctctggagacgagcagcgaggcttacttgcctgttaaactgagcctgctgaaactgcgagcacgcagtgcatggaaccggctcactaatgggaaggtcaattccattcgagaagatgacggtacgaaatattattcccagatgctagtctgctgagaacacagctaacacctcgtagaacccaaaccccggcgcaccttcagtgagtggattgcagcgttcattgaaaatgatgaggaggaagaagccaactatcgtgcacaactatataagcatggcgaagaggatgacgacgatatcttgtcgggtagtgagcatcaccgtcttgacgaccatgaggatggttactatgacgacctcgagcttgatattgacgaaagtattctggagggcctcatcattttatcgttagctgcgaccctcatggtcttggtgtatttgcgacagcaacgtaataaccgagagagaccaaacgacgaccaagccgcgaacgcagcaggacaggccaacgcaaataaccgaggtttctttcctcgtcctggggatcccgagtttgcccaatgggtggctgggggagttggtcattagcggtattttgcttagctctgtatatctgtatgttataatattgagctattttatggaatgaatgatcgtatagcgtcttttcgttccctgggttcttaaaacaattgcatggccctggaccagagctgaagacgtcattgtacctgttcttatcttatcttatctataagagataaaacattactgtaattcccagcttcgcttccgccatccaccatcaaccgattgtgtcccaccattccatcttctgattaccgcggtatctaatccctaaaaacatgtaatatattaaaaacaagagttgttataggaaatgacttcttctattcccaatggcaaacgtcgtcggcttgaccaggcgacaaccactctctccagaccgttcaagtctcctctccgcagacctactcctgcagtgaaagacgaggctgcgtcatcaaaaattgagggaatggcagcatctagttctttcataaagaccattacacctgatgggcaggataacagtactgcgctttctacttccagcacaacaaatgcacctgctacaccaccaccaacccgcaaaagaacgtttcctgggcagcgtcttacgcccgcaaggaagcccgtaccctcagacccagagataatggatctccagaaacgacaacgcgagctacagtcacgcttgtcgagcttgcggtccgacctcgacactgttcagcaagccctgaggatagagtcgtccagtaacgacgaggaattggaggtactgattatgaagtggaagaaagttagccaggatgcagcagaagaggtgttctctggtgctcaggagcgaatttcgcgcatgggaggtgtcaaggcgtggcgggagcgaacgaataataacgatgctcggtgggagcaggaggagatggagacctggttcggcaatgtggatgctgatgcacttgacatggatgaggatgaactgcaggcccgcaaggctgagctgagggaagagatggagaggaagaatgtgaaagggtctagtgatgattctgaggttgcttctctcttcattctctttatggtacatgctaagctgaactctccaggagtttactatggatatgatgctcaagatgctcaacattgagcttacgacgatcggctacgacaaagcgaatcagaggtggattacaggatgaggggcttcgagttacggtactgatattctcacacttcgatgtgttggggcatggtgtttcaactaggtgctttttattctgacttctgatgaaagggccaataaacaaatggtg

SEQ ID NO: 5100 - DNA, 10513 bp, Emericella nidulans
  unsure (1)..(10513): unsure at all n locations
ttccgaagtctggatagagggaaacaggctcgactaccccagataaaatgatttagacgatggtcaagggcgagcgacagggtagtcgaacaagagagggaggtcgcaagcggttgccagggactgaatgtatgaagcgcaaatgaagtagttggtagtagttgttgggcacgcggagttctggaaccactaaagggtaagcagaaatctatgcgtcccaaccacaccccaaacactgagcagagtagatctgcgctcgatcaaaagtgcttgaaactagttgacagaccgatcgaaagattgcggctgtgctaatgacctgtctggtgcaggagtcggaaagggacttgacgagaagtatggaattgacggggtggtaggacgaaaagaagagaagcacctgatgaaagacggagtatagaaggaggaaagacagggaaacacaaccagcgacagcacacgagtgcaggactcggccaaacgaggaggagaggatgggggaggcttgaatgaggaaaaacctgagtttgtacagatctgaaagttgaggacctgttgaagaagaactagagatgatcctaaattactgcttcttagcgctcatacagggcgttacgcgcctcggccaatattacgcctctccctgggggcggtcccacaacattgaccaatcaacgctccgatatccgtctccgtctttgctttaaaaaacaggcttaactgaatcatagagttattgaagagctcaatgatatttcgtaatgtagtcgtctatacacatttacatcgcatattagtactgtcaagtcgaaacccttctattgcttgagtatgagtttccacgaggcgcgcagtggccgtcaaagcaaatatacttactgtgtattcatattaccaattgacatcattcactctagcatggaggactagattataccctggaaaacacgaaggccagaaaatcagactagaaatggttggtagggaaatagaaactagcgttggtttaaagcgactcctttccaacgtgatgcagggaaaagtttggccttgtcatggcagcacaaattcattatcttacgttaccgaagtatatgatctgatacccaaagcaggcagaaaagaattctgaggctatggaaggggaagcggaagcatttactcattttgtattttccattttcggtcaatgtcagctatattagataatagattgagccttccttgcatactattcaccatggagatattcaaaattgacacccnccaaaccactatatatatatatcctcactgattcttctccccaacatccaacgcgaccaggaaccggcttacgcagttatatgcagcagcagttgccgtgatctcaaccacctctcgctcgttgaaccgctccttaactgcctcaaaaatttcgtctcgcacagtaacagtcttcgtcatagcatcggtgtatgacaaaacagcgccctcagcaggagtcaatactccctctaaaacctttgcagcgatatcggcgtccgcgtcctcaacgacttgaagcgctgcatcactcagtccagcctgtgatagcaagggcgagtgctgctcccactcgaacagggcgccgttgactatggccacgcgggagatgacgagctcacggatcaccgaactgagactggtccgctgacgaattgcacccagaaatgaattccacccgtctgcgactgggaatgagtgcagaagcgcccgatctagtggtagaaggccattgggggcacgtcgggtctgcactcgggcgagaatttcagcctcttcaggcgtgctggttggtggcggatcggcgacgtatgggaggcgcatcgagaacctttcctactgcttgtataatgaagaaatattttcttaattctgcggtatactttatgcagcaagtagtctagagtctgttagctacgccatgaaatcagtatgatcatatgatggcacggcctaccaagagccccagtaaatagagcgttatttccactatccgccgacttcgtctatatactcgatggaggattggagagatgggttggcccatttatacgacgtgagtccttaaccttagcccaccaaccccgcggtgggctcgggaaggctccgagtccgcggcgggacagccgcctcgatttgtttacagcattgtatacattgcatctatactcatctacattggggactttccacatcatgcatattactatctaactgctcgcccaacgatctttgcttgttacattgtcactcggcttcgtggtggtattggcactatgtccctcatctcggtaatgatataggcccggtccattccgcagtctttccgaccctcgcacagatgttttcctgcagctgtcgtactataatctaaagccctgagaacaaccataggtctgccaattagatgtttcaagacaaaatgcgcttgtgagtcatgcccctgaccaccctttggtcggtagctaggcgggattgtttgatgggctggcgtttttctaatatgctcaaatgattgagtagctggcctgacggagtatgatattagaaagagagaacacagagattcttgttttatggacctcagcggaatgataactggtcgtgtgccatgacccgcgcagcgtggttgatgacgatgcggcttataaagtgcaaaacgactactgctcaaggggcattagccaaatcttctctcaagatgcgctatacagtctcgagttcggtttcgaaaggaaagttgtatgtagtggtagatgtcaagaagagtcaccttgaccctgccctgtgctagatgtcatgtatgcacactagagcttcttggcgcaggtcattccccaccgccagagctccagcaagcaacaacaataacaagctggctgtgcgaccgtagcttctaacctcctttttgaacaacggacaaaatcgaacaatgccaccaaagggtgcaaaaccgaccagtgacgaactccttgcccagttcgacaacctaggcatcgagtcgtcagcggatccctcgacgaagcctgcaaccacaactactactgccgcccctacccagtccgatgaggatattctggcggaactggggtccctagcagcccagcgccctgcaagccggactggaaccccgcgtacatcactcgccgagcaaaggacatcaacaaaatcgcccaaacccgcgacgcctgctgggccaacgagcgaggacaagcccgctcctcgaaagtctggggacagtgctcagaacaatcaagctgcagatgcgcagcctacttctagaaaggagccgccggttgaggggaaggcatcgtctagtggcggggggagctggtggggagggatctttgcgactgcaacggcaactgcttctgcggctatgaagcaggccgaggccgccgtgaaagaaatccaacagaacgaagaggctctgaagtgggctgagcaggtgaaagggaatgttggcgcgctgaaagacttaggtacgttcgtgtctatgggtagctcctgagctctttgtactaatggtactaggcggcgagcttcgcagcattgctatacctacgtttacctcgctcatccacagaatcgcaccgccgatctcctcacacgaacgccttcagatccatgtcacacacgatctgtcaggctatcccagcctcgatccgctcgtctatgcgggtgtgtcacgcgtaatgtctcaggttgaagggggagatttgctggtcattcagagaggacaggaatccgccccgaagcgtgggcaagacaacagcgcatcgaccgcaggctggcgtgatggcccctggtggcgaacagtcaccccgggtaacccccgcagcatctcagccgtgcccgggcttgtagaggcaacaaagctttgccgagccagcgcagagggctacgctgccgaatactacgcctccagaggcggggttgaagaagccgcgaagcaggctactcaggtccttagcgaaaccaaccccgtccgaagcagcgacatcttcctcgccattcaacgtgtcgcccagacgacgtcaaccgccgacctcttccaggccggcccggcaacggaaaaggccgttccagagggtgtagtggatgttcctgacgctccggaagaagaggtcgccttcgccctgtaccttcacgatccaatccacggcatcgcgttccataccgtatcacaagccgtgccccagaaatggatcaactggctcgacgcgtcctcagcccctgcacataaccccgaccctgaatctgatagccacgtgccccaagccgtcgtcccagaagacattgctgagatcattgagggtggtggtgtcgaccctcgtgaatgggcagctgagtggattgaggaagcaatctcgcttgctgttggcgtcgtcgcgcagcgctacgtcgcacgtaggatgggcgtaggtgagtctgctgctgcaaaggggaagatgcgtgctgagcaggcatctgttgtggaaagtggagctggggaagctgcgcgggcgctgtgatgtgacacatcacctccttcttaattacaaatgaatgcacttcagccccattcagagctcgtttggctttcgcttatgcctaaagtttatcttgagctattgtgatactccgatcgaatttgtatccccattgcttggtttcctcaagactatggatatttttatcttgtcttatctccaaactatatatagtgtagaatcctaaacgactagactatcatggtttcccatgacgcccagaagctccctaatccaggcatgtccgattcatccaagccttgctctaggattaacgcggaacattagtagtacgtacgctacttgcctactccattagcaaacaactcagtcggaatcaaagaatatcggaaacgagaaaccgttgcgggtatcattctagtaagtaggtaatctagtaaaagtctatactatattgcagtcgatctagccgtgcttatcatatcaaagatgcaaaggcccctctaaccccggtacataccagaagtttgcgcagagaggcgtcacactgtaaatcccaagtcagtgtcgttattcactctttagataatggtggtttttacctggtgctcccgtttaacacagtatgagcgtctgtaccctcttcactggcctgcagggctttcttcatgtccgtgagctcagcggaccacttgaaatcgcgcgatctgagggtcgaggttggcttggttccgttcgtctgcacaccattgctgagcgtctcaatatccgtcaccttttccttttacgcctccccgttcacatgagcatggccatttgtgataccatttgtcatcgccttcttcacacccacacctgcctccgcagctccatgaccaccaacctccgcatacagacatcctctcgaccaataatatggcaaggtccgcgtgtacagcaccggtctcgtctcaacatcaagccgcatcggaatgttcaggttataaagctcaactctttcatcccagttctccatcagatggtgcacaatccgcacagctagccgcgccgcagcctcaataatatccatgggttgctcgtccttgctgccgaaggaaacggcaactccgcgctttccacaggtcgcggcttcgagcgcacctcctacagtccctgaagataaattgtagatagttgatgcgttgcggccgtggttgggacctgagattacgaggtcgatgggcggccggtcagtaaagaggttgaagaggccgagttgcacgcaagctgcgggagtgccattggtgatgaccacccagggccattctgtttcgctttcagattcagagtccacttcatggagttcgtcccaggtgccgtcgttgcggaacgcggctggcggcacataggttgctttcagaggtgcttcgatgatgtgggctttgccgatccaagagcgggatgctgcaggaatggcaacggaaacgaggtgacctgcgcttttgagggcgtggacgagaggaccgacatagggggataatcgccgcgagggcggaccatcgtcgttgactagctgttacatcatcagtttacgcaggtccccccaaaacgaattgtctggcaatcaatgcatatgcatgcttctacccatcggaggtttccgctcagatccagatgagtcgtttggcttcggcgtgtctctgctccctccggaaaggggccccgaaaggcttcggccaaatgctggtcttgtgacttcatgatcatcccaaccatgacggctggcgaggcgaagcgagggttggatggcactgatttgtcccagattgagaagcgaacaaaaagaaaacataccaatatatgcatcacagacgcctttttttaaggatcttcaatgcttgccggttcagtaattcaactaggtggttacgacaaggcctgagcttgtccagatatagttgatggttgtgtccgaaagcgtaaattttgtgaaatcataggatttcagaagaaccgtcgcctgagcggtctttattatcaatatttatagctcaactccggatgaagtcttctcattgcccgttttctaccgatgccacctctcaacttcatctcgaatctggtcgcgcggtgaagcttttgggaggttgcggggagagagagatagactgaggtatggaatgaaattactggtacgccataagtgactgaaaacacgcgaaagtaagtgtataaaacatgtaaggtatgtgaaatgacgcgccgagaccttgatggaccgaaaagaggctgcggtgaagctgtcgtggggaacaatctccgccgtccagaccagccagcccccagccctgctgtcagaatcggggcacttgaggcagcctacttaagatgcaagtcagtcgagtatcaataagttacaggcaccaagtttggcgtgacagcgaacgtggaagaatatcgtttatgagtgaggcgtgccaagatcgattatggcatagttcgttcgagacgccagtgagcgccaaacctgaagccgtgcggttaattgtagcaggacagaacgagacagaattttccaggttccggtgggttcatgcctcaaactacacggggctgacggggagatcatggtccgctgtccggggcatccagctccgggcttttgacggagtattcttgcagctgcaacgaggagaatgccagggtgctcataaatgcactgttctcgggtgcggttcattctttgcttgagccaagacgtctgaggtgttacattgaggacatcatttgtgttgactgttgagaggagtagtatccgcagtatccgcagtccccctaagtcagcgtctctggtccgaccaaacattgactctggacggaacacgcttctagaagggcttgcccttagatcggctctgccattatttactccatctccgctgagttaagaccgattggagcacaatccgaccatgaatcgcgtgcgaatatgctggattgtgcgacgaccacagaggtcagctggtatggatgggatgatcgtgcgtaatgctgatagcgagcattaaacattgtatgagtaaactggctgttatcgccgtcagagctggcgtgatctggttatagtaatgtgggctatggacttggtatttcttggtgtgctggcgcggttggcgatcatgaattgggcgaggtttcacgcccagaactgatctgctcgatcttcagacgggtctgcattgtaaggagtcgcactgtttaagtcgcaaacacataaaacacgagaagaacactggaattgaagggaattgcattcactcaagaccattatcaatagactgaaactctggactcaagacactgagacagtctggcccgtgcgcagatattattaagagtaatcaccatccagttctgacgactgcaccgcatcggaggccgatcgcctcacagtagatgggaggagcgcatcaagccaggggagaagctctgtttgcgcagtaggccgcggcgatcattagattctcggtgatggcggatcgtcttcggggtgaataaacctcctttgaccttggggccaggagttgctggaggagttgaaggcgttgagcggggtacagaggcctgggaatgtccagttgcatcggcttcgaggccaatgctcaagtccaaagcagtcgaaggttgggtactatcttgaaaagaaaaactgtcttgattcgtagagcagccggtgttctgcgacagagaccaaaggtccttgccccagtcctgcgccggctgactgttatgctgtacagtggaaataaccggagactggtcgccacagtcggttgagaacgagtcaagtgggaataactggtcgaactcgctaggaaaggacacatccttgttggcgtcggtactcgatgtgtccatattgacgtactgattaaacagatcattgaatgaatgatcgaatgggtgggcgaacatcttgccagcgggtgagcgggtgatcacctttccgtttgcggcgatgatggaagaggctgccagaagacctgaaccagcgggctgtaagctgagcacctatgattggtgataagatttcaggtgtcaagtctggtctctactcccagggcaggtcaaggcaggcaaagtttgggaaagggagccgatgatccgccagtatggccgtatggtcgagggcgcagatggaatgcagcgcagcgcgttggaaccgtttgatcgattgacaattgaacaaaacactgcacagcatgcaaagaagacaaagcaaacaaacaatagaacaagggccctatttgaattgtcacagtcgtcgccagcctctgaatttccctttgcattccagtcgttctatagtgggagaggaatgcggactaacgacctggcggggctttgatatcgtccactctctgccaatcgacccagttgagagaactatggattcctcaagtaaccttacctaccaatcacgggctgagaggaaagacgagttcccttgaacctcaccactgggtgacgaaaagtccacttcaaatgctgaatggccacccgccggaatgcaacgcttcactacgccagaagcggaggatgggtatcagccgggacgagaaaagccggacagtaactctgatggctcttcgacgttagggaacaggactgaggacttgtaggcaacagacgcggatcagtcggccccgtcggcagaatccgtttaggctgtcttggggtttcctcgaccttggaagcggctcacaaatataagcgtcattgctggctctcggcataagccaacaagataaaagtagtttctcccgggccacagtgatcaacatcagtcttgcgcccatcaagtcgcctttgaatttccaatgggaccgatacccattcggtggagccgatatttttgtccttcagaagcccggtccactgagtctattacaacttggtggaatgcccatcaagggttcgagagccggtgggatgggctaggtcgcggagaggaatgtgcgccctaagcaacaatgcgctaaacagacctctggtatgctggcggccaaagacataaagacagacacatacttggcgcatctgtgcgcccgctggtctagagcgcatctgtgtcgattttccctctgcaaagagcttgcttcaggtgggcttctattattatccccagtcccggattgtgggaagtcttggatgcttgcattttcaccctcagcctcttcgactcccagcccatctcaatcacagtccttgaaatcgcattgcacattgtttgttcttagtcttagcatatgagaaggctgcgaaactcgtgctgcaggggactgagcctgcagagacgttgcccagcggcttctttgttctctgccctggactcggtctgtcgtgcatgaaccaaacaacagctgagtgtcctattggacggtagagtgttatagaacgatttccaatcctgtcaaggctgcgccctggctgagggaatttaatgaacctcgtggtagcacaatcataccctgagagtcgggatgccgcagttagaaccgttgcgcaaaggagacaaaggagtgctggttcgagggactgttcctcgaccctagccagccgcctcaaagagccaacacgagagtaattgtttggttgctcaattgacaaagggaatggttagggatggtctcccaagatcccctctggacccattggtggtagaaaggctcgcctgaggctcctcagactctttcagcaatgccacgcccctcgaacaaaaaacaaaagtaccacaattccggaacattgagacagggagtactatggaacatggcaagtcatcatttgaaaaagtgattgtcaggattgaggccatcatcgagtggtggaagttattctcctatgttgagcggcagcacacgtggctgcattattaaaatgggcatgcataattacataatcaatacttcaacgatagcagtacaatgaaatattgggccaatctaatagtgtct

SEQ ID NO: 5101 - DNA, 7722 bp, Emericella nidulans
tattgggaccatcttgggggcgaagcgctgagtcagaagagtgcaaagaccagatgaataatcgttctgggtttcaaatccaggttaaacctgatcgaaccaagaaactggatcagttttgatcctgatactaccacctatcaccaccattaccattaccaccgctacccgctacgactactgagcgtgtcccacacccgcggcccctctctggcgccggtctggtcgcagctgctcctatcgaatatcccgtccgatcacgactctctcctccacggttccctccattctggatctggacatcgttgatcagtctcagcatcattgcatgcgtggctggaacgccgtccacagccaatcccaacggtcactccgttcgcactaaaatgcttagacgctcggactcggggaccgttggcgccgaccattgtcggactctagacctcgatcggatttagcgtcgacggtgatctgtccgttgacctgtgaccaaggaattataaccgagtcaaaaaaagggcagggatcgattgttcctgaactcgggaatttatatcatgtgatgatgtcatcttccagcagtcatcttctgcattaaaccctgacccatcgttggattcgtggattcgtggattgcttatcgccccattgtttgctcaagcccatgtttgcttcaagcccacggtgccttcctgcatctccccgcagttcggcggactcagcatcggttgggactggccggcatattctttccctgaagggttggcagaacgcgactctgagggagcatcgctgcacggctgatgcacccagcgctcgatagaaggtggatatatcgaacatcagcggcggaaaataacgcttctcaccgccagagagggggtgtgggggtcgtggtgggcatggtggtgcgaggagcttgaactgcggcagccggtgatattttgatatctgaatgcgacccgttcatcgggcgttcattgtcggacggcttttatagcgccccgatcgtgggcagtccgagccagtcaggtcgatttaagggacgtcccagggcagccgactgcgcaggacaagcccacagtcctgcgccttcagcaacgcaccgttcttttgcttgagatagaaagactagcatatggcagaaaacgaaacgaaacaagaactaagattctctggtttaaccagacaaaacccttgaatcagacataccagagccgcggtggtgtaggaggtgttgggaggtgtagaggtcaaaacatcagtcaggtttgtaatatcagtgtttgaaaggaccaccgcctctacctctgccggtaccgcaccgggcctatgtatatttccaaggctctgctacaggctttcaagctctatattaccagcctaacaaggcccgcggctctaagcaaaactcgctatccaatccatatttcgatcagcgaaaccctagttctcgccaatcgtgcatgttggcgacgtcgcttgcgctgcccgtatgcgtcaaggacactatatcaaaaagggcgaggatagtgtagactcgatgaaacgtctcgctaagcttctcgtagctgcttagactgatcatcgtatgtgcctggttcagtctattgaattggttcaaaggtagaaggcgtacgttggcataccagtcctgcagaggctaggacgcgtaggtgccccttctagagatagccagaatagtaagcagttcttaagttacatggttgggcatgtaagattcgtaagattccttaacaccagcatccaattcaaacaccacgagctttggcacgaggctttcagcatcagcacgacgagcctgcaccgcagccttctgttatcacacttggtgcgctatgatatatcactaaaccattgatatgacgccatcagtaccctactctggacgcaggtcatggctcagtctacctcaacagttttgatagaaggacaccgattcgtgattgtatattagaagctcctggcctactcctggacttgcggacaaaacctctcctccaaccaaacaacctgcctccaccacctctcacatcgatccagcccttcagctccttccttgaattcctccccaagctcctgcctggcaaactcatcgacaacatccccaatcttattcacaaactcctcaaactcgtcactcgcccagttgggtatgaacttctccctcaatgcccctccatcctcctccgacctattcccggccccggcgctctttcgcagaaagtctgccgcatacctccaagccttgagatagcatacttccgtcgcccagagtacgacaagaccctccaaaagactatttcctggactcgccgcagacatgaacatgtcgatgtacccttgcgttatcggcgcggctgcaaacttccgttgggcctctggatctgactcctcccgcggcgtattcgtatttaggtcaagtccgtactccctcgcgacatcctcgaagaactgtaactcgcggtggatattattcagtgcggggggggggttctatagtacctcgggagttatactggagttgtttggtttggagggtgagtttggtagatgaattttcgcaagcagtagcccaataaagcgcacgtaggtttgcgcatatagacggacttgtgagagccaagctgcgagagtggtctttgaaagtgtaccgttgccggcgtaccggaggaaggggtgcgtcgttgcgctgtggagggtggccggggtggttgatgggaggtgggcggttagtttcattttcgagcttgcgggattgaagtggatagaaatggtggtgaatcgttgctgagtgatgagaaagggttgaatttgacattacgagctccaagtgatagattggcggagtgtggggtagcttgctttctagcacaagctgcccgcaaaaggaatcatatggtacatggcgctaactactgcaactctaagaagccgtgatgtcgtctactccgtaaaattctccccagaaatcaatggaacgcgggagcaactgaaatttcgatcttattgatgtctgctaaacaacctacctaagctccaaagataaacgacaagccaaccattaagaaccagacaagcaagcaaactgcgccgcccaaccccaagccccaaattaaatgcttcgtcccatcgttgcaagataatcgtagtcagacatgcaagaatcatgtgatccaagtggaaaaaggacaagaaaaagcaggactaaactgcacgcgatcggaccattacctagccaaacaaagcatgcactcaaacatcccccagacaagtgaaagctaagtggtcgcggtactggcgcgggctgcggcattgttgagctgtcggtgatacgatccgatcggttggaagcccctacaaaaaaaatcggttaagtcagtgtgcagtggacagcaggatacaacgcgctcaccttgcgaggtcgaaccctccattatcagcatcatcatcatcatccccgtcatcttcctccgcgggtggttggcgcccatccacgccgtttgtgcctggtccatcctctcgccgggctgagagcggccggcccaatcccgcaccattagctgtacctggcttacttgggctgacgaggtttggcggcggtggactactgcttgggatattgccaagcacatcaccgggatcccccttcaaaggactcatatcagcaattggacgggcaggcgtactcccgatgtcggcgaacttccagaactgcgcgggtgagctcattggcatgaacttggacggaatctgagcagtgcttggaggcgggagccggggctgatggcgttgtggtgcgggcgtgatcatagaagacggaccatcgtcgtaatacgacgacgatagcactggcggcgaccgggtagctgcatctgagagcccgtacgcccggctaaggccagttgcgttcttcgttgcggaccggtggggtaacggcgacggctcttcatagtcgcgcgggttcggcggccgaagcgaagggggctttattgcaccattccggccagcgcgcgatccgcgttcaggcgtgtacgcctccacaggcgccacgggaaacgagctgaaactaggcgaagagacagggggcgacttcttaccagcggagaagacagattccatcccgctggtggcggtacctcgcgtggggtccttcgtcgctggtgacgacggagccgacgattgggcgcccttgcgaagctgcttcttccagtattcctcacgatattccgcggcaatctgccacttcatacccttacccggctcgtccgtccgacggggaactttttggaacgctttgttcaacgaaagattatgccggatcgagttctgccagccactttgcgaatgtcggtagaatgcgtacttgtccatgatccagttgtatatgttgttgagcgtcagcttctcctcttcactcgaaaagatcgcctgtgcaatgagagtcgcataactgtacggcggcttcaaatccttggcggaatctttgctgtagtcgatttcctcggtgctctccatcatcattccgcgattatacaagggcgactgcttggcggttcgcgccccgactgtgtctggcgatcgcggcggcggtgtgacttgacgtttgaggaactgcggagcaggtgctagcgaaggagcgccggtcgagtgtggtacaacctcttgggtcttggggatcgttggcgtctgctgggggtgcgcatgatgggaagcatcccaagctggatcttcttcgccgttggccatccgttgtgcgcgctcgacgaagctggggtgaatttttgctttatccccgggagtgacaaacatcatcgacgtgttggcaatctcgataatgtcgccgcacgaaagaacagcatcggtgccgcgtttcagaatcgcctggttcaaacggacgccgttgcgaccgttgacgcggatgtgccacgatgcagtgttctcgccatcatagaaaatctccgcgtggaggcgcgacacgaacttgctggggcctagatcaacgtgaacttccggcagcgctcgtgcggcgattgtgacgggactcgactgttcatctagcttcggttcgcgatcaggctctcgtccgatgttgacatgaagcgacttcacgtagtacgtccagtttctgccggcgatcttggcgtatgcgcggatgctttgcttgttctcggtatttgcgttggaatggtctcgctggacgcggagaggttcacgggagactgggagatacgaaatgaccaaatccactagatcttggttctcagacaaatcacgatcgggagacgaaccatccgcctcgtccgcagactcggctttcacaggtcgaggaggctggggagacgctcggttatcgacctagccgtacgcgttggttagtttcaaagaagtttcgtctcaaaagtctggatttgtatatccttggttgcaaagatgacgcataaaagcgtttgttgtgttgtgaactgggttaatataactcagtttaaaacgcaccttgcgcttcttgttcgaaggtcgcgtgggcgatgaatccggcgcctctgcatctgaagtctcttgaagttggatttccttgcgccgcgcgcgacggcgattcgaaagaggcataaccgatagagctctgtggattgacgtccgtcagttgtcgtcagttgtcgtctgttgttatggttggacgtgttgtgttgcgtcggtctgcgttgacgtaggataaatttgtcgagggtgcgcgtttatccgacttagcggtgcacaggacagtgagattccaggactcgagaggaaataaaaagcggacgccagttaatggcgacaacaaatgatgacctaaagggaccgagatagacgaagaaccaaggaacaatatttcagaagggttcgccaccgcgcaaagcaaggcgacgcgcactggggtgcttaagaatgaagacgcccagccaccgcggggagttccggtagtagtggggtggactcttctactgggctgtgtcaactgtagattaagagaacaaaatgtaggaacaagatcagatagcagatctctggaccctggaggttaactagtgatgcaaaagaagcgatctagctgcagaagcatgtagaaacagaagaaaacgctcgacagacaggccgtggcagtgacgttgttctcgttctcgaccgtgaccgcttccactctttgacagaaactcgaagtaaattaaactcgactcgactgctttgtcttatcgccgttattatagtcctaaaacagcactaacagcaaatcctgcaaacttgcagcccattacgctagtgcagcgacaaatcgagaggaaacgttctgataccacgctaccgccagcttgatgatgtttttccggatgcagtcaaccacaacactcgtcttgcccagcccatccacggtctcaacctcctagacgcaaactgactcaatccatcccctatccacaaatctcatccgtgggacattgttgacctcctgtttgcgtcactcccgtttctgcgccaggcgggaccccaaggaagaccgttggaatgcttcaccctcgttttgttgggtgtgaagataccgtagcattgaaccggcagcgaaccattcatgctcaaaaaagacgaataataaattcaggtacgcggggtagctgatagatatttgcaaaaacaacagctggtttcaggtagtcctttttcccaaaaccgaacagagctactagagctcctacgactctttattataggttatgaacgagccgaacgagccgagagaacaggccgcgccagtggagaggatatgatgatagatacatgacaaatggaaaacacaaagaggtagacaaaataggtacaacacaactccagtgggatccttacaagccttataacgccaaccacgtatggaactcagtaagcgagatacacaagctatagacaatcatgaacgattccgacttcagctaggcattttggagtctccatcctcatccaggcctcgtaaagtgggatacatcacactgtcctcggcactttccccatcagtcttgataggaaccgtgcgcggtgaacggggaagagaatctctctctacgccctccatgtcaacatccgccttggacactggcgaccgagaaacacggtcctgtccctgctcctggtcctgttcctgctcctggtcctgttcctgctcctggtcctgttcctgctccgaatcgtcgctgaactcgccccgctcaagacggttggcaatgtagttacgtaggtactcaatcagccgaaccttctcaacccactccgactggacgtccgacctctacgccacctcggttgcggccttggcagtccgagttacatcatcctcgcccggagatcctgaatggagagccgggtcgatcaaactggcggagatctgcttgggagttcgctccccagactccttgtcgtcgctggacaggtccatcgactccgaggcagcacgggacgcgggccgagctcgctgcaatgttcctccagtgtacctacgacgctcgtcattgtcaaagatcccgccgagagtggaaggcggggcggcacttgacgcagcagtgtaaccagaagtcataccgtcagtcgccgaagggagacaagggtacatgctggagccgctttcatgaggcggagaaacgcgatcagcagacggaagtgaaatgagagagcgacgtg

SEQ ID NO: 5102 - DNA, 6702 bp, Emericella nidulans
cgccccctgccacttgagttgcactaccccggcacactcgcccggagtgtagagaatgtcatgcatatgataaaatggtgtcacctgcaattgtcatgacaggttatgtcagactgtaggcataactaccactttaacagacgggaacaacgctttaatgatttgagctattctgtatctgttggctaggagattgattgggacgaacttgacagtatgactcaaaccattggtacaatccgtagcgcaactgagaagtgcttaataaaattttcttataacagaaaacccgcaacggtgctttgctccggacacatagagagtcgcctttcaattctcatccaaattacaaggacagacaaacgctagaagtttgttacaataagtaagtgactcataggactgccgtccttccttttttaaccaatttttttcttgagtactcagaacgacccctcttcagaatcacattccgcgcctttgatagtagaaatcatggctgcgtctgcaagggacatcaaaactggcaaagatacgttgagccttaatgtttcgcagagccagagtttctcgacttcaccgaacgcttcttttcagtccgctccgtctagccatagtggctcggctttcgcaacccgcttgggcccaatcatcaatgcgaagcacctgaagccgtttgctacagaggatatcaaagttttgctcctggaaaacgtaaaccagactggccgggatatcctcagcaaacaaggatatcaagtggaattcctcaagtcgtcgcttcccgaggatgaacttatagagaagatccggtgagtgcatcatgagtaacatctgatttccccactgattaccatttttatatctcaacagagacgtccatgtgattggaatccgttcaaagaccaagttgacggagcgcgttctaaaggaggcccgtaatctcatagttatcggttgcttttgtattggaacaaaccaggtcgacctgcaatatgcggcggagcatggtattgcagtattcaattcccctttcagcaattctcgaagtgtggctgagttggtcatttgtgaaatcatcgctcttgctcgccaacttggggatcgttccaatgaaatgcacaatggtacttggaacaaggtgagcaacaagtgctgggagattcgagggaaaacactaggtatacgaaatatatgacaagaccccaactcctgctcatgatcagactgactcttttcttaaaggcatcatcgggtatggtcacatcggttctcagctttcggttctagcagaggctatgggaatgtccgtcattttttacgacgtggtaaatctcatggagctaggcacggcgcgccaagtttcgaccctagatgacctcctgtctgaggctgatttcattacgtgccatgtgcccgagcttcctgaaacgaagaacatgctggggccaaggcagttcgagcttatgaaagatggtagttatttaatcaatgccagcagggggactgtcgtcgatatacctgccctgatacacgcgatgcgatccggcaagattgcgggtgctgctcttgatgtttatccaaatgaacccgccggaaatggagattacttcaacaacgagctaaactcttggggaactgatctccgttccctgaagaacctcatcctgactccacacattggtggtagtactgaggaggcacagcgtgcaattggcgttgaggtcgcggaagctttggttagatatgtcaacgaaggttccaccttaggcgctgtcaatcttccagaggtcacccttcgttctctcacaatggatgaaccggatcatgctcgggtacgtaatttctgctacttggatatcatgtgttgacggttttcaggttatatacatccatcacaacgtccccggtgttttgcggaaaggtaagtaaatcggaacagaatagtgcttgatttcggctaaccttcccagtcaatgagatccttggcgatcataacgttgataagcaaatgacggacagtagaggagatgtcagacacttcattacgctgccattagtatgccgatgagttactgaccatgcataggttgcctacttgatggctgatatcagcaacgtcgataacgcgacgatcaaggacttatacgagagactcgaaagtctttcatgtattgaaaccccttcacctatttagcatgctcaaagctaacttctgacttttcagctcggattatgacgaggattctgtattaattgagctcaacttggtcaaaagcatttttgcgtttaatcattccacatagattagagcacatacgctgtgtgaatttggcacattgatcaggtcaggcgggcaactgttcttgtttggcactggtagcaaagtccttcaacggcatccttctaccgaaagttgtttggaacgatataaactgtcgaaaatagtggacgtttagtcgtcaatatgctaggaaaaaatgtctcgatctttttctgacacattgctgatttcgaagcagaagaagcgttaatagtttctcggtgtaaaggaaatgacaagggcatgttgaattccattgtcgcagagcatgagtggaattgtagtcgattgaacatagctaagttttatggtagacggtagcttcaccggcgatacggacccctgtctacccgctctctatagttggggctgcgacttcgtcttctcgacggaatttccctcgaataatcgagcttgctcgtttggtgagatttgtcataataagagccacgcctgtcagaaatagcagtcccctgatccctatcgcggttccggtcgcttccgccgtaattgggaacgtaggaatcaacactcccttccgggccgccgtagcgagccccgtatccccgatctcgtcctgttttgtcggaatggcctgacgcccaggagtgttgaatgggggcgggaggtttaggcggcagcccgccatctctatgccgagacgagaaactgtgattaggatctttcaattcttcattaccccttcgctgccaagcttgctggggttcgttggaccaagcatcgcgaagttgattcccctggctccgggcagcgctagaaatgcgagggtttcttgtctcagcgcctgttctgctccctgaattagttgaccatcccccatttcgactcatacccaccgagcctccagcaggtgccgggggcatagcagcccgctgtccacggaatcttcgtctatcaagttcatgagagtcctcaaaactcggaaggtcgcctggacgtgctgggagtggcggtgtcgagaaataaggatgtttcagcgcatcaatcgcattcactctttttcgccagtctagcttcaagagctctgtaagcaaagatatggccataggaccttgactataatatgtcagagatttaattacgaatcctatggagacagctgatcggaggtggcttactctttgaatacttctgcgagattccctggtctgttgccgaaatgcttgacgccttcgcaacctggaagagagctccatcctggcatattctcttccgtaggcgtacccacaaggctgaatataagttgtgcctgattaaggtcactgttaccagcaagaatcggctttcctttgaacatttcaccgaaaacgcaactgtaagtgttagaaagaggacaaataggattggagtgcgatttacccaacaccccacatatctatcgcagaagtataacgtcgaagctgaagaagcagttctggaggacgataccatcgagtcacgactaatgtggtatagtctcttttggcctcgcccgcccctttgcctggctgagggggcgcttcatcgaaaggacgtgccagtccgaagtcggcaatctgcagaataccttggttgcttataagtagattggcagctgcgctgggtcagccaagaacgtccttcaatatacaggcggactagcctttcatgtcgcggtgtaggatacaattctgtactaggtcagaaaaaagaatccccatatgttgcctgaacacagcaataccccgtgtaaatattttaatccctcgagaagttgaatcatataacacttgatttgagcctctgagaaatgaacttccggattttctagaagtcctgataggtcgtgttccatgtaagggaaaaccatatacatgctgggcttcttgcgaccctctccttttctcgagtcagattttttcatcatgaggtataataagcgatgtacctttacttcgctccacggccatttctctgagctgcatgatgttggtgtgggacaacattttcagtagcttgatctcccgaagggctgtgattgggaactttgacgatcagatagctgcctacttcttttaaagggaatcgatgaagctcacgccatctcgttcattatgcatgaggatctttttcagcgcgacgatggagccatctcttttagccctcgctttatagacttctctggtgaggagtaccatgtcaacaatattcagagaagggatcgaaggcactcacccaaaggtgccctcacccagtttgcctaagaactcgaattcgcggatactggtacatccagtaaaccttgtgccgcctttagtgtcccgttcgagtgacgctatgcccatttttcaccatttgatactgcgctttcgctatgactggtgctggaaggtgttcttaatagaatgcaggtacaggtacggcgggaagacccagagaagtttcccaccagctagcaacggtgggccctgttttgccctctgggcgacactgagtgtaaaccaatacgacagcctagaaacgaaagatagtgttatgaaggcggaagagccagaccaaatctgaaaggctagtttatcatataagctttaaaattattccttaattgaaaatatgacgcgagttccttcacgcgtggttcattgtcaggtcgaacagtggggcataatggattatcacgtgattatagaggaccgatgcggcccttattccgccgaatgaacgccttgtttcgacctcattgaaaacgctttggatctcagtcattgaccctcgcatattgaacaggtgagaaataaatctactatatttgagctggctactttagcttacaaaattgacttgtagatatggcggcgaatcacccaatccatatccatcctgctcgacctttttaccgcttcgcggcgactgccctgggcgcgagcatgtggtttttcgtaagttgcagtgttattattaaacgccaccatcaatgccaatgctgatgtgtctctatcgtgtatagctgatgtatcgggctaagaaggacgggcctgctttgcttggttggaagcacccgtgggatcattgagcgcttggtaccaacattgattgcaccgccgattatcacaataccacagacgttaggtaatagaatggacatgtatcaatagcttgtcttatcttctatgtgaaaacagcgggtataatacagcggaaccagggtctatctactcatatcctcaagcagcgttttatattgacggcgctgtttttgatggcctggccgcataagtacctgtaagcgtccgataatacgagcaagttgagggaatagcttccgttctgctagccatgcgaacaagaaactcccaagaacgagaccaagtagccaggtagcaaaggcgtcagacaaataggtcaattgcatgacctgctttatccatgtcgatggcctgaagagcatgtagcctgaaaacgtcaagtcggcgactatgacggtaagaaaaggcactgtcaaatgttagtagattatagggtagcagtataagtagattaccgtttgttctcattgacttccggaacggccgtcccacgctcaaaacgatactggctagtatatactggaagctggatgtcaagaaaagaacagtgttttcggagttctcaatgttatcttctccaagctctatattgggagccctgaacctgcaaactgtcagatttaaatacatcattgtgtggagtgtgcagttaccaaggttgcgactggaccgacttatatgcaagaaattgaacgaacacaactatcacgatctgaccgagtaacggagttaagacctttcgagagacaagatctgcagttggtcgttccgcgagagaatatcacaggggccggtccatcccacttggagaacaattattagtaccttgtctcatgagtagtatgaggtataactcactaaaaatagcgatcggcagtataagcgtaaggtcaatgaacagaaactgtaggaaaaatcagcgacgctcgtaatacattgagaatgaacgcacctggaagtctcccaggttagaagcattggtgtacagaaagctgactgttgcaaactgaattgccgaatacaagctcatatacttgaaacagcagaaactggtgaccaacgagccccgaccctctctatactagaattagctggccatccaaaatttgctggtcatacgaacctaatcagtgtcggtacgcaggagacatcgaactgacggctggtgaagggtgcagcaacagaggcctcggcttcggacaaggatatgcccacatcggcagctttcagtgctccgcaatcattagcaccatcaccgcagaagccacagcagtaatcgagtgattgtagcttttcaacaagttcatgcttctc

SEQ ID NO: 5103 - DNA, 8682 bp, Emericella nidulans
  unsure (1)..(8682): unsure at all n locations
cgagggatctgtccgttcaggatcatcaggacgaccttgcacagggcaataattccggatacaccctcagtgtgcccgaccaggccttttacagagcctaaagctaaattccctaccctccttggaccacctagcacgtcccgcacgctctcatactcggctggatccccagcttgagtgcctgttccatgagcttcgacgatactgatgtcccttgagtgaagatgcgcacgctgcgttaccttcttaaacagaccagccaacgaagcagtgtccggcacaacaataggtgtacagttgtcattctgttccacagctgtacttgcaatagttgccaggacctgatctccatctgcaattgcgtgtgataactttttgatatagatcgctgcgaagccttcaccgcgacaataaccgtcagccttcgcgtcaaatggcttacacggacctgtaggcgaaagaaatgatgcccctgcgagattatcatatgcgagaggactggtgatggcattggcgccgcccaccagggcggccgtgcaatcgccgctcagtattgcccgacatgcatgatgcaatgctacagcagagccagaacacgctgtatccacacatagtgaggggccccgccacccaaagtgatgtgagagttttccggctaggaagcttctcaacagccctgtcgctgcataggcggaagctggatggcaattcacgttgtgttcgtagtccactgtacaggttgcaataaagcatcctatatcttttcctggggatggttgggaaaagtagcctgctgactccagcgcttgataggcgacttgaagcatgagccgttgctggggatcctgtgacatcgcttcccgcggtgatttcctgaagaacttgtggtcaaaggcatcaatatcgcggacaaaattaccgagccataagcgatgactcgcctcagggcgccaaggagtctcgtagtttgcgtatctttctcgtggcatctcgcggtgctgtgactggccagaacacaaaagatcccagaattcgtcaaggtcatcagcgcccgcaacacggcaggccataccgactatggctatgtcggtttctgccgggggcctcgtggctagctcatggtcgcggcttatggtggccggaagctctacatcagcgaagtggacgatgcgttgtggaagacggcgaaacagtgtcgggggcacgcatcgttccggcccgaactcgacgactatagagctgggtgtggtgagatgtactcggtatacggcagagaaagtcatgtgccacagacactgtgagcaaggacagcgcgnaggaccagctcgtggaggcagcccgaacgaaccggttctgcagtgctgtttgcacgcggagggtggagcagctctgatgcgtcaggtagttgaagaccggaatgagtattgcagagatgaatcaatggggtcaggctcttttcgtggcctggccagtgatatcggccattgtattcaaccgcgttggctgaaaatccagcagactggagagtttgttgcagggcagcaacacttcgccgaggagccatgattgttgctctgttctcgtcatattgaacggtaatatatgactgttccgtcagtgctcgttcagccggcaactatgaaggccatacatacccccggatatttttcgagcaagccttccacctcgtcctctaattcaggacgcttccacccaattgctagagacgtatactcttccccagcttgctgtaaatctcccattgcccctaataacatagctaaacgcattgcaacagagccgtacatcttcaggctgcccatcctcgtcgcagagactgcaatactgctcaggagtccaatacaaaatccgacaatttcaaccacggggttccttccatttggctgcatcttcagccactgtgaatactgcacaaaatgggtcatcatgagcaacggtgcgagctgtgtatagcacagtggaaatttggctgtggatagatcatcgcatcggaaccatctttccaactcccgaaggtcctctttttccctgatcgcccgcaaggatgggacacaactagttccggcagcagcgcggtaatagcctggcaattcgcttagaacatcgagcatccagtgaagctcaggattatcgaggacagcttttcggagctggcggaagtcggatgcagtgaacgtgagccattggcagccaaatagaaggacaacgttacgctcttgctccacagtgtctttggcattcactgccatggcagcagtcgcactggcattctgcctggctggaatggcaggagggtcttggctggctgccggcgtaaccatatctgactggccacgaactgaaccgtaactggcttggatctcatgtcgaaaacttgtcggctactctatactcatatattctcagcagcttcatgcttatttgtttgcttacagatcaacaacgcttgcaagtaagcactgcactgcgcgtcctacaactggagatggggatgaagcggtggaactccaaccatgtctttataggactatgaatggcaaggatcatccctaacggcggacatacatggcaatcctggagtcctggtttgtttttcggtaggtccacctctcaccgagactttgctgtacatccggagtttctcttagcgttacgcggtatatcaccgttgtcgccctgtctggaactatgttccacggcagctattgttggcgttgtcaacgtcttaaacggagccagacacgacaggcagctttagaatagctccttgaaacgggcccgcaatattctccggactcctgtttgccgccttctgccctgcgctggagtaattgttcggagtattctttcaagaattggctaactccggcttgaccagctggtaagaataggagccagaagccgagaaaaatgctaacacatatatagacatgactacaggcagtatttttgttgtagtttcagaaaaatgattgattgtatttcaaaaactccatttctcttcgccaaacaccctcccagatcgcttcttgaaaacgccatacaaatccatgcaacgtcgttacgtgacattaaaggcaatgaaaccacggtaagccattatacaggagcagctgctggcatcgaggcccgtggactatgggttgcgtttttaacccggtcgagatcctgaagacaggtcagtacctcttgcagcataccatcgaaccctgcatcgagatagctgtgtcccgcgaagaattccgtacacatcatcaatggaatcggtgttaatggatgaacctgagccgttagtcgcctgctgtactgatggaggagggctaaggcaccttgaagtatccaagctggccttgcaacttgaccaggttcaccacctcttgtgcggccatcacgcacagtcgctcatactcgattattcctaggagatgatcgccggtcttccaagtgatcgactcaagcacgctatgcagaaaaagaaccatggtctgggcgacgatacgagcgaacatcaacatgggatcgacctgggcgcatgccgagagcattcggatgcgggaattaagcatctcgtgcagccactgatgtcgcgaccagaaaccttcaaaggtcgcaacgtcgccggtgatgctcagctgctctaccgccaccttttgtctatgtgcgagagcccgcccgcatattgtcgcgagaatgatacactcgctgaaagacgagatgggctggatggggtcattgctcgtccttgtcattgcttcagggagatactgggttacaacggggtttccagcttggaaatcttcttccgggccagggagacgggttgcgatctacatggtcagttgtgccgtcacctatctggacttggggcgacatactaattgttcgttcagtgtgaagggcaggccgttgtgaaaactgatgaatcgatcgagcgaataggccatccaaaaggtccgtcgtcgttcctcaagtcccgtccagtcaatcagcgatgtctcctggtcttttgccatcatcaccgggctgttcggatcatccaactcgtacaatcgcatacccaacacaagacgacagcatctgcccgcactcatccacgcttgcagctgtgatagctgcatgtattcgtagatgcagaccaagacccaagcctgcgcgtgctcaatgcctccgcttgcgtctgggcgtgagtatgagttttgggagtccagcatgtcaagcatccgtcttgtttcttggtagagggggtcgcggagggagcgaaattgcgccgaaagcgaggccgcgacggtccacatcgcgtgctgcagacaagcctggccatcgctcttctgttgctgctgggaccaaacgtggtatcgccatcgctgcaatataggggcaaacgggtggacgcgatcgaagtatagttgatcactgttgctcagcgtcgtcgggaacttcttgacaggccaggacttacaggtcagctcgcatgagctcggtgacgagttccgatcgcggaaaatcgtgtaactgggatttcgtgccttctcgtctgtctctgggtgattctgtgccgtccctcgacaggttttgaccgcgactggaatcctccgagtcgtattcgacccccgcaccctctagcagggagtgcatttgccgatctatttcgggatgccggtcggccagacagcgctcgagggcggctactcgctcagctagagtcttggaggatttcacgttcagcaacctaccgatgcgagttcgcagtgtccgtagctggcccttccgcggccctcgaggaagtctcgttgtgctgatcttgcagtcgagcccgccttcgtagcagacctggcactgtggtcgttggcggtcacagcggaccttccgtcgacgacactcctcgcaggcggaacccggtcgctggcgagaggtgacggtgacgggcggggtctcggtcttcatttcggggttgaacatctgggccgtcttttctgcaagacgcagcgaggagtcaaggacttggtcccttgcacgaaacttatagaggaccctggagggtgtgggtgcaacctcgtgagtcgtgcgcattaaaatcgcgatattggcaatgggtagaggcccgatcggatggagaactctgcaataatgcttcgtttctttttccgaccggtccttcagggatccagggcaacaaagcagaaacgcgagctatcgtgctaagctctgggaggacatgttttcctcgcaaaaagcagccaatccgataaatgggaatcatcgctagcattaagcagaaatgcataagatggaacaaatggggactgagcagggcaccgacaggctggctgttgatcaacgtgtactggagccgatcggacaggccgcgctgtgatagtggtcactgggctgcaggctgcagactgtcgcggcaacacaaggcgactgtgcctcgaaagggtccccgctgagttcaaaatggaagcctcagcggtagtggaaggtcaccaatggctgcaatgggtgcggaacaactgaaatgctgcaaatgcgatgctgtgacgctgtgacgccgcgacccggttcatatcggcgagcggagccattgagatctcaaccggaccattcggattgcaggaaacctctccattgactaggaatagtcaggagaggaagatgccctttggctacaacaataggagcacactgacaactgcgccccgatctgattgatcaattggagtcagctcgtttccttcgcagagcttagagggcgcggtggccggtgagccctcagccagccacttggtggatcttctcggattccaagccatcgtactcggggtcgcccgctgcgggcctgacaatcgtcttgttctgcagaaaatatgagggaacattaaccgacggtgtctattgaatgtgcaagtttgactggcaaaataatcaaggatctcagtctgggcatcccgacaatgatgtccacgatcgcctccgctgtatacttcgagtcaatccttgccgttctacaagcgtcacaccttgttgccttctagcaagagccggacgtctcgggtgaagattgacgacaagtcggacatgacctcatgatcgacagtctaagctctgcgccattctagcctggctcccttgtgcgcagccctgagttcagaggtcaaccaggtcgtgtgtcgactaccatgcattgttgatcggagctcggactcctcgaggtcgtgagatggatgaggattgtcacggaatattgttctcattgctagagggctaagtgctgacggccagattacttgcatacttgcagctctcaggccccgtcgctcagttcgctcacttgcctgagctgccctaggacaagacatgacactagttcaccgatctgaagagccttcggatttcttttcctttttccttttcagcttgaatccttggctgtgttggtaagcctacagcgggatactagtggctatagtcatcggtactaattacggcagactattaacacgccaccctaaaatcggtgtagatcggttacttaaagccattacatgtacacaaccccgtctagataagtgacactcgtgggcgtttcacattcccgtgccgaggctcgtgtatcccgtagttttcgtgcagagcgaacggtaagttatataccatagatctcaagcatattcacggtatagtaaccatgtccttccaagacctcctaggccagctccctttgctgaagagctatacccatatcctcctcgtctttcccctggtaaactcccagcgccagccagtccttgaggctctccaatgctctatcagacgcctactggccacgttcccctttctgtctggggctgtggtccaccaggttccccatcccggtcactcgggtacattcagtgttgttctccctgaaggtgattcttcagacagagtccaacaaatactacacgtcaaagacctctcttctatcctaccagactatgcaaccctcaacgccgctaaggcacccccggccatgcttccaggtcccctggtggcaccatcccgccctgcgtttccacgggtctatgaagagtcttctgcaccggtgttggagatccaggcctctctgatcaacgacgggcttcttcttacgcttgccgcacagcacaatatcgtagatgctacggggatcttctatattgcccatctgctgtcgaggtttatgtatgatccaacggccagcataccagacgctgaagttgcaatgggcaatatcgacaggagaaatcttatccctcttcttccagagaatcagggtctcccggaagagatgggtatctttacgatggatcggccgcccccgttaacccgggagatcctggacgagtataaatggaccctggtgcatttctccccagccgcggtacgagagatgcatgacgaagcgatgagccaaccaaacgatttcattgacggcgtcagcagcgtctcggttaatgacgccctgacagcgttctgctggcggagactctctataatccgcgcagagcacagccatacaagaggagaaggagcaacgactcaactgacccgtgccgcagatctccgcagagccatgggcctaaatccagggtatgcatacatgggccacatggtccgcacctcgaacctgcgtctcccgctgtcgacgctcgtttgcccacgcacatccctctcgcacatttcctctctcctccgcaaatgtctgagagagcacacagagccgcaggcaatctctgcctacgcgactcttctctttcggacagaagataaatctaggatcctctatgcggcagagttcaatccccttacggacctaagtgtcagctccgttgcgcatgtggatgtgcccagctttgggacggttctgggtaaaccaagatttgtaaggaggccgacattcggaccgttgcctgggggtatgtaccttggccctagtatggggtcagagggagaagaagctagtggtgatggagggctggatgcggtcatctgcctgaggggatgggaggtggaagggttagctaaggatccggagtggaagaagaaggtggttgtctgggagtagtaatccttttgatgagtttatggatagtgatggcatatgagaaatatcttggttcggtactggcttagggctgcattctttgggcaatggacccatagatattcaaactgagcagcgtctacctcttacacaataattcaataccatctacatactcgcaagacctgcggctcttatacgttgatcagcgcttaagagaatgtcttggcctgtgtttctagtttgcatagtactatgatagagtctcccccatctcaacccgtgtcggcaatagattgacccctcgcaatggtcttagccctaactccaacgattccactttaaaaagtccactcattacctctctttgactccctgctccgtcctcagcgcacgattgagatcatacttcttcacccacagactcagaatcaggcccacccctgcaatacccgccatgaatgcccagatgatccgtagactatccgtgtacgccatctgaagatcattcttccggctcgcttcttcttcactatgcataccctgaatgaccgttacaagcgctgccgcggtcgcgactgagttctctgcggtgg

SEQ ID NO: 5104 - DNA, 2348 bp, Emericella nidulans
cctgcattgcaagtatccattccacttattaatttcccagagcgagaaatttactcctcatcctctcagcctcctcggaagcaacgttgaagaagcggagctcgtagacacccttgaggtggagacaacgcgaagccagtcacggagctgctgcttcttgaggtacttcttggtcctgaatacaaacgcgcccgttagtcttatacaagacgtgcagaatcattcagcagttagaacttacaggtacttaaggtagcgaccggagaaggggatgtgagcgacaacctcgaccttgccatcgccaacctgggagataacgaccttgtcgccgaggtttccaacgcggccctcaaccttgatgcggtcgtgcaggaacttctcaaaggccgagacatcgaagatcttgtcgttggcgggctgagaagcgttgatgatgaacttctgcgtgaccttctgggccttgcgaccacgggcgacctactcattcgaaaagagacgcgattagcctactgttcagtttgtcgatccctgtgtgaagccctctctctttcctcattgtctgtctcaccgcggcatttcggcgcgtggtaagatacggcagaacggcgagaaacgagagagtaccatacagcacagggggaacagcaaagcagttcaagaatggagacatacagcgggagccattgtgactgatgaagggtataagagatgaagagtgaaaagtcgttggtcgcaaagaggtgagtatcctgcgccttttgtgggtgtgaggagaaaagttcgatcgaaagcagagcgaatgatgcttcgttcggtcgggagccgtgtgggttttccgatttgggaagtgagttagggcaagccagttagggcactactttttgatgcttcaacggatcgagtcttaaacagccaatgaacgcttacaaggtccacactagtccctcgctacgcacggaccatctaaggtaacgtatataagcatcatcctgccgacaccctttaatcttttttccttttcttttccagctctctttgccttttggcttagatcaagtgtagtatctgttcttttcagtttaatctctgaaagtgttctaaggaacacaacattgattaatcttatttttggtctgagcggcaggacctctgtgcttgcgcatgtcctgctgcacagtgtcatcgggcttacactacccccgatcgacgcgaacgcaactccttttcatcaactgggtcggcttgccggcttcttggagaagaggttctgtgttcgaaacctttttcgtcgggttgtccttcactccataggtctggatagtaatacatccgtctctcgtttgccatactgtttatggatcctgacgttttcgtggcgttgccctggttactgtaaatagaccggctcgtctagtggtcttgcatcctttgccttttgagtatatgtatattggtcttttgcttgttcgcctccatatctaaagacgtatcgtcgaatctgtaccatcgcaaacaactctccaagcgtcgccgttcgctagatctggctaaaaccagacttgacgatgtcaggcttctcagaaattcgcactagagtgcatcgcctcacaaaagcgacatccagggcagtgttacaaacttttatgagcaaaggctaatccctctacatcaatcagagaaatccatgataagtattcgccgcatgtcgatcatgatccaagactcagcacctttctcaccatagcagtgagatgcggctcccacagctgccagaagaacccgcccaaagacaggaatggagggcggctcgaactacaccacccgctcgactcttagggctgagacgagcactcgctggattaatgctgcaaatactctattcaccaaaaacagctcggttctcagggacgcaggcactaagattctctattatagtgcaggacgatgccgttagccataaactcgcattcctcacttgacatcgtgaagccgaatctcagagtttgctacgcttgccatggctaaacttgtttcttctcttgagaggtcaagcagttactatttgcggaagatttccaaaccagccggcaatagcgtttccatagcgaagtgcagttgcctatgattaacctacatcagtcttgagctagaaagaactggtcttcctcctgcttatccggataggtatagggggcgttgtctactacttgcgtattgcgagtacacctagtgatcaatatcttaggcgcagtagaagaacgctacgcaaacgtcatcagatcccatcaacgcttggaatactggagagagaccttgacgaacttcgatggtcttaaaattgcacgcgt

SEQ ID NO: 5105 - DNA, 5719 bp, Emericella nidulans
aagaagccactcgacagagttattggctgccagagagcaaatactgacaaaatgctctccgcattgtcgtcggccctctccatacccatcaatgagtcccataagggtagactgcagaaacatcccacccagttcctgctcatttgattgcatgtgacgctttagagccatccgtgccttctcatttgatgcgagcatcaagtcaagtttggactcccaatcctgctctatctctatgacaatatcggcagccaccaaagacttccagaaaaggatattgcgaaggaaggttaatgccggcgcaaacgaacccctgtaacggccagaaaacatcccaaactcatggttgcccggtaccacagtgaaaaggagaaagtttgtaacctcagcaaaactcggaaaatcgaagtaggaggttgaatcagcagaggaatcagatgggatctgggtcagtctagtttcctgctttgaattcaaaagccggaaccaatatggatgcaatccctttctcccctcctctgcgatctcctggcgtatgtccgtgccacctgcaatggccataagatcgatccagcgcgcaacgacattgtagaatggcaaaaacctgttggcaaaccgcactgcagcatactgtgggccacgcacgatcctgcaccctgtttcctcatcctcggtccctggatatgtcctcatctgagacagtagataatggcttaattccttctgggagtcagtgtccttaacatctattgacgaattaagaatgctgcccaaggcctgttcaatgctgacgaaaatttgagggccggagtcgtcacagctaaacgacgtgaacaaccatttaatcagcccgaaatacgagaccgtttcatgcccatcactgaacttgagatccgctttggggacaatgataccgatgctttcgtacgcaagcgcacggaggctcagatctgtgctggggagccgctgcccgctaacccccggactaggccatccctgggaacggatgaagtctatcaacccggcaataactttcggggcaatcttcctgaggtcgttttttgatcccatgcggacgacccacgtagtgaagttgaatatctgagtccgcagtttggaagcctgtaaaccctgagaagatcttgccgaatctgataaaagaccatcttcaatcaaacgaacgactttgtcagtgtccgtcgttgccgtaaccgactttccaaggaagataagaagctttgtttgcagggcaggacgcgccgggcgagccccgtctggtgttccagcaccaaagtatagtcgatagagctgctgcacaacgtctgggctctcaagatctggtatgaacctctttagaagttcttcagcgagatccgacaagcgagaattactatctgcggacgcaattatcgccgacatcatccgctccgagtcattaaaggctccgctagagacgaacctcaatactcgcactttcgtttccgtcaaattcaacccgccctcccgagcaggatcccaggtctcagttatgggcgcatctttgtttagaaacttgtactctgctggagataaacctggacatgcgagggcgttcttttccgctggcacaagaagcaacagtctcgcaaaccagtaagagaggaacttggtgtcctgatccgagagacccaaccgagccttcaacttcacatcatcgtcactgtccttcggtggaagcttcagcaacggcaacagccgcagcaccaggttgaatacaacagccccctggttcgcagatgtcccaatctcggagatgccttgcaataacggcaccagaacctcgactctggcatccgagcccagacgatcaataccttgctgcagatagatcaagtcaaagtgcctgataagttgcgccttctgctccttgaactgtttcaacagtgctgcaacggggagtttgattgcgggggccttgactcttgtgttaatgtgctgacaaacggaaatcaccttgctgcggaccgcatggctgtctgagccgagcttcagtagcagaggagccaggtatgtgccgagaagggattccagcttttcgtctgtatctgctaacgcgattctgagctctaccttggagattaagctaagctctctggcctccgcactgttggtcgcggccatgttggttgtattatggcagaagaagcagaattatctcaaccacttaacaacgcaaaaaccatttcaacaagactaaaaaatagctgcgaaaagaagaaaagggtcagattataagcaaagtcgctccaagccaccgtgcaggtagaaacgctcaacgtcagctgtagtggacctgagccgatacttgataggtacggggtacaatcttatggaaccacgcgattagtcaggacaggcacaacagctgctgcctaacgattaaggccaaaattgtgtttacgccttcaatgataacattactgtctatcctaataaatgactttcgtggtaggtgggtatcgacaacatataaaccgtaacaaggtgctaggtcagatctctgtcgcaagagatggcagtatatattccgtcggtctagcctactgtttctattcaccacccttcgaagatgttcttcgctgctcggctgcctcagctctcaagaatctggcgacatcactgttggcgcttgacgagtcgttcatatgttgttgtcgtcttgggttaccgaacaggcactgccacaaatcgtccttcttgacccgttcgccaccatatgcgccgccctccatcagcttggccagctggcgcattctgtacctggctagggttaggaggatgaataggtagttggagcgaacacgcctcaaccgattgatccgctaaaaaacgccctcgctgtggctctcattgaccatgccttagcgatcaagcacgccctcgcactgtactcgcgtccagcgcatcaagccactcaggctgagttaacacgccgtttcgaagaagttttcgcacccgaactttcttcccttcgtcctacagagagcatgcccccgttgctgtaccaaagcaagtccccgatctcatcggaaagccgtcgggtgactgcgcttccgcggtctattagtccagaacaggagctgattcgcagttcccgcaaaaatagccaggctcatcgccggcaagcctcacgcaagcaatctgtcagccatcgaataagcataatgaacccattcaaacgctctaatcatggagcaagcgattcaattgccactatccagcgacagccaatggcaacagagctaatgaccctgtgaccggttcgtccggcaaggaggaagctgacctcgatgacgctgctaccattcacagtcggacaacgaatcaatcccgcgacacgaacaataaacggcggacttctttggagacgttctgcagaaacacacatcctccctctcaataagcaccagtgtcaacgaggacgacaccaacaagtcacagaaacggcaacgatctaaaagtgcgtcacgaagtgccgccgacaactctgcggagaacgttagccgcagcacatctcggcacaatggcaccatggggaatccatcaacaccatcagtcactagccccgcgtcagttaccagtcccaagggtggttggtcaacgataccttcagtcaccgagcatccgcgaccagtaactcggagcagtctgaattccgttcggagtcctgaaatccggagccctggcgcccataccaatagctcctcaaacacgggaggaggcgtacgagattccgtcatgaagcgcttcagcttgctcaagggagtcggacgaaaagccagccgccttgatttcaagaacgaacaaaccgtctacgaggagtgatcccatctacttcaattgtaatgtctggacattatccttcctttcccgattctcttttctttgtttctttaacactttttttttcgcttttttttctgcatcagttgatcatgtttcgcataagcctttaatctgttttgagtttttggctaaagccatcttaactcccatttccccctctttcactttatcatattttcacttgaccttacttgattttacttttaactttggatatgaacccacgtggcggcaatatcacatctacgaaaatcctgatacctctttctctcagttcttcttgaacctctccacggagtatttgttgatacctgtatatctttcttggtcgtttttcttttgtggtttgggcttgtactatatccatctcgagcttttctatcgcaacctaggctacaataagccttttcggctcaaaagtgcgctctttagtcaaaaaataactattacaacagcagaatagaatgtttaaaatagaagataaataaaaagtgggtctgtaattttgttggaattggtcgttcaagggctacttatatattctcacacacttcatcagatttcccccatttgtctactcaccaacatccagatccaaatccactacccatggcgcatttagccccttatactccaccgtaacaacactcgcattcacaaacacggtctcctctccccgttgtagcggcttttcagagccggacgtgagatctatataagcactccgattatccatcacatcctcacggtcccatgatatatcttgaatcctcctcactccagctggggtcccggacccagtcgcagtatctgagtctgacccagaacgctcccactctaatcgtcgcgctccatacccctcgtgaatatgcccaaagacgtgcagcgccggccgcgccctcctcacagcacgatagaggtgctcacatcccacattctcgccgctcccgactacttggtctagaatcccctttggtggcccgtgagttaaaaggatatcgacgcctgggtaattagggaccggcaacttaggctttgaaccttccgcgccacaaggggcgggttataccggtcctcacttcgtgggtatgcgaacgcccagtcgcaaaactcgggcgtatagggactcgcgtaaatggtgaactttgcgcctgtggagggcacagtgaatgtcctgacctcttcttccatgtaccggataccggcatttatggcggtggagtctgtgtatagggcttttatggctgagggggagttcagggatgatctaggaccctgtgatccttcagttgtagttcccaattcagggactctgggtagcgcagccagatgatccctcccctttgcatctctatacctatgccgcaaccaccccacacgattatagtattcctcgtcaagagtgatatcgtggttcccggcaatcacgatcttcagttcggctggatgggacttaagtatctcgagtatggccttgtgttcggaggcaaggccgactttcgtgatgtcaccggcatgcaggaggacttgggccgaggggagcgggtgccggtagggtgttgatgggaagcccgaagaagagctggagagtgcgggggagggggttgttgtgtgagtatcggaaaggaggaggaggcgggtctttgccttttggggcatttcggagatttgttgttcgtcaaggcttagaattatacgagagtgtgtttttgagataatcggcggtacggaaggcgaggggaagttggagtgccgagcggggagtatatttgcatcgacggactacagagaaacgccgaaacgtaaggttgaaatctaccaagtaacatcaaga

SEQ ID NO: 5106 - DNA, 10908 bp, Emericella nidulans
agagtggggtcgtgttacctcccagacagtccttaaggaacccagcgtgactgcgcatagcatcgccatgcgaaatacgttagagcttagtccttgatcacagctcgcaagaatcagactccagggcgctgatgagtcagatttgtgtttgctcaggagaactcaaatgtctgctcgtggccgttaaaagaatggccgcgtgtcgacatatgccagaaggcagcccgaggccaataactcccctcgatgctccagagcaagctaggacaacgcccattcaggtgctggccggggatagcgccatagcaccgtctccatgtacatataatatcctccatgaaccctatgaatctgaaagggtctggcgatgtttcaggtttgtttgggaaatatggcaagactcctcaacttaaagcctggcgtcgtgctcaatcccggtgaggcgcaatgcccaagaaagagatttaagagaaatagaaagagaagaaaaagaaaaacatgaacgcataatgggttagaggacaagtacttagctttggaaatggggtaaatgagtagaaagttagggaatgtccattcacaaggggtgactcccacttgagagggtcgtgctaatattcaactttttaagaagggatctgggcatcctgatgatactatactcacgagtagcaatcattggatgtattgatcttggcctcaataggtcctagggtcttcgttattgttgaagacagtgaaggccgaagtgacctgatcgctatcgatagacgccaagaaacgggctgttatcaataagaaacggatcggatgatcgtttagagtctcaccatacaatccgccaccaaggacagcttgtccacttccagctgccactcactccttcatagcttcgccgctgtcctatttctcgtttctcacattgtcgcgatctccattactacttgctttctggcttgacttcctagtgtcttggacgtttatggccacgttctgattagccactcttttcatgtgaagctctgccagcttctcactttcgttgattggcatcagtgattcatctatatttgctcttcactcacttgacactgcgataacttctatacgcctgacgctaccgcgagaatgcgctccgcagcgaaatttttctacctggccgtgtttggcttcatgagccaggccaatgccgataagcatggagaaaaatcgatgcatggctatgacacatgcgcagtaagttctgtgtctcagataccacatgacatgttctaatgggttccattttctagattgaccacaatgctgttgtctccgacgcctgcgtttcctaccacaccattgatgctcttaacgaccaaatctactcactcctccagtccattacgcaagaaaccgatttcttttcatattatcgcctcaacctctttaataaagtgtgtccgttttggtccgaatctgaaggaatgtgcgggaacattgcatgcgctgtgaatactatagactcggaagaagatatcccattaacgtggcgcgcggaagagctgagtaaactggaagggccgaaagcgggccatccgggccgtcagcaacaacacgagaggccacgggataaacccctgcaaggaatgctaggagaggatgttggggagagttgcgtggtagagtacgacgacgagtgtgatgagcgggactactgtgtccccgaagatgaagggagcagtgggaaaggtgactacgtgagcttggtagacaatcctgagcgattcacagggtacgcaggagccggtgcgaaccaggtctgggacgccatctaccgcgaaaactgttttctcaagccggtacccgagcttgagcaatcgtccttcactccgctgggcggactccaggctatacaagatttccaaaatgttctccagaaagagtcgaagcggccagatctgttgccgttggataatgagtgtgtagagaagcgggtcttccatcggctcattagtggaatgcatgcgtctatctcgactcatctgtgctgggactaccttaaccagaccaccggacagtggcatcccaaccttcagtgtttcaaggagcggcttcacaatcaccctgagcgcatttcaaatctttatttcaattacgcgctggtggctcgcgcggtgtccaagctgcggaagcacctggaaggctacacatattgcctgggtgacccggcgcaagaccaagacaccaaagagaaaatctctctcttgacctctactcttgctgaacgtccacaaatctttgatgagaacgtcatgtttcaagatccgggcgccatcgacctcaaggaagacttccggaaccgctttcggaacgtcagccgactgatggactgcgtaggctgtgacaagtgccgtctctggggaaagctccaggtcaatggctacggcactgctctcaaggttctttttgagtacgacgagaccaagaacggcgagaatcctcctctgcgccgaacagaactagtagccttgatcaacacgctaggccgtatatcccacagtatcgcggcagtgcgaagtttccatcgtgcaatggaagtcaccgatggtcaggttttcgcaatcccggccggatcaacagcaggccagagtcgtgcaggtggcaagaaagtccgccgtcttgtcaaaaacggcgggtcaacgttctactacgaagacgataccgccgaggactatcagtatatcagccagcagcgtccctgggagcggcaacgggtgaagcgcgagggtgacaccattattgacgatttcaaggccgagttctcggtcgtatgggatactctcatcttcgtcctgaaaagctgggttaatataccctggaccttgtaagttgttgctctcaatctgaagatatagattggtttctctaacgtattatagctgggagatcggggtcctcgaagccaaccgcctctggagttactggctgggtcttcccgtgccgccgcgagcttggagaatccagctgccgcagcgaccgcctcctccaattgttgtgcgcgatgaactatagtctaattaggtagcgatcatttgaactggcgttcggttggtgttgccgttgcatagctgcatagtattgtatatatgggtcggatgtttacttctgagtatatccatttttcaataaccaatatttattgtacaaattgtagaattcgccgagtggcgatacccgtcgggtgtggaggtcctcggggcctcggcatttcctcccacatgtctctcggcctcaacctccatcgatttctccaccacttgagtctcttttgtcactcttcctctgactccacgccctcatccccagagccggcttttgatctaattttgatctcgaaggcctctaatagagctctcagacaaacctcgtcgttgctgggacaccgcttcatgcagcactgagttttcctcgcgtttcccatggcgtccgtatcgccacccaaaccctgggagagagccggcgccactgcaggtaagaaacaacataagccataactgaagaagaaacagcattcttaccacctgtcctttaggcactgcgttatcatcaccagcgaccacatccacggccatgtcctcaacgtccacgacatcggcggccccgaccgcagggacctccacaacaagcgcaacggcacccccttctctaccctcccgacctagcacacttagtactgttgcgaaccaaaacgcctcaaactactccccatatggcgcctcacgatttggtgcgtcgccatatggcggctatggcggctatggaagctactcatccccgtattcgcgattcggtggaatgggctcaatgtacggcggttatggcggctatggtgggatgtacagcggtatgggagggtacggaggcatgtacggcggtggcatgcctggcgacccaaatgacccgaacagtttgacgaactcattcaaccagagtactcaggcaacgtttcagatgatcgagagtattgtcggggctttcggtggcttcgcgcagatgcttgagagcacttatatggcgacgcatagttcgttttttggtgagtacattcataatctgtgacgtgatttgtatgcttatttttgcagccatggtatccgtcgctgagcagttcggaaacctgcgtaacacgcttggctctgccttgggcatcttcacattaatccggtggttcaagacgttgatcgcgaaaataactggtcgtccaccgccagcagacgctacggcccttacaccagctgcattcgctgcatttatgggcggccgggccacactcccagatggctctccagcgcctccacggccttcacggaagccattcctgatgttccttgttgccctctttggacttccgtacttaatgggcaaacttataaaatctcttgcacgttcccaagaagcacaacgtcagaaaatcatgatgaccgccaacggtgagcagcagggcgttttggacccgtccaagctcgacttctgccgcgttctctacgattatacacccgaatcacaggaaaccaacggcattgatctggccgtgaagaagggcgacattgtcgctgtgctcagcaaatccgatccgatgggcaatgcgtcggaatggtggcgttgccgcgcgcgagacggccgcgtaggataccttccgggtccgtatctcgagactatccaacgcaagccacagcagcaggcccttacctccggcagtgaagcgggcagtcgcagtaacacgatgcagagccagacgcaggtcggcaatgaggttgccgcgggtcagaagccagagcttaaggggaaaatgggtgatatttctgcggagagtttccaaaagagcgcgttctattcatgaattcgatttctcctctttcagccatattttctctatgggttgatcgtggtatatgaagggcatggtaccacgcttctaatgcagttctctctttttgtttgttcttatttcagcggcatgcacagaattcctttttatttcttattttttatggtgccagtagcacatatgatatccaatgctagacatctattccaggagcatgctcgtccgcggttcaaaatcataggtattcgtaaccagatactctacaacagtttcctattttgtgtcataaaaatatatttgacctcaactgaacatagttggcagatacggcaagagaatacggcaagagaaaagacgatgcaactaacgcccaaaaagcgtatccacaaccttcgcaactgcaaccgccttctcctccccataccttccccctacaatctggacagtcactggcatccccttgaccagatcgatatcatctataatcattaataacagttcaggctagcgtatgttcagttttgaaccccgccccccgtggcgcgcccgggccaatatctcaagaggtataaataggctgaagggagaaagaacatacactgatcataattaaagcgatccgctttattcctcggcgcatagcccttccactcattatcaattccagcaactggatgatcaagctccccatccgctttcccgatgggagcagtgacagctgcataattgagtaggttgaacagcgccgtatagccgagccactggttgctctgcacccactgcttcggtttataccccaaccagggtgtaacgggaaggaggagggcgtcaatgccactggcgacccattgagctaggtaggattcttgaaaggcgtatttttcttcttcgagctggggtgcactgtcatgagtagcgggtttggagggtttgtttggaaagtacttactttttccttctccacactcgagagctcgtctgctgatgtgccaacgaccataccctgaattaggggctcatcgacgagcgagcaaagctgccggcagtggtatccgccatcggcgaggatggacctagtccagagggttgtgccggttctatgaagagacgtgtcccattcaactactacgatatattgttaactcggataggtaagtggcggttagtcagggctaagtagtaaaataccttcatgaccggcattcgtcaactcccttgcaagctcccgcatgagccgcatcacaggaggctgtggccgtacgacgccgtcatcatagacaatacctagtttcagctttctcgtcggatccggaaacgctgctgtttctctccgccacggaatgggaatacatccaggatcgagattccatgggttggagtctaggagactctgcataaagtattcgatagtcgagacgcttctagccatggggcctgcgacgggtgggacgagatagtgttggtgcatgctggaccagagatgtcagcatcttcctcaccactgtctatcctccgcataaaggaggagggggtttacaaagaacaattccacgggatgcgccccgtcgtcggacagagcgaatacagcccctggaggttcgatggcacgcggatcgaacctccaatgtccgtccctattccgaggacacttcctcctgcgccgacaagcgcgccttcgcctccggagctaccacctgagattagcttggtattgaaggcattgacggattggccaaagacgtggttgtaggaatcagacatctatttgttgtcagtttgggcttgatcctcctggtattagctggtagaagttcaagaacctaccatcaatgattgaggaacattagtcttgacatataggacagctcccatagactccaggagctggacaacagagtccgactttgcagcaggtttattcgccagtcctacccaacctatgcgtcatattcaactcaacttagcacaaacacccaaaacaagccgaagcgatatggtcagagtagggtacgtaccaatagtagtatcaaaaccctcaacatcaaaccggtccttgatagagaccggcactccatgcaatggccccgtcactttccccgtcctttcaaattcctcatctaaaaactttgccctctggagcgcccgatcgaagaatatctctgttagacagcccgtcaattgctgcgcgacagcggcacgtttacagaatgccgtagtcagctgcacagaggtcaccgagcgcgaggcaagaaggcagacaagctctgttatatcgttcacttctgtccatcgaagttcttgcggagagagaatgccacaagtttggattatttctatggggcttttagggctggtacttgagatgctggaagaggaaagtcgccagggagacgggatagattgcagttgggtgaggcgtttttgatgcgcgatagatttccagtgaggttccgtcatcctgatttattccatatgacctcttagtttcgtatatgaagctgctgctgctgagtccgttcctggtgttgtggatggatggttatctgcggagaaagaggggtcaggtctcatctaggcagatccgaactaaagcagttataggccaagccgagccttgagatatcattgttgttatcatggatctagtaattacattcctggccgtaacatgtacactagacggtcatcaacatgctagcattcttataccacgtcagaagcgggttctcgccactcctggtttccgtgtcttcgacgtacgcccagcgtcgaacgaaatcttcgtggctggccacttgtgttagctttccagtgatcgctcggtagatgtcctcgacaacattgaaatccgtgggaaagaagatatcgaaatagccctgatgcacctgtgaaatggtaaggtttcgacgccgaatgtgggctgggatcacttacgaaaggtgtggagactggaactgttctcctcttgtatcgtgtttgtactaccggcgcattgattcccggaatagcatctggaaggctgctgaagtcacttgctaggagtcggtggccagggaagtagttgtcaaggatgtcgaagaattgcatcagtcgagtgggaatatactcaggcatcgtgtaaggtttttggaatggcaaggtcccgcggatttgtcgtgcgagtcgcggtcccagcggactggggaactcacgccgggctgcggcttgacgaacacgcaggaatcgagatgcaagagggtccagcttgggggtccagaactcatggaattcgccgtctccgtcaatcagtactccaccctgctgtggcatttctgtcttggtatcatatcgaattgcgtcgtgggcaaagttgtcaaacacttcaagcgcgaggaagaagcacggggagtgcacgtaggtgtcccattcaaaaatagacttgttgataatttcgacgtggtccaaatgaccagcagcgtaaagagagtcagtcaaattcttcatttgaagcccagccagagccggcgaaatctcaatgatgcggaatttggttcgctgatagacctcgtagtctgtatcgcggatgaagtcgaggatgttaatcatcattgttccgtttcctgcgcccatttcgtatatgatgaggtcatggtaaggatagagcgtcagtttatagttagacacgagatagcgggcaattgtctctccataataaggccggaacagctcggtcggcgtatgccataactggcgggcctcatccggctgcttttcatctagcatatcttcaaattcggtatagcgctcccctaacagcctgtggaaggccggcccatcttcgatattgttgaaatcgaacggctccccggggctaaagatggtcgcgtgcttggaaaagtagccgtaatgcggattatataaactgtctatccagagtaagacatcaacgtcagcaagaagaaaagcagaaacgcaattagtaaaagggctcaccgtcaatgaattctcttgttagcatctgtacctggcgtggccggtcctgccgatggcgcagatctttcgctgccatcaacggatatgttttcaattcctcgtctatattcttcgggtaatcccctcgttttgtccaattcaagccatcgtcggtactcttgcgcttggccgccgacctacgcgtaaggaacggtcggcactgttgttgagatcgcgataggcgaaacgtgtgggatgagggcgaagggcggacggattgacaggctgggtgacggaagagctgtcgaaacagctgattaaggactggagagtccatggccggaccgtccttgacacaggcgttggaggtaaaagctgaaggaggtagctggataatgagaagtggaatctcgatcagatgcgggcggagattggcaggcggcccgagcttttacttcgttaacgtatctccagcttgacctccaatgattctaactgcaactttccataattcccgcttcggttgggcttcttttcttatcttcacctctcctgatgccagatcattcgcatatctacattggctctgccttcgtggcaggagttgtcctgactatagctttcaaggacctattctaccccgagatcgaggaacgcatcagagattatcgcgctcggcattcctcaaaatcataccagaacgcctcagtggattcgttagctgtgaggcatgggcctccagctattgtagatgggatcgagggctgtattgggaatacccctctacttcgaatcaaatccctgtccgaagcgaccgggtgcgaaatcctagcgaaggctgaagtacgttatcgtctcctattcctacggtttggtgttgaaaatctaatagaaatttagtttctgaacggcgccggtcagagctcaaaggatcgagtagctctgagcatgatcgaattggtatgtgatcccgcagcaactcgcgacaacccactaacgtcttcaggctgaggagaggggattgatgactccgcattcaggagatacgatctacgaaggaacatctgggtcgacaggaatctcattggccacgctagctagggcaaagggctatcttgctcatatgtacgtgctactttgacacaggcacgagctcatctaaccccataccagttgtatgccatcagaccaggctatcgaaaagtcgaacttactcctcaaactaggcgcaatagttgaccgcgtgcctccagcacctatagttgagaaggacaacttcgttaaccgggcaagagcacttgcgcaacgacataccaattcgacagcgtcagaatcatcagttggtacagcctcccaaaggggaaggggttactttgcggaccaattcgagaacgaggcgaactggcgagcccactacaatggcaccggcccggagatctacgcccagtgcaatgggtcccttgacgcctttgttgcaggggccgggaccggaggcacaatctctggcgtggctctatatctcaagccgaggatccccaacatgactgtggtagtagccgatccccaaggtagtgggctctataatcgggttcgttacggagttatgttcgacactaaggagaaggaagggacacgtcgtcggaggcaggttgatactatcgtggaaggcattgggatcaaccgcgttaccgcaaatttcgaggcgggacgggaacttgttgacgacgctgttagggttacggacgcgcaggcactggcaatggctagatggcttgttgaaaaggacggcatctttgcggggagtagcagtgctgtcaactgtgagtttcagttagattttcaattcctcgcataattaacctcaaaaccaggtttcgccgccgtcaaaactgctttgaaactggggcccggccacagaatcgtcacaatgctgtctgattcaggctcaagacatctctcaaggttctgggcaaaagctgggaatgtgggcggcgctgtggacacaaagttggaggacgtcctgaatgcgaaagaagaccaatagactcccgctcacgttttcatacaatgagtcagaatcaaatgaa

SEQ ID NO: 5107 - DNA, 7048 bp, Emericella nidulans
taagattccggccgcaattaaccctactaaagggatcttcatcaccctctgtaggggcggctgcctgtgcatcccgtccgagcatgaccggatgaacgacctgcccggattgataaaccgcctggccgtcacccacgcgctcctcacaccgtcagtcgcgcttttcctgtctcccgagtccgtgccaatgcttcagatgcttggttttgtgggcgaagccgtcccggccgagctcgtccgccggtggcataaaaaggtggtcttgattaacagctacggtcctgcggaatgctctatcatggcctcgctagctgttctgcacgaggatgtagctgctgccaatatcggccggggcaatggctgcctgctctgggtgacagacccggaaaatagcgagcgactggtgccggtgggttgcgtgggcgagctcctgatcgaaggaccgctagtaacaagaggctacctcgatgccgaattaaccgcgcggtcatttattatgcccccgagatggcgcggagagactgttattcctggaacaaaattgtataagactagggatctagtccggtatgcggacgacggcagtcttgtgtatatgggacgcaaagacagccaggtcaagctgaatggtcagcgtgtggagatgggtgctatagaaatgacaatcaataatgatgcactggtgaagcagtgcgtcctttgcttaccgaaagtcgggccttgcaagaagaagctggttgccgttgttgtgctggaggaaacggcgtctaaagacattactgcggaaatcggaccgctaaccaatctggaagagaaggagagagccactgatctggtcgaacaaatcaaagaccgattggctagtactttgccgcggtatatgatcccatctgtctggctcgttaccccaaacctcccttttaaacagtcgcgaaaggtcgatcgtccgatgatttcacgttgggtcgacaccatggaccatgagacctatacccaagctcttgcagaattccctcttgagcttgctgatacttccttcttttgaagctcaagttccaacccgcttgatagagatcattgtccgcgtactgaaccttccgctcgcccaagtgtctctcaaccgctcttttctgaacctgggcggagactctattacagccatgcagttagtcgtgcagtgccgtaacgagggaattcatttctattcaaggatgtgatgcgcagcctaccacaaggcattggcgcaatgtgttgagaaagtggacccaatcacgtcgtcgagtacatatgctgaaaagctcgacaccccattgggattgtcgcctatccagcagctttacttcaataagtctctaagggtagcacggacacgcccggcaaccagttcaaccagagcgtcttgctccgtaccacccgcgatttctctgtcgagcagctacagtccgccgtggagcagctagtccggcgccattctatgcttcttgctcggttccgacagtcgcacgggggcaaatggacccagataatccagagccaaatcgaagggttgtatcgattaagagaacatgcttttcagtccgacaccgaggcgaaacgggttgctttaatagctcaggaacagctggacttccacaacggcccggtcatcgccctggagctgttcaccatgaacagaaaccagccatggtattcctcgtggcgcaccatctggtcattgatctggtctcctggcgcatcatcttccaggaactgcaaaattgcttaaatggtaaggcaatggcgtccgactcttctgcacctttcttcttccagcggtggcagcaactgcaagccgactatgcctcgaaacatctacatccagcccgagcggcgccatatgatattcccgcagcggactatgcattctggggaatgcagggcgtgccaaactaccaggggatactgtgcagctctctgccacacttggaagcaaggaaactgaactcctcttgacgcctgccggaacgccatgaggacggagccgttggacgtcctccttgccgcgctgatatatcctatgcgcgcacattcaatcgtaagccaccagctattttcaacgaaggccatggtcgacaaccagccgtagatggcacactttctgaggtggacctatccaactctatcggttggttcacgaccatcttccccatcttcgtcccaactgagcccggcggcagagccctagacactgtccggcaggtgaaaaatcagcggaagcagctttcagccaacggattgtcgtattttacgtccaagtaccataatcacaatggggcgcaagcctttgcggaccacatgcccgtggaaactctgttcaactacctcggtctttatcaaggcctcgaacgcgcagatggcggtttccagcgggttccatttaatgagggcgatgtcggactggctgtgcgacggtacgcgttgttcgagataaatgtctatgtggtgaatggatcagcccatatcaccgttgcttttaaccaaaagatgaatcatcgtgagcggattgaggcctggctcgcgctctacaccgatgagctggtcgagctaagccaacagctggccaaggctgactatactctgactcggagtgactatcccctcctcccaattgcctatcctcggctggataaattccaaagcgaagaactgccgcagttaggctatcctattgacgccattgaagacatatacccctgctcgccgcttcaagaatgtgttctcctcagccaggcccgtctcgacggcgctggtgcttacctttaccacgccatactgccactagattctgctggtggagaccctagccgactccaattcgcgtggcagcaggtcggcgaccggcacagcatcctccggacggtattcctgcgacgcatcactgaccaacccttcgatcaaatggttctgggtagccacacggcaaggactctcttgctggaagaggccgtctctggcatggacgccgtggtaatgctccgccagctggatccgcctcggccgtctcggacgagccgcccccccatcgcctcgccttggtacaaacgtcagatggaactgtcttcttccaactcgacctcagccacgcgctgatcgacgaaacagctgtggcggtccttataaatgaactggttacggcgtacgttggcaagctttcgcccatgccggcaatgaactacagtaaatatatatcatacatccaatcgcaggatacagccgaggcccttgacttctgggccagccacctcagaggtgttcaatcctgccattttccaaactcggctgccgtcgatgatgccctgagtggactccagaaggctttgcgagacatcgaagtcaaggttcctgacacagcacgtgtgcgccgtgggcccgttcatcaatgtgctcgtctgcgttgtgaatctgagtcagtcgggacgcaagacgaccatgagcaactcaaggagctgcaggaagagcatctcaagatcctgcggtattagcacatcggtctggcaaaaattcaacaccatctcggcttgtcggggcaagccctattcaacaccgttgtcagtatccaacgccttgacgtggacaacatcaaggtcggcgacgtggctctccgctatgtcgagggcgaggatcccaccgggtataatatcaccgtcaatgtcgccgacaatgaccacggcttcaccgttcatctcggctatctggcgtcgaggctgtcgccagagcacgcagcgaatatcagcgacgcgctctcggccgcgatctcgtcgatcgtgtctgacccccaatctaccgtcagctccaccgatctcttcggaccccatcattgcagacaagttttgaaatggaacgagaccttccccccaccgtcaatgaatgcatccatgtcctggtcgagcgcagtgctgccgccgcccccgatgcgcctgcagtcgcttcttgggacggcgagttctcctacgcggagctcaacagacatgccaaccagcttgcgcgcgtgctcgcagagatgggcttcagccgaaaaaatttgatccttatttgttttgagaagtccagctgtgctgctgtcgccatgctcggcatcctcaaagccggggctggctttgtgccgctggacccagcccttccgccggaacgaatatcggcaattattgctcagacgggctcttctctagccctggtctctgcgtcaacatccaagaggattgtgaacttggtgtcgagaacccttgtcgtctgggtggcttcgaacatgtggcttggtagtgatgatatggttataggctctgcctccccgcgcaatatcgcatacacaattttcacatcaggcagcacaggcgtcgctagggccgtggtgatagagcattctgccgtgagtacaagtgtgatatatcgtggtagagagatttgatgtagtgccgtcacacgcaggtaccagttcgccgcttatacatttgcgcgtgcatcctcgagatattcactacgctcgtctacggaggttgcatctgcatcccgtccgaagaggagcgcatgagcgatattgctggctctataagtcgtctgcaggccaacacaaccttcctgacgccctctgtcgtccgcattctctggcccaaccaggtcccaagcttgaccaccattatcctcggcggagaggccctggatgccgaaaacattgccacctgggttggtgcgagaaacgacatttgtttgataaacggatatggtcctacggagacctgcgtcttctgcgtaatgcacacatttaccagcaagacgcaacgccacgacgtcctcggccgcacggtaagctcacggtcctggattgggcgccctgagaaccataaccatctagcacctgttggatctattggtgaacttcttgtggagggcggcactgtggcccgtggatatgtgggcgacgaggaaaaatcctcccaaagcttcctcagcaaccacgaggcggcttcccggataaccagaggcgagagacaggcggatccacgcttccacaagaccagtgatctagtccggtacaatactgacggcacaatcagctacattgggagaaaggataggcagattaaactgcgaggacaacgaattgagctttccgaaatcgagcatcagaacagagacagcttccacccaacacgcagattgcggcggaggtcgtgcttccacacggggagaaggagcaggcctttctcgctgcttttatatgtcaggccgactcgaatgatgaacagagggggctccttgccgaatagacccctgaggtcgcaagccagctcggtcaactgaagcgcttgcttgctggcgcgcttccaccgtacatgcagccgtcaatcttcctgccgacgaactggatgccaatcacgtcagcaaagaagcttaaccgggcgttcgtacaaaataagtgcttaatgccgtgtgttccgcatgccctagtctccaagtctcacttttcctgtggttaactacgctgtattcaaaactcaaaacactttgattgcactgtggatagttgggtgcttgagatataaattacaattgtaatggtcagcaatgagccagtataagatgaatgttttgtccgattgtttattgtgtaggaacacaaatattcgctactgtaacagaacggccgatacgctgctacggcatactgttcgaacaaaagggcaaaaatgtatttaacacgtaacgagtttgtaccagctcagattctgccagcagaaatttgattacatatgcaggatagcttgcttagtttcaccaactggttactcatcctaagcaccacgtaaaggtgcaagctatgcttaggtgaggtacacagcctgtacccctaggcagtgctggtgtttgtacaggaaaatcaagaaagctcgtatggaccttataagacaatcggattgtcctcatccccttcagggaaattgaggtagataggattttcagcctcaccttccactggatcaagattgataactagctggtttgcagccccctggggtagaccaagcccattaccaagcataccctgccagtgctcgtctcatacagagcagcaatgcccatggtcacgccatttataattggcgcacgatccattgaatgccccaggcacatgggggcattcagggaagactggtcttccttgtacagagcagcatcctttacaaggctgggtcagacaagtcccccaagactgtataagcatggcattgatgtacgagggccagtgttgccataattaatgccaatttattctgtcgcgaataaactcaacatcctgcccaggaagggccagcaaatacctctgtatatctgtataaatatacccagatagctcttgacccccaagtagaagcatagcagttggtgctcatctagctcgtctattaacaaaggcaaagaggctcaggcactcttctcgactgagaggctggttggcagggaaggagggggcgcggttgggtgtatgaggagcttggaggctattttgtctgcttcagacaagatacaagctacagaggcagcagtatacttgtacagagcaagtaaaatagtcagcagataattttaatgataggggatagagaacaggagtcttatacaccatggtaatggttgttatagaaagaaagatatggaaggaaggaagagaagaggaagaagcaaaacagtagagatttcaaactttgagctgtgttactaaatgcctttgtacaaattgcatggatggccatgttaaatgccttcctcattaccagctgttaaaatatcatatctctatatctaaattggaatgctaaactctgcagagcacttaatatcctcctgctagaggatatggtgctttcttgtataataagccactctatctttcttcccaggaacaaacagtaactctgatagttcctgctctagatccttctcttaagtactctctctggctcttcgtctttaatgcaattaaaataagtattcttcatatagcagccaggac

SEQ ID NO: 5108 - DNA, 5823 bp, Emericella nidulans
caggaccatcctttggggaggacaggcccatatgggcccatgggcctcaggacaataaacgagtcgggaccttctgagagttggctggcaagcacaaggccgtcccaacctgtgggtcggcacagcgcatgaagccatcaggatgggcacttgtcattctgctcgcaacaataggttcagtagcctccgcacggtatgatggtatagggaaacgtcctcagtctgacgctgggggcgccagtgacagactttggacgcgctcatcttcaaccaccccataagcctatgcgtccaagagcgaggaagacaagagataggctctgagcgcctcgagcgagttgaggcaaggaaatgccagcagatgggagcttactaatcgatcaatatctgaccagacggatcccgaaaaggcgagattgcggtgaggatgcgaatgatgacgctgatggccatctagcggccttcgtgagaacggccatctatgacgatctatgaatcaaggcaagccgtctgctctgatactgttcagataacggttacatgcgagggaagcagcagaaggctcaagacggctgcagaaagtatgggttagcgggagacaggaaagagtggagagtggagagtggacgagtgaatgagcagaaatgaactgaatcttcctcttcgccaaatcttatttgatcgtatgccttggtagccgacaatgcagtgacctcgggctcttacgggcgtatgcaggtcattgtaagacagcacagcaccaagccgtcacagagacacgtatcacggtagaatcgatagaaaaatcgtccagcgcgggtttccagacgcacggcagcgatctcgtgattgtcgtgcatgaagatactcggcagcacgcacaggattcaacgtgctcggcatattctcgcctccatccagcccgatcagcgttctagcgttctaatttccgcggaaatagagggctcccgtcaatcatcgcgatacggtttcagtagccgataatctggagccgaaacaaggagacaaggcaataaagggctgtccatggattttaatgttgatgatccgtgataaagacaaaggtaggtagttaaagcttttgggagtcaaggcctgccgcctgcgtggtggcggcacactgcaagccacgcaatattgtatgtacaggtatagagatataaattaatcgcaagtatatcaagcgtacagaccagtctcctactcgtaaacagaataaaaaaattctaaaaaaaatccttaattaaagatctaactcaaaacagcagtaaacagtagtaaataaacactgtagactttccgttacccggtccttcccgccgtggcagcccgcagtggattcagagcttgaggaagtcgaactttgatccaaagacgagcagaagactcgggtttaaagattgggacaacaagtgctgtcctccaatggcagacgacgaagatgtgcggatggatgctgatgcctgtcgaccgttacgtgtcatggctcgtttagggaaaacgaggctggtgcagacaggcagtttggagcggcggatgactccggctgttgaacttggagccgagggtttaatataaatgggctgagaaaggaatggcttagcgacggctggagatagatgaggcgagtgaagcgagtcttctagaagaagaatcatgctatccagcctgctatctctgcggtttcctgtttgatctccgttgcctcgtggcagacgggcacatgatttctgggtattttaaagaaattataataatcatgatacaatcatccaacctctgctgatcaatgatcatccgcgcgttgcgcatcccacgttgcactttgcacgttgcacggcactggcacgggaatacctccacagcgactgataatcattgctcttacgaatccagaatcagagccagctcaatgccagtgccactggcgctggcattgagctggaaacgctcgtctagaaagatggatcatcaagcgagcgttgaagacgatcatcttccccaccatcgacctcatcgaccggcgaccctgagctctgccattgctcgagtcgagtcgagactaaagacttttgcggacgctggagggacatttggagacgctgagacgccctagacgcctagacagacattaatgcatgcagcccatctatagaggacctcaccgccgtttgaacaaggatgaaggcaagaaacaggataatttctttgttatattaagcattttagcaggagacgggattgagttgacgtcgtagacccgtaacacagatatcgaacctggaacttgtttgataacgacggcagcaaaagcaagcaagcagcgagcgagcgaaaaaaggtcccggctcagtaagggatttctgcctgaggtttcagttttcgatactaaagaggagtcgcgggcgtcacgcttgatgaggaaggacggccaaatacgacacgtatgaaaacatcccggtacggctagcaggggagcccgggacagccatccgacaagagatagagttgaggatctgacagcggctagattacgactagtgcggtaagaggtcgtaacggacccacagggcgacggggtattcatccctcactccagtctcccagtccccgtctcaattcgaaatctcctgcttgcttgctggcttgctctgcctgccttcatttctcccttccttcctttcttttttttcttcttacccccttcgccctctcgattccattctctcgatttcacgttcgtcgatacctatcgaccaattctacctgtcgaaacgcagtttctgattttcgattctcggtccgttctcctgacccatggaactggcctagggtgccgcccgacacccaacaccagcaccaccaccagcaccaccaccccaacactccacgtcaagtatacgccatcgagctgatgataccacgacggaacgaattttgattccatcgatcagatattctgatatttgctatacgaagagtatgcccacgacccaaatggacgccttgggcgccttcacctacctgtccgacaacctccccacctggatctctcgcctcgccgacctctcagcccatacaaccgccaaaaacgccgaattcgctgaagcgttcaagcaacactcagcgccctcaaaaccgcgtcgtcgccgcaatagttctgtttgctcgatccaagcagactcgcttgcggcaaatcacagccagttgggcgtgaaacgcagacgacagacaaacgatggatccatcgactcatgtaacggccctacggtgatcagtacgcgacataacctaattattcactacgatgggtatactcagaagacgctagaggaaatggtgcgaaatattgggacagcacgaaataatctacgcaagggcaagatggctcagctgccgctggctgtcggtggcctgcgatcgtcgtcgaggaatactgctcgcacaatgctacctgctttggatccaggtgctcctgagagcgatttgctggctagtatacgaacggcacggacacggggcccgcccgcgccgccgcaggcggcaagagagtcgccatttgaccttgcagataaaaatctggaacttgcacatagcttctgcgagacagcagcgtaccatttcctgcgggtgggggcctgtgcttcagagctggagagcgtcagggaccgattcaatgtcctgctcaagctcgctacggaggaagtccagcgtctccgggaggaacaggaggcgaagaagaaggaacagctggacgagaaaaagctcgaagccgacgcttcgaccaaagtcacagttacaattacagaaacctccgtgtcgccgaagcgaccggcatcgaacgagggacccgtcgaggtcgacgatgaccagggctcggtggaatcgcttgatctgacggcattcagggtcggtcggctgcgacggtgatccgtccatctcacttacattctctcacttaaatctcacttcaacaaaactgcatcgacactcgctttcatctcatttcatttattcctgtggttcactaggttgggtctgctttatcggtcatagcgggtctttcgttgttttttttttacgagcgtgtcctgtcctctcctgttcttttgactgagcgtggtgttggcggagtttcggcatattttatctttccaaccatgcactatttacgcatcattctggatagttctccatatatacgtatctacggttatatagccgaataccatgacgacgagaatattcagctcttcgagcagtcgaaccatgtgatcttctgacttctagcggattccgtactttgtcccgcaacgccagtggaacacaccctgcggtatctgattcgccagcagagcccgaagcttagggtagaggtccccgatccccggttctggcggggccgctgccggcgccgctgtattttatccctgcttaccacaaaagtgagatgatgggtcatatttgtttccagcatgtggaaactgtctgatacacaacttattgttgaatttaggttggctactcaatcgatcccagtaatgcacgccatgctttgcagcgatttggctgattcggcttgaggcgttcttcacagcgtagacggacggtaaagtaccccacttactgtgcataggtactgtgttgccgcggaagaaaccgctcagctcagcttaggctctgaaagtatctgtatgacaccaagataggtaggtagcgggggagaacagcggggttcgttaaacttcgtaattcaatatgctctacactagatcaggatgttcctggttggtctctgtatgcatgcatgttgatatctggttcttcttgcaccttatttgatgaggtattctgcagacaaagtcgaactgtccagcaagccgagcaatcgggcagtcgagcaattgggcataggagcagttgagcaattcaacaagttgagtaggtggagtaaatcgaatggtggacaatatcttgtgtgagagctttggccagcagggcaaagtggagtgctgactgacttactttccaatgtaggttacgtagttattcccgtgctttgtatgcgtcatccaaattgtgcacatttcatatttcctccacggtacagagtacttactatacttactgtacttactgtcctcactgcgcctacattgttgattgatcattcaggtatcgcaaacgaggtcacaatgtgcctgattaaaggtcaacgaggaatttggagttcatagaacaatccaagaatgttgaggtggttcagcgaatctggagcacaggtattgtccatggatctgggcagtcgggcaagcctttacctggcactctcaatctataccttcctaggccaagcgcgacaaaaaggatcatatacggagtgatatacggagttatatgctgagttatatgctgagtgatactgagtccttgatcgcaaaagatgtaatgcgggtttaacggcccgttcggtagcgttcctgacagagctataaaagaaaatagaggcaatagaggcgcgcatgaaatggaagcgtatctattcttagacgctccgcagatagggaacatggtatatgatctgatcgattaccgtaccgagtaagcagcgctttccttagcgatcggacgatctcgtgttcgagaggcatgctgcacgtcagatatcatgatgtgctttgtaggtatacttgtctcgcaatcgtatgatcactagctagcggaccaaagaccaacttagggatcgttccttgatttcccgacattctgagaatcagtgtagcggcggcatcatatcacaac

SEQ ID NO: 5109 - DNA, 4263 bp, Emericella nidulans
ttacttgctgcgtatcggctgcagacccggtgagaaacggattgggtgaaatgcgggccagcgtgataacccaaaacagcaacgttcggtttgtcgatgccggtactaatgagcgtggaacgggagcgaggaagagtggagaggatctgagtgtagaagatggaggagagggaggggtgttatctttactgttgagcttttcagggatcttgaggagagagatagctggttcggcggcggcgtctcctacttggagataaaaacaagcggcggctatagcggcgagatccacttctgcttgactccttccggttcggtctatattgacgcatacgggcttatttgactgcgatcactgtaaataagcgtagcctatagaccaggattcaggaagagaaagacgccaaagatacagattgagtagactgataagtatagctggcgaaacgggaggagaatgttcgccaagtgaaggctacgtctacctactcagatatcaacgatccggaatctcgcgggaaacagtattgatgactacactggaccgttggatggtccgtcctatccgtcatccacatgccttagtccaagactatccggtgtccagtgtccatctgacggcgtctgccccgctatgttacagcaacctcagcagggcctactgtgcaggccttacgtagtaagaaataatgctattataccaagttaggttggtggctgaacatggattccgcattggtcgcttctccagttcggtgagggattccagaagcagctggggtccagtactccattgctccttgcatgccgaatacggggtacatcatccatagatgcctttcctgtccccttttattggcagtcgtttctattccccttccggcaaaaatatcaaacatagctatcaaaacatagttcatttgatcactcgaatttcgacgatctcgactctcccgagtcggttaatgtccagttcgggtccagcttcgtcatcgagctacggcgagctatcgtactctgtatatttctttgtggggtccaacgagctggggtcaatacagagatcccctagtccagcctagcctctcacctgcctagcctctcattaaggacatctcagcgtgcggtgaacaggttaccgccaagcatacaattattggcaccgcctgcactgcatatttcagtctccttgattctatcatcatcatttcctcttgttcttgcgccaagccgttgggacagcctatgatcttcgaagtaaccattgcagtgagtcagcggcacagaatatcaccatcatacgcttggctgctctgggcattccctcgctccgtcatctcccttgctactagtccaaccaatttcacgtttctatcctccattatagacttcccgcggccagtacgcttggctctgttcggctcttgataggtgccttgtgtatagggtgccttggctgcctggctgaccggctgaattgtgtagtggtgtgagttcattgcgcttctataccgcatgcgaaagctatcgtacatagtataacagacccatctccaagaacgccggtatcataatatccaaagttgctgtacatgcaatgacaccatatgattcaagtagcctcgcccatggacgccctatgggacaacctgaatgccaacagacttggcctgtgccataacactcttgcaaagtccctccaagctcaaccccgacagtctcgtctctgactgcttgatcttcgcgatctcgtaaacgtgcttcaaggagatcttgccaatgaactcatggccgggtctctgggcgccgcggattcgattcttgcgcggttctaccttggcggcttgcaacagtaagtacgtcgttgtcggcgttcgcaggtcgaagtggaaggagcgatcggggcggactgtaacgcgggcgggaataggaactccggtagtgatgtgcgctgttcgcgcgttgaattcctatacaaattagcgaccgtcttgcgctgtcctagcaggatgattcaatgctgcataccttacaaaaatccatgcttttgacacccttactacccagagctggaccgacgggcggactgggactggcctgtccggctccgacaatgagtttgacgatctggtctttggcgatagctttcttggccattgtgaataagaatgggagaagggtcaagaacggtcaggaagggcccaattcgtcaatgtcaactgatctgttgcccttcctgcggccaagattttcgagatggacgggcggccggaatcggcatttctatccttccgagagataagtcagccctcagtggacgggcacgtccggcgctgagcgcaaaatgctggacgtcataacaaaccgtcgctgctgctccagctgagcacttcgatcagtgctcgacgtggactgtaattgtagttctcacgtaaaggtagcttcatgagaatccacttgcctcgtagttctcagatcttccctttcactcattacattacctcgagtcccctgtcaaaagctcgtactgtttgtcgattggaagactcttttgggccccgcgcgctatcgatttctccctgatcttcgatctcctccattgctcttccttagaccatttccactttccctgaacaactccctttctctctatccaccatgaattggctcaaatccacgtaagctttcccccttctgtcccctatcatcgtctgtcgactacaagtgtctatttcaacttgctaactacccccatatagtctgtccgccgttgcgggcacgcaggaaccgatatatggccctgaagccatccagccggtctcccagcaacagactgaggatgccccgtacaccgagctcaccaagcacgacttgcggtggcgtgcctatcagtacaccaatgtagagactcagacgtactatgctatggctgataatggcacgttggtgatggtccagatcatctacagcaacatcgcgtgagtcagcttttgtaacaccctttgtcgttaagatctgggcgtcacataattctgactgtacggttttatcaggggcatccatactaccgcccagttcaactgcaagatcttcaacacttccggcgacggtaccccacacatctggttctcggaccctctgtacaaccacatgtttgatgaaagcatgtcctcctttgctgctgataacatttcactgtctctaaatgaggagggcaatgcctacacccttaagtccgccgtgaacgaagggtgtcttgtggacttgacgttcaaccgcgctgcgcctggctttgctattggcaaagatggtactacatactttggtaccgacccccaaaatccctggggttcgatgcgccatatgttctggcctcggtgtaatgtcacgggaaccatcaccacaaaggagaaggtgcacgacatgacaggccgaggaatgttctctcaggctcttcagggcatgaagccccaccatgcaggtacgtcagaaacgtggttagataagatgttgtacacttctaacagggacagcttctcgctggaacttcatcaactttcaaactccgtcattttccgctatcatgatggagttcacaacaccaccatcgtacgggtctaccgtggttaacgttggcggtatcgccaaggacggcgagatcatttatgccggaactaccaacagtgcaacccacacagaggcgtcccaagatgagacgagcgactggccggagccaaagtccatcaaatgggtctgggaaggcaagacgaaagacggcaaaaccgttacagcggaggttgatggccccctcgggcctaagctagaccgtatcgacgtcatggctgaagtgccgggctttatcaagaccattgccggtagtgtcgcaggggcacgaccttacatcttccaggtaagccaccatcattgtgggtattgggttaagcttacaattcgccagtactcccctcaacagaagctctccctcaaactcaaggtcggcgacgaggagttcacggaggagggcagcatgttctccgaggccactttcatttcctaagtgctttacgtacatataatgtttcctttgtaacggcgttgagtgcttgctcaatatacgtgccacgaaattacattacatccataaagcagccgagtctacggagtaatacagaatagtgtatagtttaatgccattaccgcttctcgaaggtcaaattccggccccttattgcaatcctgttgtgtctctgacctgaacatttc

SEQ ID NO: 5110 - DNA, 7217 bp, Emericella nidulans
atcaaaatgaagtccaagtctctttatgcccttctcaatgctgcgctctccgcagcagcaattacgcaccccggtctccttcacacagaggatgatttcatgcgcattcaggacttcatctcgtccaagaccgagccccagctgacaggctggaataaacttgccgcccacgcagacccagattacacgccatcagccaccgaaacggtttgccgtggctccagctgcgaccccgagaactacccgagtctgtatcgcgacattgccgccgcatacaccaacgccgtctactggaaagtcaccggggcggagccaaatgcagacgctacagcgactattctagatgcgtggagtggcacactgaattctattgaagggaactcggaccggtttctcgcatctgggttatatgggtatcagttggcaaatgcagccgagattctgagagggtacgagaagtgggatgggcttcagggtgtagtggaattgctagagaggatatttttgccgatgaatgttgatttcttgcagaatcataacgatgcggtcatcgataattattgggcgaacgtgagtctctcttgtgtcgttatcgttagtcttttttttttttttttctctttgtttgttccatacacctgccgcggaaagtacttggaagtattcaactgatatcagatgatcttacagtgggatatctgcaacctcgctagcctgcatgctattggcgtcgtcagcgacaaccaaactgtgatcgaccaggcgatcacctattttaaggagggtcaaggcatgggtgctctgaacaacgctatatggaccattcacgaagaggaagggtcggggaagcccttgggccagggccaggaggctggtcgtgaccagggacacagtctgcttgattttgggctccttggcgtgttggcacagcaagcgtacaatcagggtgaagatctttttgcgttgggggataaccgcattcttgctgggtgagtattggcttattcagccattttgggtgatgggtggttgacagcaacagcgcggagtacgccttcaagtacaacactggcaacgatgtccccttcactagctatacaaactcccatggtacggcggacgtaatcagtgctagtgggcgggggggaattcggccgatagccgaattgttgtatgcacattataacggagtcaagggtttaaatgcctcgtggacaggggcctacagagacttggtggtcgaagatggtggtggtgctgaaggaggaagtggtgactatggatcgaacagcggagggtacgatcagtttggctttggcactgcgctgtttaggctggattgaagcgatattggctagctcgagtcttgtttcataatgttggtgttgattgatgggcggaagggttctctaatgacaggatgcgcttctgcgtgaatatacagatcaacactccaaaaatggctgagggctaatcatacaagggacccagagggagctgtggcttgattctgctatgatttgttcttcgtgcacacataccctcaaagattggactagagacgaaatccaattcaacacgatgagccttaccggatacttaaggtgaggtagatagataatcgctagtagaattgtttgaaggtatttacccaagtatggttcatcagagcttggccctacaatggagagccataatcatgatactgttgcaatctcgcccagcagtttagttagaatacaccccatctaatgaatgacgaacctatggggcgtttttatatatgttctgggcaaaacattggtgggtattgcaccgcgcgggttatctgcggtttagactgtgatgaaactgtgacggttccaaggtcagagcccgtactcgcaggccaggtcgagaatcaggtcatatatccaaaacctgctaatgcataagggtttgacagttaacatacaagttaactgcgaaatccataatagcaaaagtctcctaatctaggctatatcccctgtagaattgctgatttgtctaaatggtaggttctatacttttctgccagcctgcggctttaccaaaacatttacgcaggctgaaagtctgacgtgcacctaacccacgggttcagacagtgtacagcaacctgacccatatagggtttagatcgacctttgacagggggttggcgtcacgaagaagaatagtattgcagtggatcattctgactgtttcttagattgaagagggattctgctgttccttcaaggcctgtccagaggaaagagaggaaagagatcatttctgaatagattacatggattcagccaaactcagatagttagcacacgaccaatgcacggcagaacaactatagccgctggtgacctgagactaggctcgacgcggtcagcaaacagcatgcgttttgccagtcttgccatgaagggagtgttcgtctttgtagaaagagtgtgcattcggaagacgtgtcccatgctgggcgagatacctatcgcatgttagtctcaaggcttagtggatggcatgcttgtggatgctcaacgcagaggtggagacttacgtggtataccgctgaattgttgtctcatccatctcctctagccactagatggccattttgatatcctgaatcagaatcccacatcgatgggccgtaaaatcttcgcgaacaacgatgcgcatcagctttagattattgctccttggtgccatggtgtaggcgggtacaaccccagcccctacggcgcagaacagcagaaacagcaaactcatcgaacagccgactttcatcgtctggaagccgaaatgcgactagtggcacgccgccagagccatttcctgtgttgtcactgaggataaggagacctaggtctggcaagccacgggcgagattttgcgatacctggactagattctgcatgatggctttgtaaccgtttcgaccgaggcggatgagctggtagtactggccaatgacatgtgaagcgcccttagagaagtttagcgtgaaactggcttgctcagcgccgagatagttgatgttgaagatgagctctctgggtaggaactcaggcgatcgccagacgacccagccaacaccggggtagacctagcctggtgtcagtttttcgctcgttcattcaggaagagttgtaaaaatacaaggccgtatttatgccctgagacattgatcgacacgaccttctctagacgaaaatcccacaccagctcagggcagataaagggcgccacgaaccctccgctcgcggcgtcgacatggatcggacagtcgatatttcgttgaacaagcaggtcattaatagctttgacatcctcatagtggccggtataggtagtccccataatcgcacatatgccaatcgtattttcatccaccagttccaccgcttgaaccgggtcgatcacatatctagcatgtgtgcaatacaatagcgttcctgtacatcaaaataccgcgctgacttctccagcagacctgtaccgcgctattcattataatgtttgatgcgagtatccttccctgcgtcactccgtttcttatgccatgtctttttcatggcaagaagagcaagcatgatagcttctgatgacccaacagtcgacgtccccatcgcgccttccgccccctccgactccccgtgttcagttccctctttagactcctggtttgttggcgcattaaacaaatcagcgatcatgtttacgcaccgcgtctgcatgcgcgcgctctgcggatactgctcgaaatcgataaagttcttgcgcatggccgccgccattagggtttcgacttgcggttcctataatatcggtacacatcctatctgactatcaagaaacaaagcgcataccatataagtcgttacaaaactagccatgctacaatacatccatataagcacatgcccacctagaagggggttgaacgtacttcaataacggattcccatccaagctcaactcatccctgatcatctgctcagcgacatccggcggcatgccgttgtcattcatcacgtatagtggcagctcctcagccgcatactttgtaccatagactccagcatactcagtggtttggacagaaatgtcccttatttcgcggcgttgacggtgtgaggaggactcctgggaaacacgcgaaagggttaccattttgctgcttaagaaaggtgcttattagaacttctgaatgatctggagacaaagagagaattgatcagaagaatggtgaagcctaagggtccggaggccgaagtagtgtggggtgactgaggagcggaacctaagtatgtggtccagttgagatatgtgacctcataactcgataacgtgctccatgctatccaatctcggactattattacacctggatggagatctatagtctcagcgttcaatgaactcattcatagatatcgataacaacccatgcagagcccgcccttcctcaactcgtccataaacagaacattactcttaccacatttggcgcatcagcctacgcccatccccaaatagtcataaaaatggttcaggcgcgtagccagtgtaacttatagttaattaggatcttggaggttgcatggttcctttataatcagttttctgaatactaccaggataccgaagcgggagaaaattatcatgagtaccgagtcgcaggctggctcccatatcctgacacctcgtgcgtgaaactaagttggcttctaacgagccttcctgagatgcttcgtgtgaacagactcccttgttcattgcgtttggtgttaggtagaccgccggttgtgggtgacgtgcgagacgaccggctcggaaggtccggcagccacattttagggttttgcattgggtatcacgatagaggattggtggcgtcaacatgaaaacggtgaaaggctgcagttgattgggcgggaggggtgatatcataaactctagctagaatctgggttaggggacgggtgtcatgcgatattttggtttcctgccagtgcaaaaaccagataactagagtactgatagctgggtttgtgatgatggttcagaagcgcagtattgatccccaagtgctagtttgctagcctccggaacctgctggccttgtatattacagatatagagatagtaggaattaaccagagaataaatcatgaggacatgagttttattcattaagcttatatcgcgttcctttgttatcatcgacatcccaatccctacaatactcggcacggtatgcgcggttgacaaatcatgcacgatgagcagtgattatggtcaatgtaacgcagtgcctttgtatcacagtgaacattctctatacttgaagtgttttggatgataatgaattgggttccaaccctcaaactactaggcttggtaaggaatcatgtctaagctggatcccagtatccccggagtatctcaattccaagggatctgtagatgggagaactcccacaggaaccggcaagctgtgtcaataggaactcttatctagattaatccgtggctgctacccttgtagtagtcgcacatgaagtacggccattcatcagtagctagtccctacataaatgagtttgtctaataccacagttactctctagacaactggataggacgtatattctaccgtttacttggcttcccaacatatcggccgtcttaagcgctctcttgagaagggtgaggcagtgcttcttagctgctggagtaagactggtttgcttcgtgctcgcttacgcaacagccagccaatcatcatacattttggaattgtgatacggctagcgattcatattcaaacgaaaggctggcaaggctaagataaaatagaaaaaagcgaaacgcggcgcctccaatgtccttcccgcccttctcccgtttgactttccatgaacgataaatcaagttgaaaatcaatgtggctatcttgcactggcgaccgcaatcatggtacggccccagactagaagtgaatagcatgatctctgatgacacctgacctcagttcaagcagctttcgtcaagacaagctcgatctcctgatacgcattcctcgatcagctcgcaagaccctgcctggaagaaagaaatatacaatgccaacgaagaagtccatgaaagttcaacattatcatcgacgcaaactcgacgcaccttgtctcgtcactggctaccgtttaggtcttcttccagacgccgtagtccatcgcctgagacacagtcaaagtttggactgcacgtcgttcaccgaccgaagacaatcgcaccagtaaacattgtctttgtacatggtcttggtggtgatcgaatattgacatggtgcaagcatagggacaaaagactatactggccggaaaagtggcttaaacaggagcagagcattgggcgttgtcgcattctatcctttgggtatgatgccagctttggtatgggtgcggtcaagagcatctataggatctcagacttcgccaaaagccttttgcacgatatgaagtttggacaagatagcaatggaaatcctctaggactgggaaaagtgccaacagtttttgttgcacactctatgggtggccttgttgttaaggcagcgtaccttttgggacagaacgacgagacatacaaagaagttgtgcaatccatcggggcaattatttttctggcaacacctcaccgtggtgcggactcagctgcgacactcaataacctacttcaagccagtttttcatcttccaaaagctttatcgcagagcttcaacgtggctcccctgcccttgaagacatcaacgaacagtttaggcacattgcacccaaattgttgatcgcttcattctacgaaagtctagcgacgaggattgggatacactctaccatgatagtcattagagattctgcaacactgggatatcagcaggaaatttcaagggagctccatgcggatcaccatgaagtgtgcaaatactcgagtccgcaagatgcgaactacaccagtgttcgcaatacattggcctcatttattgcgcaactacaagcaaagggaatagaggttatcaatgatcttatggctgaggaatcgagaaagattgaaaagctgttgttggtcacacaaaaacatgaagaggaattcgagactttgcgttcttggtggctggaagggacttgaaatt

SEQ ID NO: 5111 - DNA, 3698 bp, Emericella nidulans
cttgacggccctgataccaatgggactgccctcaattcatctttactgtcaaagtacgaggactacttgtgtccagacggctttttcgacgagacaggccaatggcagtcaaatccaaccaaagccctagtagacggcactcccgactcggactatagcaagtacgaattaaacccgtacgccgagccaaccgacgaaggcgacaaaccctcgcctctaatgcgcgagattgaatcgatcctcgcttctctcctaacccagggtctgatgcgcgggtatctcacccaccggaacccgcgatttgctatccctggtgcgcgactgcgcggggctttgcccacagggttccctaacgtctggaagacgatctatgcccgggaatcggaggatactggcgttccgggctgggttcaaccgccgccgactacgacgatgggcgttgctgcggcgttggggggtgggggaagagtggtgaatctctctggtgtgcggcctgtcggagtccagtagcctattagttcgcttattcacgctactctatgcgcacaggttcgcaatcactttacctaacgggcgggacgctaatttgaaagcactatatgcttatctgtgctatggctccagcagtctcaccacccctctttgttcgatgctagaatgcgccgccgagtgcgcaggacagagatcagctagtcgatggacgagggcagcgacaatggtatattccattcataccgataaaaggcacaagggtttgtacctgattcgtgaccattaaaagaccagggcacgaacgtgcgcttggttacgagaacgggggacagtatgtgcctcttgagctcaccgaggggagatctcgattgtctgatcaggtgagattctttctatgaacaactattagattagaaaccatttcattcttgctcaacgctcgaccacaaccgagaaaattcatatcggatttatagacaaggcctgaattctcaaagtctaaactattgtaaacgaaccaagttttaatttcataatatccatcccaccaccacaagatagtccgttttaaatccagtaacaccaaaaggtctagtcctagctctttactcgaagtgttgcgcgtaccaactacgccttaacctcgataacgattctcccctctagccgaggagcaatgcctggagtccactgcggcgtgaagaggtcatcatttttgctgtcttcatccatggtcgaactgatacctgttctccgcatccagcggcgcgtcgcccatcgcgcaaggcgtaatcgacgttcttcctcctctgccgaccgcgccggcagcgttacgtagttggtaataggccgcggcgaaacaaggatatcagggtccgagtccgagtccgagtccatggaaacatctatatcaggttcctctccttcgtcaatagcagcctgcgcttgggcaaagcgaccgtagtagtaatgttgtttgcggctgagaggaggacgctggaggcgactggggactttttctgcatctggagatgagagcgccgagggtggtttaagaaaaccgtttgctgacatgcttttctgtacgtctgcccagtgtcgcgtcatgctcttgcttagattttgccatcggcccatgactttgaggctgaggaagtattggcgcattagtgtgctaatgagtgttccactctcttcgtcgactagctcttccacctccccgccttcggactgcacgaggagtgaggcgaatccgtccttgcctcgtgccatataacctcgcgtggctagtgtatagctctcttcgaactggatttcctttccgcctatcttggcccagttgatgcgcgagccgggaggcgcagatggattgaagctgaacgtgatgttggacacctgcgtgaagcggccttcaagagcaggaagctggctgacaccattctctaaagcatctaaaagggccttgccctttagacgaagtaggaccacagggtcttcaaatgggaagcagtttaggatgtcgcggaggcggaggacgcccggagggtatatttggtcgccacggatggtgccaccagccatcatagcgcaatcggcgcgataatagaaacgcataagatcgcaggcaaagttacccaagttggattccccagcacggacagtggaaaagcgcccatcaagcgggcgaacagtataaccgatgggcttatccaatttggccttaagactcgaagtgagcttagacacgagtgccatgctcgatggatcttcaggtatagatcggaccatgtctcgtcgaacaatgttgaagtcccatcctctgccgtccgttttccgaaatgcttcaatatagctcaactgtttgaaatccgtaccagagcggaggatatggacgccattgaggaatgcatgtccgtagaaatgatcatgtccgcctaatatgatatctatcatgccgtagggtatgctttcagctagcttatagtcattcggttcacgctggtgcgtaacggcaacgatcagctctgccccttgctcccgtagagatgggacgagctcgatcgcggtcttcgaagcggacttatagataagatcgggaggaagggagttgattgttcctagcctaagagacacaacaagttagcttctaggacatgctgtttaagtgtccggcgtaccattcacgctccccaaggccgatcactcccactttgattccgtttgaggacgttagcatgcaagttttctcgcaattggcaatcggcacatcttcacccaatgctgggtctaagacattggctaagagccaagggaactggcattgattgcgcaaatggcggaactgcgcgacaccgaaatcgagatcatggttctgttgattgtcagattatccgccgaggcttcgtcgagctggggcgcaacaacgcactcacccctacacaagctacattggtcccagctttgttcagaaaaggcaccatgtgctccctttttgtgaccgtgctctctagactgggattgaatgcgtcgccggagaagaaggtgagaggggtaggttgtccgtcgaagctaggatgtgatcgatagtggttgattacggactgaaatcgaggggcgccgcctactggttcagcagaacctggtctatggtattacatgctcaattagcccaagttcaaagaatatgtgacgacaagagagcaagaaggaggaaagattaggcacgtagcgtactcaacatgatagacgtcattgtagtggataaggcggaggtcgggattgccgctacgattagaagagtatgtcacggatgagccatcggctctgtcagaagacatgctggaagctaatgtagcgaagtctatttaccccggagggacggagttgaaggaaaagaagaccgactttgtttgggccctgaccgcgatcaagatgcgggacaagttgatgtaaggctcccaggcacacataatgccccgccaatcagggatgggattcgtggaggatcgacgagactactttagttggaatctgaagaaagctaccgcgaagtcaacgaaatacagtactaacctggcagacccggtaacgatgcgaaagaaaattcctattggaagtcgctgttgtacaactgagctgagaagatatgcaaagggagcgatgacccataatccgaaaaaccgtcagttcaactcaatgcgggaaaa

SEQ ID NO: 5112 - DNA, 2085 bp, Emericella nidulans
agactgtcagtcactagctcagcagcgtcgtgggtcatggaacgtacataatacagcatcaatgccgctcgcattctaacggtcaagatgcgattttcaaagtgcgtttcgctttaaatgaagctgccacatctcatggacgccgagttccgccgcatcctcgtatgccttcatctccggacagaatggttcgcttgttggctccaagagcttgcgaatgctcttgcccccatcagcgacgaagaatttggccagcgtagtgagcaggtccttatgctccgtcggtgcccacgtcacaaccttatggccggcgtcttttagcttctgcactgtctcattcagggcacgggtaacgggaggcgtgggcgtcactaatccatcgtggtgcaagacaccaattttcaatgtcttctttacctcaacgtcccgccaggggatgggaaggcactttggatcagtgagccaaggctgctggccgacgacggtgcgagcccagagaacgatctcctcgagtgtcttggccattggcccgttgacactgttgacggcctcttggcctgcgaggccggagcgggtctggaaattaggaaagcggccaaaggaagggcggatagtgaagatgcctgtgcaggcagcggggatgcggagggagccgcctatggtagtgggccccaatcagtactgatgtccatgtccgagcaagttcaagcttaccgatatctgtaccaacaccgattcggctgccgccgaaggcaatcagagcactttctccaccagacgagcctccggatgtgagcttgcggttacgtggattgactgtccggccgaagacattattcactgtctcggcgatcatcatcgctagaggattcattagcatcggcttagcatcgactcttggcagattttgctgcatacatacccgtgggaacattggttttgcaatataggactgcaccagcaccgagcagcagatcaaccagggtgctattgtacgtggcaggatcgtctaccagagaggtgaatcccacggtcgcatcaacgcctatcaggttgaaattgtccttgattgaaatggggagtccatggaagggaccctttgtcttgccggtttctctgtagtaggcatcaagctccttcgcttgggcaatagctctgtcaaagagaatttctgacaagcagtttgtctacagatgttagctctctacggtagctgaaaatgaacatagacttcgcaccaattgttgggctacagcagcagtcttgcagaatgtcctcgtcaccttctcccgcggtccatgaccctgaagccagacgatctaggattccctgcgcaggcgtcgaagtaatctccagctcgcgatcagtaaagaagccggagtccttaggaaagttggtcacatccagctggtcctctggtgggaagatctcagcggggatgacccattcaggaggaatagcgttctttaaggcctggcgctttttggcggcaaccgattcccacgacatggcggcaaccttgactgctcagtaaaaaaaccttgtttaggtgatattaccaagcagataagcacaacgagctggcttttgtatgcattggggactggatgcggggttctgcagccggataaggcggttcttgaagactgacatcattggctcaccgcaccgaggttatcagccaatatcaggatcttggagttgaaggttcatgtacgccctaatgcacgaccccaagtggacgtactgactcattgacaaagggatatgcaaccaatccactctccagagcttcgattccacgtggaaagagcgcagtggccagtacatgcgtaacatgtccttggtagtcgactgcactcggtaagctacatttggagttataaaagagagtaagaatccattttctacgtgccggtgacaggatcattcttgcaagcgacgccatgttccagctgggaagcaaccgcatgggtctcgacggaaaaaggaggatatgaccctagggagcctattccgtcacgatctttcattagacggagaccacaaaatgctctgtgctgattgtgtggaggctagcatgac

SEQ ID NO: 5113 - DNA, 3653 bp, Emericella nidulans
agaagcgcgggcttcttaacgggatccggtccttcgccatcgttgaatttgtcgattgcaatctattcgcattaggattagcagggaatcattcaactagctctccaacacgcttcatacctgaacattccattgcgatcgactcagcaatgcgatggcctcaaccggttcctggccagtcacagtggtatacgtctccaaagccgacctctggctgtcagagagctcggaaatatccggcccagatgaggacattattgtcaattcggtgtttattccataaaaaggcgaactggagtcaccaggtgttcattcagcaggtactccagttgtcagtaagaatgatcgttgtggcagcaacacaaagagattcagcagctcaggcttcaggagaccaataattgatacagatatagcacgatttctcctctgtagattgccttacagttggaaagtagctccggcgagctgtccagttcagactcaaagagctccgtcatcgctggctgaggtcacgttgcccgccgcctcagctccgaccgcccttgcactgcggccttcccctccccgcagactcgtcctcttgcagcgtcgccgtgcggcctcccgctgctctcccttcctccatcaatgacacgaggcgtccatcgcgttcttgatcgagtatgataatttacggctgctttatattgatttgagtgactcaatgtgttaagatctagcgaccgtatcggcaacgcccctcttcgtcccattggtgtcgtctagcccaaccacgacttgtcgcgccggtatatcctgcttactcacaacgccccgtcaatagaggaatgtggttttcctctgcatatcccctgctgcccgctgatatctcgtttcgaatcaatggacaactccctgcgttgacccgcctttgcttttggaaagatcatggcctccgtcgggaagcctagtttagaagacgcccgtcgtgggacggggtcgccgaagatgaaggcgcgaggtgcgttacttggccgttggagctgccggtcactcgagtgaaacgcggatcggacgcgaaatcccctcgtgcagacaaactgctgacgtgcttattaactctagaaaatgcaaaagataccctgtgccggaatgtaaccatctatggtcgatgtcgttatgaagataaaggtgcctcatgcctgtcgggactagaatttctggattacgtttgtctgactgtaatatacttttcaaggctgcgctttcaaccacgatccgcataagaactcgaaccaatcggacaagtgagcattccaatgagccgcaactcatatttgaagtgtgtcctggtcgttaacggagaactccggtagcgccagcaaaaagcgtttcaatgtcgactcgcccagcttcacgccgtccttactaccgtcgaacgggtcttccccaacgtctttaagctcctccctgaaaaagttctctacaatttctccgaaagccgcgaatgctgctcctttccaacccagaacagccgctttaagtaagtagacagcgtatgcgaattccagggtatgctgaccatataggatcaaacactagtaccccgggcgttcgacaggatgcagtggctcctgactggtctgttgccgaagcacaagaatttataccccagggctttgacccaactcacatggtatgtttttttgtattagctatctcagtcgcactttcctcgtgaggattttgcattttttttccccaatccgaatagccaaatgtcctcggcttctggtgaatacatttattcactacataatctacgttgccagtggagcctttggcgcaatcaaagactttacggtatcgatgcctctggaggtaattcgctaacaggttattcagtcacctcttcacggcaatggcaaccctggcgtggcctcggccaatgcctttgatcctttcgtttctactccgaatcctcttgctgcaccaggtgctgttggtcctgtccaggccaaccccttctctcacgatgccgcagctgctaccctcggtggggcctactacgccaatcaggccgggtttcaacagccagtgagtcgtttcaacatgtaccgcgatcggactaatgccctcttgctctaggttcaatatcacttatacgcacccattggcccgcacaatcagaacgcactggcgtaccagcgcaacgtccacgatctattcctcccaaatgactttagagaagagctacaaaagaaagcggctgccacgctacagacattacccagtatgtagcaggaacgttgccggaaaatacacgcactgatgtgatatagatactcaattacctgcccaggtggactacttccactccctcgtacctcttgatcttaaccaccagaaaaatgcggccatcttcggctatccgagttgggtctacaaggcacagtccaccaaagacgggagctattacgcgcttcggcggttagaaggtaacatcttcattctcaatcttaccttctgatcgcacgttgttgattggccctaggttttcgattaacaaatgaaaaggctatccgctctgtccaggcctggaaacgtatagctagtggtagtatggtgacaatccacgacgcattcacgagccgaagtttccaggacagctcattgattttcgtcactgattaccacccactctcaaaaacgctcgccgaacaacatttgagtgctggtggcccaaggtttcaagcccgccacaatgctcacgttcccgaacagatcctttggggttacattacccagattgccaacgctttgaaatgcatacatagtgctggtttggcagcaaggattatcgaccccagtaaaatcttgcttacggaaagaaatcgcatacggctcaatgcctgtgctattatggacgtggtgcagtacgatgctcagagatctgtcgccgatcttcagcgacaagacctagtgaatttcgggcaactcattcttaccttgggtgccaatcaaccgaacgtcatacacaatccttcgaaggccatggaacacttcactcgcgcgtacagtccgcagctcaagaacacagtgatgtggctgcttggcggaatgcagaaggatcaagagcgaaatattgacatattaataaacggcatttcttcacagttgatgtcgacttttgactcggctcttcatttggatgaccaactcacgtcagatttgggccgggaactcgagaacgggcgtcttgtccggcttttgacaaaactgaatttcatcaatgagcgcccagagcatgaacatgaccggcagtggtctgagaacggggagcggttttacctgaagatattccgggattacgtttttcatcaagtggacgcctcgggagacccggtggttgatctcggccacgtgctgacatgcctgaataagttggatgccggaaccgacgaaagaatcacgctagtcagccgtgacgagcagacttgttttgttgtcagctacaaagagctgaagaagggtctggaatcatcgttccaggcattgttgaggcctagccggaggcctcactaggtaggtttcctgtcttatgcagtggtctagacccttgtgcggaatcctgtggtatatatgttgagaattgcatgactcatgggtgt

SEQ ID NO: 5114 - DNA, 2905 bp, Emericella nidulans
  unsure (1)..(2905): unsure at all n locations
tcacttaaggttgtatggatctcgcgatgactatggctctcggaatgaataccattcgcaagacggttacagtctacagaactacggcaaatattcgcaaggcgaacacggccagcgtggtgatgaggacaggagttacgggtactaatcgcagagtctgaagctgcttatgtatttagaaagctgcttatggattgctgtagcgaataatctgctaggaacctatcaaactctaccattccttaacctgcccgggctttggctgctcaactcggataaccttgtcacaattcagtaggcgaaggggatccagagccagtttaagctgtacgaacaacattagcagccatggttgcgaaagaggaaagcagcttacccgtcgcatagcgtccaccgttgactcccccagttcatgcggaaggtagtctcgttttattaggccaacaccatgttccccagtcacagtgccttccatctcaacagctcgctttaccatgcggtggacaacaccctctgcggtctgcctttccgcatcattccacaaaatgattgctaaccaagtcagcactgccctgagtttttatggttaacttaccatggaaatttccatccccgacatggccacaaatgccagctagtagcccactctgcgtcatgtcttgctttgtagcttcaataatgtcaggaagcctgctcataggaactgccacatctgtcgtccatacatggtcctctggacctcgcctcatagccatgacactccagagagcctctttgcgagcactccagagagagcgcatctcctcatcacctcgcgcaaattcgaagcttttggcctgggatgaagatgcgagcttttgaactaatccgatttgctctttgacgccgtttggtgtcccggcgaacttgaagaagatcgtgggtgcttccttccattgcctggatgtggttccgctggcattgatgcatttcatttgcacatcatccagaatctcgacgcctgcaacggggattccttcctccacgactcgggtgacacacagagctgcgctatggactgaaggaaagcttgcaacagcaacactctggctcttgggcttaactgttagcttcaatgtggcttctgtgatcagccctagcgtgccctcgctaccaatgaacaaacgcgtcagatcgtagccggcgctcgattttcgcggacgctgcttcgtcttgatgatcgtcccgtccgcaagaacaacggtcatcgagagaacccagtctcgcatagttccgtacttataggcatttgttcccgaacagccggtgcccaccatgccacctatcatggcgccaggggcggagtccgaaggaaaaaaaaggccctccccagccaactcttcattcagttcctcccagccaagtgcgggttgcactacaccatcncgatcacttttgtgtaatgccaggatgcgattcatacgaccgaantcaatgcacaccccgcctctcgtgggagcaaagtgcccctctagacttgttccgcccgagtacggtgtcacgggtatgaggcgttgatggcataccttcatgatacgagaaacttcctccgtacttgacgggtaaagaacaaggaacggtttctcgccttccttggttttataggaggaccagtcggagcctgcatgcgaggttagatctgcatgctccgtagagacattctcctttcctataatctcaacaaaatccgcccacgcggcttgcaggtttgacggtgaaacatcgtgccgcggaggttctagttcatatagttttgttgtggaagtcttcgggagctccgcaggtctcattgatcctagccagtatgctccagtcgtaaagaatattagtgctagtgaagtcagcatacgactctcatatgcgtgccgacataccgaacaccatagctgcatagcgaccaccctgcgactgagtctggtattgggcataccgctcctgctctgcgcgctcacgccgcaaccgctgttgcgtactttcgtacaattgatttttgaacggctgcggcttctcgtccgcataatggtattgctttgaagtctggatatttctccgctgaagtagcaagtgcgttcgactgggttgttccaataccatcagcaacggccgtaaaatctgcatgcagctgagtcgtaccatgcagcggttctcgtccggtctatagactatacacctctgattaggattgtgcgtgattacgtgagatatcccagagttcagcggctggcttgttgtccgtccagcagcagagtatactacgggcatatacgggtatagtatgcggagctagcttcaatcacgtgagctcaactcctgcgcttcggcgaaataaatgtgccagccagtacatcatacgattcccaactcagagccatacttttaaccaacgaaatggcggccgaattcacctgtggccgttgcctgcaggctttacgaagaggcattctctcttccagatcgcctctacgagcaccttatgctgttagttcgaaacaggtacatgggtcgtccgcagccttgacgcgtggattggagtctcgcaggtcttcaagatacttgctggcgccaaaactagcctcattacctactgcagcaccgataatccagaaagcgacatctgcgacatcaaacgggcccaattcccgccctctcttgaaaccgaataacctattccacgacttcacccagtctccgtcgcctgaaattcgtcaacgtgcggccttcatcaaacagaacgctttctgtcctcatcccagtcaccagcagacccgagtacctgtatccccgcacgatccagaatcgcgcaaaagcctcacgaatgccagcctccccccgggctcattcgcattttgagtgtccagattgtggt

SEQ ID NO: 5115 - DNA, 1794 bp, Emericella nidulans
  unsure (1)..(1794): unsure at all n locations
cgttgttttaggatacgagatgtgacatacactgtctggcaagtaggaacttggaagggaacatgaccagcgattttctgtaccatttcctgaatcagactctggaaactgcactccgtagtaatttgaccgtcctgcggcagcatgttctgatctccaatcgctatcgtgtaaatatgtgtgtaatcaagcgtgaattgtgggtctgccaactgggctatactgccaattccaaggtctgagaccaatttaacaccacgcacgggttcgtccagttcatcaactataaacccactcctagagtgtatcaccttcttctgcagtccagcatggcggagatttctgactcgtaaaacgtcgctagcatgcaaatgctcggtttcaagactactagtcgaaggccttgagtacaatgattcctgaacacgaaggcttgaatctactgcaaagaccttgacgaaactcaagccgcagtccaaatgctgataatccatagctgtgggagtgatttctttgaagacaagtgtggagaagtgcgcgtcgatcgaaagagcctcaaaaatctctgtatggacggatgtggctgggacatgtagaatgaatggatcaagagcagntgctggatcacgcatatactcaggtggctcagagcaataaaaagctagcacaaagtgactgagcttagaaaacaacactaggtagaaatcttcggtaaagtctaatcagtatcaagcaaagaaaattctccaatggggtcggaattctcaccagcatttactgtcaatgaagccaactgtagcgtcgtgtcgtctgaatcgcgaaaatgacgccaggagagacgcgaagatagtgagagccctatatcatcatcgacgggaatcgaagctggtataacctcaaaccagacgagttgggaagtcgacttccattttctgccgacttttttggttgggtactcgaatggaaatcctatcagtgtttgtagcctcttcgtgacgggatatatgtcgactgggaatattagagcaaagaatcaaaaagtgagtgtgatgtaatatacctggtagcgcaacgcgtcttgataagtctgtatgtcaagacgggagtattcaaaggtgggaactgcaccccgaactggccatgataacgaaaggaaaggtcgaatatagcagtatggagatcctccggcttcaatagcctctagagagacggttagttgggtacacaagaggcaccgaccgtcataccgtggtctcgagaagagcaatgtactcttgggcaggcttatctttcatatcacgcggaatatgaagcaacaccctgtaataagggatgtcattacgcatgaccatcctataaaaagtaattagccctgctccaacatatgcatctaaaacataccgatgaaagtccatgacactgcatgggagcctcatcaagagcgccgccaaatagcatagagcgacagtatcgattaaacgaggccattgtacgagcttgctacccactctgaaggtctctgtctcagtgtcttcacgaccactggctggttgagaactgaaaaactccggctgagagtcatccccctcgccgtcatcggtaattttctttgcataagtctccaagcgaagagcccaaagatcgcgaacgagatcctagaatccatagatcagccatgttcttttctgacgggcattatgcatacctcgagctgtggcgggaggccatggttgttcaccaaagcgtggcattgcttccaaagaatntggtttatacatatagtgaaacagcgta

SEQ ID NO: 5116 - DNA, 2700 bp, Emericella nidulans
tcaggcgaggtttgcgtttggagtgcatgctgtcaaggttacggaggccgacgagggtgttgatgtggtcttttcggatggggttgcggaccggtttgatctcgtggttggggctgacggggtagggtctcgaatgaggaggatgatgcttggtgttggggagggcagcgaagagaacccggggcatcattctattggagtgtacgggggctattgcactattccgcaggaggttcaggagggcgaggagtataatgccactgcatttattgcaccaggaaatcgtggtatcatgatccggcggcatgatccgcacagggtacaggcatacgtgttctgcaacccgcgatcgtcagagcgcttgctgaactcgactagaggagacattgaggaggaaaagagagctctggcagaggtattccggaacgcaggttggaagtgtgaggaaatcttgcaagcgcttgttgcatccgacgatttttattgcgaacggatggggatcgtcagattgaacgcttggtctcgcggccgtattgcactggttggagatgcagcgtactgtccgtcggcaatgactggaatggggacaccgtgtgccttgaccggcgcgtacatccttgccggagaaattgggaggcattgcggagcaattgcctccacggagaacgtcacggctgcattggaggcgtacgaccggaaattcaggccctttgtggaccaggtccagaagggactgacagacacggataattatatggacaaattcccggcttcgccccttggtgtcagtgtgatctaccttgttttctggcttgcctcgctgctgagattggatatcattgcgcaatgggtcttgcgagaaaaaacaaatagctgggagctgccggagtaccccgagatggataccttgtgagcaagcaggaccagcccatgtacataaaaccttgtcgttcagtgagattcactttgcccatttatatcgtaatcggcaattgaagagagaagtctgaaccagtaaaaccaaagtcgaacaatccgtcgaaatctgaatcgaaattaatatccagggcctgcggagaaacaccatttgtccagagcccaaggtcactgtgtgtagtggcagcggtgaccgcgtccgccctggcctggagtatattacggcatgtagaaaggctctcatgcatggctctggaaatagtctccgttgctggtgagtcatccagacgagcctctgcctgggcgagcatcatactaacccatacataggtcttcacattcatgtccccgtgtaccaccctatcctttgcgtactgcacaaggcgacgcgcatctcgcaagagtggttcttggcgagctcgattacgtctctttgcgaagatggaggcatcttcttcggcatctggagccaattccaggaaaatgaccaacgcgccccgggtaataaggtcgcgaaacatgcctcccccagtgacgagaagctggctgtaaacactgtcttccagaagagtaaccaagtccagggctgcttccaagcaggcatgccgcgaatggctgtacagcgggttcgatctggctcggatcgcataacgataatgaaggcacagcgtaaaacgacggagaaggtgactacagaaactagacgtgaaggtgctggaaccacaggcagtctggtttatgacacgagccgcttcaaagcaagctgatgccagctggcccccaagctctaggacctgatcatatgaaggctcttcttgcatgctgttgatcaccttcgttacccgcaaacggacagaaagggagcttgccagaacaccctgaaggctgggctgaccatcagcagtcgcagcatccgaatcagccatctcgtcaggtggcggcctggttgtgtagtctgcgtcggttatcatgggcggcatgcctgagtctattgccgcctgtacatttagctccatgatcgtataccacagccgtcttctcatatgtttctgccgtgagtccatatggccgagttgatcggggtcctgatgcagtcccatctgcatggccatcctcaacaaagagccggctgagatccagacgagatcggagcccacctgattgacctgacgggagagtgccaagaggcaatggacctggacagctttcagcgagagacgatctttctccagcggtgcagaaagccacgtctgggcgatgtcaatccatattcgagcgtaagctgccacctcgctgcgcacactggccttgctatgtaatggccctgcaacggtcatgatcagaagaattagtaagagaaacgagcggtctgcggattcgccgctcgccaagcttgtcctatactcttccatgaaagaatagtagtccaagataccatagcaggattcaaacgtggtaaagtacaactctaccaatgcgtccatgactcctcgatctggaagagaggtgtacagatcaggagggaggcatctccggctgggacgctgctgcttgatcatttgagccagtctcttgcactcgaaaacggtctcggccgcctcgtcacttgaagcaccattgacgagtgatgaaaatgcctgaaagcaatcaccaatgggctcgaaccaggccagaccctccatcttgactcgtcaacgaagacctttgccaccgggccagaaagacataccagcgagaaagtattcatccaatgtccatgtccaa

SEQ ID NO: 5117 - DNA, 883 bp, Emericella nidulans
aagcaaatcgacagcaaggggatagaatgtgtctatgtgcttgtcgaagccctcggcgggaaagtttgtgtaaccttcgataacgtccacaacaacagggcgccaagccactatgttacgatgctgtgagtcttcatcaagtcgaacgaacccgctaatgatgtcgacgcagaggctggaatgaaaagaaaaagtattagcgaacgtgtgcctccacaaatgctgcccaaatacttacggaatcaaagccgcttctgtttcactacggctgctcttcctctcttcgcgctcgtcatggtacatcctgaacaaaatgtggacgtaagtagcagcacttccactctcctgtttgagaagattgggcggcgacttcatgaatccttgccgccaaagttgcattcgcaactctttgtcttcgttgaactttttcgcgaactgatagctcttcttcagcagacccataagccgtaaaagctcgtggctgggtatttgtgcgtaaaccttatcgttggagaataattcatggactgtctcaatcatgagcagctgaagtacacaacttgtgataatacgattgaaataacgacgacgtgcggcagtgactgcagccggttgctgctgggtatctgattgtggcctgtagtcttccaactcagtatttgaagctgctggcatatcgccgtcctcgtgctcggctgtcgtgtcttgtgtcccattgagcttggggggttcagttgaggtttcttgagctggcgatgactcggttgggtcctgcaccgtatcatgggtgtctgctaactgtccatttgcagtcggagcagagggtgtctgtagtgtcacagtcgccatagttgttgcagccgtgaacagttcatatgcagta

SEQ ID NO: 5118 - DNA, 5216 bp, Emericella nidulans
ataaccctactaaagggatcacactgcggccgggaggctggcgccagataaaaaacccgcagtttccccatccccttggcgaggctggggcgactttgtacctgcgagaaatatccgacctgcagtaacctaagtgagtcagggcagagtcagggcagcattgttcgctctatgttcaacagttggcttcatcctttccgagtattacgaagactccttatccgcagcaagacgaagtcgatgtttcctccgcacaaccctggaaactctaaccttatgtcggtgagagcctggtttcgtctgcgttcgtccggagtaaatgaccgccagaagtttgctataaaccgctctccagcggccaaccagcggtgcgaagtaggagtacacgcggttgaacttgtgaatcttccaatacagttcgtcggtgagcaaattcaacgtgagcaacgcacaagcaagggcagagctccggtgtgacttctccgaattcgatgcggaagacacggcaaggagctctgtttcgctaatcgcctaattgggcatcaatcaacccctcttgtgcagtggactgagggctatagtagtgtgatcccgaggcacactaacgagcagcgacttctcggccgctgtaacttgcggttccggctgggctcttttgaccttgagtccagttccatggctgccccttttattccaactttgctgatccagtgggtgacagtccaaaattctggcgttaaccacggatagtttcgttctattagtatctcttcctgagttgccaaactcgttgccacgagcgtttcttgtgagggtgactaagcatccgccccacctcacgggaataaggaaccaagtggcgccagtgtcgagctaagctaaaatttctcgtgctggagtttgaagcttccagagctcaaaatgcctgggagctggggagctgcgtgggtgaggaggggaagggaggggagagaggagagagggggaggggaagggacaccgttgcacttggtgttcgaactctttttagccggtaaacaactcaaaatcacagagtgagataacaccatcgtccatctgcgttctctgctgctgtccatcataggttcatgtcgctcgcgatatgcaaggtcgtagctccaactttctcagctgatctacggaggcgtgcaccaaaagtttttgcgcgacgctagtaatttaatgcgccgacgtaacaagcttacatacaaattactatagcaacatgttttttgacccacaactaactatatccgcataaaccccgaaatcaaaaacaagagaaatgaagctattcaggggcctctattggctgtagagcgaggtctacacgtggtgatagtcgccctttaatccgcctgcctgcccaactacgcgtattgtgatcctcacggccctccttgtatttattacccccttctagctcgataacaatctgaatatgacgaattagacgctcaatccagtgttgtatagtctcctgtgggagatccgcccaagcctgcctctattctgcttctcctgtcttcttatcgcggggcgcaccgcgggatgttgtacgcttcttcatccaagcccagcacggctcaattgcgttgagatctggtgaattgccaggccagtcaaggatcttttgcacatcttctgctttatagacatgctgctggattcagtgacagtgggcaggcgcgctatcctctaaaacaatagtatttaggcgctcaatcatgcattcttttgcaaatggaataagaagaggtttaaggacttcctaggcagtaaaataagtaattagcacgtgcttaactactctataatagagaattatagagataagggaacaaactgtttgatatctccaccaatcaatcccccctttacctttacgtataagcttaccgttcttctcgttccaattccatttaggaacacggccgcgatttgggcgtaaatgaacacgagaaagacctgtagccaactcccattcctcccggcatagaggttccagctcacgattcatggcttcaatctctatatctgcctgcttccgcatggcagcagtctccggcttgtagatatgtaaagggcccttcttattatatgagaagcaaccccataccatgaagtcagagcaggccttccagcgcctccgtacacaattccttgtatgtgaatctttcacagtcctccacactcgtattgctccgcggcggtggccaagaataacaccagtctcgtcggtaaagatcacgcgtttccagtcttctaatgtccaatgttggtgggcaaggcagaattcaagacgcctaagacaagcagcttcagtcagaccaggcttccaggaaggttttgcaataacaaagccatgagaatgaaggatacaaagaacagaagaatgggagataccagcttcataagcaagaatttctgataatttctcgcgccctgctcgatctgcagttactgaagtaataacagtattctgagtagcttcagtaatctcaacaggccggccagatcgctttctatcctcaacaaattcaagctgcacgcgcaggcttacttccggccggtagccacgatctctgcctttctttacgatgctctggaccgtacgaggagagagattcaaagattttgagatcttctctgtactaaatccgatagctgataaagtaagaacttggacacggagttctactggatgaaagccgccgcgaggcatcatgaagctggtgttgaggaaggagagcaactgtggcaggataagttgaattagtataaaaagcgtgctaagcgtgctaaaacaccaaattgatcagtcaaatagaatatatgagcagtgtgaatagcttcaagaggctgcaggcagctgaaacaatgaagaagcaatatatgtcaaaatattaatgtatgtatggtagtggggttgccatagaaattgttatgtagggcgtaacagtattacatggcgtgacactagcgtcgcgcaaaaacttttggtgcacgcctccgtagccctttgacaactttcgccctgcggctccggcaaggttaggccagaattaataacagcgtagcctcgtctgtcactgagaaaagcaacagcatgtgactatctcgttcaagactctgctaggatgagaagcctagctgactgcggctcctttatttctccacagagttgccgccagaggactgtgcaaattgggaagcccagcttctgaggagaactctggcttggccaccataccattcgaaattatctaaattactcttgaggcatccttctgtcagtaaggtaggctcataccccgcatggccggttgtcataacggacagccttatttaatggacgtgcactgcagccgctccagatgcttggagctctctctgggtctgcatcttgacgtcatgttgtttaacagctcatgaatacgtataattgtatttataaatcattgttagtctttcggtaaccatggcatatggaccaagcagctgggaataatggtggagcgacggccatgagctgcctgagagcctgcaagtaccgggcattctgctgccagtttagaaccctatattttcgagaccaatacccatagtccatcggctttacagatatggtagcttctgctgacgggtacaacttgcagggtgtacaggggctattagaagcaaacaagataaatgactcgcgtggccagtaataattcggctatcccaaacttgacagaattgagaatgcaagaaataaattgaccttgaaacagtgtaacgtgtcattgataagcatatacgtctctagcataaccgaggtcgccaattgtctttattcaagcagttgatttccattgtaatcggacagtcttcatctctagagcaatggaagcgactgtaaacagcgctgacactttctcctctgaagttattgcaaggagaaaatgctttctagttctaatctttcttacattatataataactgtataccttcggccttgagataaaccccgggcttggatgatttgaaatctacctatggtccgttttctgggacctttataacccagcataattaattgcaaatgatttatccattcgaactggcttttctcaaacagttaacctgtgttcgcttcaattagttcataaaaatcaagatggttgaaaaagcactcgctcctggaatctcacaaccaagcggtcttgagtccgcccactcgagcgaagatgatcagtacttaccttcgagtacgaggctaagcgtaaacgccaatatattgatgttagcagtgtttcgtgtagccttggacaatacggtacgtggcccataatcatccttttctattaaatgaatgaattcccactaagagttccggcagatcatggccgttgctatcaccaagatcacagatcagttccatgcgctcaatgacgtgggttggtacgcctcatcttatcttcttaccacttgctatatgcaactcctgccctaatcgtttgttagttgagccaaggttctgaaccaagtgtttactagcaattcaactactgtacgggaaatcttataccctcttcaatatcaaatgggtctttctcacagccctgttaatattcgagcttggttctctgatttgcggtgctgcaccgacttcaaccgtgctgattgtcggttgtgcagttgcgggcctaggaagtgctgggattgtcactggagctcttgttacgttggctcacactgtaccactggaaaagagacctatattttttggcctcattggatggatgtatggaatttctactgttgttgtcccactagtatgtcagaagataagagcctcctttggggcgtttccgcacgcagacctctgctgacatttaggctcttgctagttgggtggcgcattcacagacacgcgacctggtgctggtgtttgtatatcagcttacctatcggatctgtgaccactgccggcctcttgacgatgctcaagttgccccagcggtctcctccccagcagtactccttggtgcatacagtgagggcacgcgacccgctgggaaccatgatctttgtgccagcagaatatctgtcttctcctgcctctccattgcagtggtgtcaactctccgtggttaaaagcctggatcatcaccctctattctctgccgggtgtgtgcttttaacgtc

SEQ ID NO: 5119 - DNA, 3716 bp, Emericella nidulans
tttaagttgactgacggatctgctcccaaggttgagagcacacacactagaagatcggccgtcgcgactcatgtccagatgtttccgctactattgactctagcaccaacatcggctaggttacgaacctttaaaaagggttcgatggtcccaatcaacttccaaatttctcctgtgcctgaatccaatgctgcatggttgcctttccgatttgtagggattctatatgcaaccctctatgttcttgatttgaaatcagtcaaacctagcctccgttccctgttttcaattgacggggtttccccgcatgcttggtttggcgctggtgttccgtgttcccctggttcgcgattaaagagacgttggtattcgtcgtgtgctcctttgtgctaccggccaaagagggcggcgcgactcgcattggatcccagaattcgggttacctccggtttctgtttgttgcagctgcattgcgtaacatgcgccctagattcgtgcaggcgtgtgtgtgtggtgtgctccctgttttcaccagctgtttgacggcggtcttggtgttcggttgttgctcgatgcagtccccgagacctgaactttggacccgttgacagcgagtctgtattcatgcttacaaattggatgacgctgacgaagactagagcttggaactaggtagttcggttgtttgagtgaacgcccattctttgggctctgtgctaggccgattcaataaacatcccgcgccgttttccggctcggggtggtggtttaaactcgagaggtgcatcaacattaccaccgccatttcgcagagtatcccgtcacgtgtgcgtaagtgcataaagacggtatcatggtcccgtcaggaagaaagccctgatgggcatccgtaccgggtcgttaccattgggaattgacgcggctgcggttcgatgcgatctcaattcaaaaccctgtttgcagctttttttctcgcaggggaatgaagcgatgcgctgtaatctgcattcggtccacgtccagttgatgctggggaaaaagcaattcgaaaccgacacggcgggtcgattgtttctttagacttcaccgcccaggcacagaggtaaattttggtcgcggagggccaacctagaccgttgggtctgccagctcaatgttcttaaagggaaagaaccctgatatgagagccgacaagcagtgcacgatggcatgaagtgatctaccgtgctgtatgaatcccttgatgcggcgactgactcgggttagcactgaaacaaactatcatcgagattagacacggagtatggtctgaatcatgtagaagcaagtcattcgttcccatctttggttcaagcatcgcaacatcttctggactctggtcaactcaaatacattcatagcccatacatgctctataaccaacacagtctgaaggaaaaaaaaaaagaaaaggagaaatcataagcgccgagtagactctccacgagttgagatggtacattacagaacaataaacggccacttcggcctagaagcaaaaaagtaaacggggaaagtatagcggttgttggtcagtctgttcaccatcaaggcgaaccagggttcattttgcgggattccggggctattcaacaacatctgtgatggtcaacagtccccgagtcagtactgttgtgatgactcgtcgacgaccgagcggaatggtgctgtttccctgtcgagccttgccccgagcgccacaatgtatctgttgtacatggtgtaagcgccctgtggatcattggctatcggaggaatgggtttgagaggtttcccatcagcgtcgtagagttgataggctggattagttggcggaggcctgccgtcgtgctggtcggaatcgggcgtgggatctagggaatcatctatttgtttgttctgattaacggcagcccttgcgccggcagacccagagtcggcagtctcacaaggatgtgcatcgctttctggatggggagataatgacagcgacgtaggccgttcatctggttcgggagtgtagtagctcatgtctgaaggggtcgctgctccacagttaaccacgcggaagggaccaagccatcgtgaggacatacatggctcgggactggctccactgtcgcccgacggttcgacggggcgagactcattgtcgatattcgttccgtacctgcggacgaaacgcgcaatgcgttttgtatcgaccttttggccagccactcggaagacggtctgtttgcctatggcggccctcttctgctgtttacggtacatgatcctgacctccttggctttgatattcttgcggatattccaggaggacagccggtctttgtattgcttttccctaccgaacgttagacatgatctgagcatttgaagcattcaaagcagttgaagcatttgaaagcgttcgagaacatttgatgacatttgatgacattcgtgatgaaagaggaggtaaagcaagacgggtatagtattgaggtagcaaacaagccaagctgggaaactggggagcagaggggaggggcaggaaaccaaagaagggaggacagacgatgccgtgaaattatggtctcgctccatgatgtttttgacatctttgagcttgagctgatcatttcgatagagttgttcaatgaatggtcggtacttgttccagtcttcagacttgcgaggcttaaagagtctgggcgtggcgggcgaggaggaagaagcaggagtgggagtggacaaactggagggagtgaaggaaccttccatcatgaagaacggctgtcagacgatgatggactcctcatagtctggatagcgaggttgcctcagatgagcagtagtgagccgggacgattggggatggaagtgcgaaaagtaccaaggtgggggggaagagcgagggagaagagactgggattgcagaggcagaggcagagacagagacaagagctcttatgcggtcgactggtgaaagagcgcaagtccaggcgtgaggtggtcagagcagcagcagcagcagcagcaatcagtccggctaggctggagagttgggagagacgaccgtcgtagtagtagcagtaacagcagcagtgcagcagtgcagcagagtggtgggaaacaaggccaaaacagggccgacagtcgacagtcgactgcgacagtcgctggtcggaactgtttaatatggatggtaaccgcagtcaaccataggcattggcctagttgatatttaatggtacattgaacccatcgtcataataatagcagctatgcatgcgtcctttctctttcgatcgcgaggcctccaggattcaggactcaaggactccaggtactttacaggcaggcgcgcagaccaaaagtactccgcggccagccctcgcgggtgcgcacgcgggtgggcccagcgctgccctttggggcgacctgcttgctggccattccacccatgcttccccgggccaatcatgcgttacgggggaggggcccgtgtacttttgtcgtacttcttattattgttcgaacaatgagggcgataataacgctgacgtgatgggctgaacctgagcagggacctgatggcgagggaactgctgccccgagtcctctgggcgtcactgaacggcaatgccagtgctgaactagcgtggctcgagggtacctgtcaacagtgaaactgcgttccagcaggtctctgt

SEQ ID NO: 5120 - DNA, 3855 bp, Emericella nidulans
  unsure (1)..(3855): unsure at all n locations
gagtagtgaaaaatgtataaaggccacaatctattctgtgcattgtggactgcttggcagtttcaaggaagaattttggtctggaaggggatgcgtagatgggagcatcatcagattacgaatgcgtccatgcatatggatcacgatccacctgggatggattccaattaggcccctatagtgggattcgagcatggacaggtgttccctgcagcaaactattgcacacgcggtggatctgtgttaaggaactcatgactaaaccctctgaacgaaccccgtgtgggcttattcaaaacaaaagctgatgaacggtataggcgcgcctattgataaatgctcctaacatgacacggctggctagctgcgtaataaacaaactagtggcaacccccagtccggatattccgggcgcattactggccgcgtatcgcaaaagaagtgtgtcttagtctgcgcttgggttgactaattgcatcagagactggttcgtccgcgtttgcagtagaagaaaagatatggtaatgtccacggggtgcggtttcgttgggaatatggcaatcaccttgacgacgtgacttttgacgacgtgacttgtgactcggctaaataatggcctagcatctacctctagcacatacgatcagtcgtgtctatcgtagcgatatggatggtgaaaactgcctccaaaggcgctatgccatgccaatttttgagccgtctggagcaccgaaaaagtgcggctaagttccggtaaagcatagttataatgagtggctgtgctatttcttgtgaagattaatctgtctacatgactagcaagtctacctgctaccctctagaattgtctgccaacgtaggtaattttttgagtgcgcctgcagcggtcatacaccagggttcagctcaagcgaatacatgaggcctggaagaagaagggtcatcgagagacacctcttatgggtagagcacaataaggttcaggctactagctcagtctgataatatcatgcatcccctgagactttgtatcggacccgaaaaacaaacttggtaatacactatcaagatttctacagccatgtgccaccacaggctggaagtatgaagctgtcaagcgtcgtacatttccacgcaaggcctagagatcaagaaaccccttccattaatgcaactaattttcgacctttgagctccgcctcgtggcacctgccagaggacgaactaatatctagcagcagacctagggagtcggagaggatggctagctgtagtttataaagcaagacatctagcatctccttccggagcaggcacaccaatcgtggtagtaatagtggtgacaaaaactggcttgacgctgctcgcctgctcaggtgcagcagtagtaatggcggtggccggaacaggcggatggtccaaggtcacagggtgggagtagtctgagcaccaaccaatcgttttagggacaattccaggcttcgtgtacacggaagaagtggcagtagtggtggatgatagactgggagacgatggggcgtgatgggaatgaccatggtgatgcgggctggatggaatgctggatgcagtagggcttaccgtgacatagacggtggagaccgcggtcgtggcgctgcacgtggtgtccgagggtacgctgtcgacacagtgactgccgttcagaggattactgactgtgaagcgttctccctgggcatagataatatagacattggtcccgttgatcgcgctgagctggtatccccattcaggattggtatcacacgggatctgcacagtgtgggattcatccgcagaaggtacatcgagggccagagcaatataagacggaggccatgagacaaagttccagagatagagactgaagtatgaggggtctgtgtcgaccgtggtccatttcacagtgatagtggatccggcagcaaaagtcgaattagccgtcggctcggtgatgctgatggcggccgccaaagaatcaaaaagtattgcaaagaccgtaaagcagatactggaacgcatcttgatcaaagatatgaatgaatgactaggtgattggtgataatgggaagggacagtgaatgagcgactggggtaagttgagatgccgatcaagatcagcacacaccgtgcatgtgcggtaaatttataacattataaagggttcacccaacattcacttctccggaaattatcgctccgcaagaaccagctaattggtcgcgttccagatatcaattgggctagtgacttgggcctttgcgaggaaccaataagtggaactcattggctgtgccttacgccaagtggctatgggctgcggtctagtaaactgatagtgagccagctgaagccgtaagccgtactatcctgacagtcttcgcaaatgaatctgtaagactcgaaagaaactccgataggtataaaattgctgaatagagttcgccatagtctagaggtaggaggaaacagaagaagcttacctcttcgccgaataacttctcttctgataagcctactcattgaattagctatcgtcccgtaaatctgcttcaggggctttacggtcagtccaagtgacgctgtagtggtctccgctttgcatagcttatgagattttcgagtatgtgtcgctgatgccttctaaccgcagaacttttggatgaaattgtaagagtccgtgtcgggtaagcatagtccaactgggtcagcaggccgactatgctcagaccgtgcccgaattgctcctataaagcttagttagttcgtttgtgacagaaatagaacattttacgagtaagagttttccccaaactgaacgctccctttgtgttatgcagttgcataatgtgactgttaggaataatccacagctcgcttttgccatatgcttcataggaaagagatgtatgcaggtctatcagtctcttctgcgttctctgagggtaggtgtaacaagccagcaagagggcgatctcttctggcatatcaaaggcactttggcactaatggtgagttntaccaatgagcatagttctataattttactggcactggtattgtgacagccggatgacaactcacctcacgagtcaacatccagcacctcgtttgacggcaatatcgtttatatatatcggatcgtataaggcgtcatatatggcatatctagatccctttagaaagtccttgaagctataaattgaatacacacatccataccaagaatgttgaaaccttcgatatgtttcgtaaataattgaccctagtaagcgccgcgtcagctcgcgcaataattcatcatatgtatatcgttgtagttctagtttattatttcaagagataatcaaggttgtcttgtgaatatcctctactaactacgttatactacaagaattgactatcaggttatatccagatctgcgagtatgtgtccgtggatatgtggagctggatagcacgtgcgttgtcgcagccgtcgactgtctacttctttatagggaagccatcatgtttggcagaatagcaaatataccattagctttagctacagcacaagaagaatcagaaggaattcgattcatggagcaattgcaacacgatcggtccctatcgaattctaaaagcagccaatgtagagaaaggataccaagcagtttcgactcattcagtgatctctacagcagctccaatattcctttacaccatgttagtaggaatcttgaagaactataggctgtttatattcaagtgcctacccaatggttaaaccaatatggatactgcggctgctttagtgattcgaaggctttccaatagtatgggtgtacttaccca

SEQ ID NO: 5121 - DNA, 3715 bp, Emericella nidulans
agacgacactcgagcctggggtccaccatacgcaaaatacgcaaacgactcaaaagatggccctggggagagcgcctattatttagcggtatgccagattcagtgggaatggttatcgttgcacgccattaacccgtaagcaggtcaaccggaacaagaagtcgattggtctctcgttcgcccacaagtccggcgtcgatattctccacaaactcgtcaaggagtgcgatgtcctagtagagaattatctccctggaagcctcaagaagtataacatggactatgagaccttacgggaaatcaatccgagcctgatctacgcgagtattacagggtacggccagaccgggccatacagcaaccgcgctgggtacgatgtgatggtggaagctgagatgggattgatgcacatcactggaagcagaggaggtgaccccgtcaaggtcggagtggccgtcacagatttgacaacggggctatacacatccaatgccatcatggctgctttgcttgcccgagtaagaacagggaagggacaacacattgacgcatgtctcagcgattgccaagttgcaacattatccaacattgcgagttctgctctgatcagtggacagaaggattcaggacggtggggtactgagcatcgtatgtgccgaatccattgccatgttcggttctcaggcacgctgacgtttttcaagcatccattgttccgtaccggagttaccaaaccctcgacggggatattctctttggcggcggtaacgacagacttttcggtgtcctgtgcgatcggctagggcaccccgagtggaaggaggacccccgatttctaaccaacagagaccgcgtaaagcaccgagccgtgatcgacggcttgatcgaagactgtgtcaagcaaaagaccacgcaacagtggttggagatcatggaaggcagtggaatgccctatgcagctgtcaatgacattcaggggacgttgaaccacgagcacggtaagtctcctagaagaagtcttgtcaacctattttcctaacaaaatcactgcacagtccgagcccgcggaatggtcaccgagattgatcatccagcatgtgggcctgtcaagttagtaaacacaccgatcaaatattcccatgcaacccctggcgtgcgcactcctcctcctactctcggacaacacaccgatgaggtcctcggagaactccttcaatatggcgagaaacagatttcccaattgaaacaagacggcgttgtctcatagaagagatataaagactggatgtaccaagcatttagccaaagcggagaccccatgtgatgagatacagaggtcgttttttaactcgtctgtttgatactgggttgttagtagctgcaaagcatgacggtaaatagagtagcaagctccccagccaatatagtagagtcatcactttcttaaatagcagttaccttcatatgcaatgtctgcagctgcaagaaactcgcatcgaaagcagttttttttcccactggcaaggtttcacatcacgtgatgtaggtgtataaatctttgtccatcaagcttgatgctgtccacatgtaaacgcccagagacggcaagaacgatacgctttctatgaagcctatttgctgacagacaaacagagctcacagagagctctacagctttctttggggggcatgttccaacacaatggggtttgttcatccctcgcttctatagaagccgggccacctacccacggatctgggacgaccagcattgctcgctcaccgtcacattccggtccggcaacctcatacagttcttcaaccaccgcaaatatttgaacctctagtcgctctggtacaatctccaccagggttcatattccaaagctttcggctgccacgactgagctccttgcgcggatcgccggtaatatcaatggaacacagcaaaaagggctgcagagagatgatccaacaactgtcaccttgagcccctcgcctttgagctcgaacagcgacattcagaatacggcctctcggcgtgcaggcaagatgaaggtttcttcaactatcatcgagcttccaacgtttcctttcgtataccctactagggtggagactcccgttgttcctcctaggcctgcttgtatgcctttaccagcctctaacgacattaatgggacgacatcaaagtctgacagcttagtcaatatcgctcctaagccaacagaaccacgtacaacgtcaacgtcagcaacagctgtcccgcgagtgccagtccagacccagctacctttagaccagccaccagcttccaacgatgtttgtgaaatctcagcaaggcctcataacttggcgaatattgcgcccaagccagcagcgccgcatacatcgtcaataccagcattagtggtcccacatgagcaagtccatacacgaccaccatcagaacatcagtcaccgtcgtctagccgcatcaatgggactttagcgaaccaaggctcggtcaatattgctcctaagccagcagtattatatccaagactgacgacactgccgggtggcctatcaggccaaacacagttatcgtcagatccaccaccatctgagagcatccgtgggcctttaacggaacctaaagacttggtcaatgctgctcctgagccacttgtaacaaatctggcaccaatttcaatagccgtttctggagcaactgccggggtacaaagaccgccagaacaccagctatctccgcctccaccaatagcacgagcacccacaattctaaaggttcctaatctattcttattaaagtcctcgacggcagtaccagtcaagaccacatctacagtccggcaacggcgtgactcatcaaatagaaagagtggtccgaagaagcgcaaacgtggtaatgacagtgatagcgaagatatcatccgagccgttgactctagctcagacgagtcggatgtcacaccgactgcgacgcagacaacgtccggtcgacaagtgaaaaggccgtcattatatgtgcctccacctcttatcccaagtcttcccagggagggcagtagccttgcagggacctctgacagaccccaaacatccagatcgcgcaagcctgtccctcgaaaactgaaaagcacaaatattcgatgttgtgtttgcgaccgcagtcatagtccaacgagcaatactatcgtgttctgcgatagatgcaaccgcgcatggcatcagcattgccatgacccgcccattcagagcgaagtagttgcaatcagagagaaggaatggctctgtcgggaatgcaagcccgcaaatattaccatactccatccgacagtcgttaggagcaatccaagtcttatctccaagcctccagctcaccctcctttgacaatacctaagactgaagtaggaggagagcgcttttctacagattgccgccggcggttcttgtcaactctatcgcatgccgcgctcgttgagcttcttctcaccatatcgaacaaccatccgacagtgcctatgtttcctgagaatatggaatcgttgccatcttccaattttgcagcgtcgcaggccattgtaactggagccgcagctacctctacttcattacctactcatgcgaataatgtcgcgtccgttgttttggcaaacaatatcgatgaacagactcctgagtttgcttcggggcgtcgtagtggttaca

SEQ ID NO: 5122 - DNA, 3405 bp, Emericella nidulans
gtacacatcattcacttatagaccctcgccagcctcaaagctatccaaccaacccccaacaaaccttattatctctttctgcaccgccacgatctcctccggcacttccactccctcgctctcgtttgctccctcaggcaacccgttttgatcccaatgatgcaccgcccctcgaatcccgtcccagacatgttcaggctctatatcaataaggataaagggctcttcatcagtcgattcgcgtcctggcagtccctccgcatgaggcgtcgcatcacgccacgggtccgccgtgcccccaataatcgccacgcgagggtaactgaaattaaacccaccgtgctgattgataagcgtcacgttaggcgggaagggtatcttgtaagaggatgcgcagaaagatgaggtgtagttcaggtcgataagacgcgagatcaagggttttatgttggggggaacgctggatccgggcatgaagtagccccattctgtgcagacctggtaattccagcttgtccctgatgatttgggaagggatgtcccgttgtcattgtcgtcttcggcagactcggactcagcggacgacgaagaagaactgatatacccgatagaattgcggaaagaagagagcagcgtcgtattcgacgcattgtacccggccgcctttactaagcccggtaaaagagcagtggcattgtttgcggggtacagaggctcagtgctggtgatattgtcacagtagtgtctgaactcatagcttccgacgctaggatcccagttcctagactggaaactgcccagcggtgtcgagagcatgttcacgaaatccctgttgtcgatagccgggttcacgccaaatgccgactgcagctgcgcatgtagtgtcctgttgccgggatggtctatcaggatccgatcgataagatcggtgagggtctggatcgactcgatacagtctcgaggcccgtagttccggattggctcgaaatatttccagtagtcgataatggcggccgtgacgcagacgacgacactgcgccgtggaagatggacgggtacaacttgcgcatgaacgccacctgtgcgccggcgtacgatcccccatatgcgatccacggcgtgttcggcgccgtcagatcgtacgcctccagcccagggaaaatgacatgctttgcaaagtaggcgtagtcggcaagactttgctctgtcgacaagaagcgcagctcatccaccgtcacgtccgccccaggaaacgggtagctctctccgtagtaccggtgctcgaggatcacaccgagcccattgtacgcctcggccagctgagtgacgattccttgggagagaaactcgaaccggtcctcaccatctgtctcgccggcggcgataacgaagacggggccgcccggttggtagtaggtgctgtcgaaccagtagcgtaaattgaacgtgccgttggagtgcggcgcatagcgagtttcgttatgaaaatggtcgatggggacggagaagttgtatgcctggtatgtggcagcgagagagacccctgcgaagagggggagcagtgagaggagcatggcggattggggttggagaaggggtagcactgagaggggaaaagcggcttttatataaaaagatgcattagtcaagggatcggcgttgcttgtgttacatcgcttggcagataatcgctttaggcgtgcaagcgataagactaggatatcagggatggtcacgagttagggcttgggctactacgcagtgtaagcagcctttaacacgtacctgcattccaaagactcatataataaaaagacgatgaatagactgctgaaatgatctatacctagtgagatgtagcgaagctaatcatgtttaatttattttctattttttattatctctagcatttttatatccagcatacatcaacaaagcaatatatacaagatagcaatatccttcctagatattgctatctaagaaaccaatcactgaatggttacgccggcgtaatactccatacaaactggtttgacattatcatatgtctccattacggtcccctttccttttctcgactccccccagtcagccaaccaaccataagcaacatcgccttcctgcggcggcaacccatcggtatcgttccagccgtactcggcctgccatacgtcgtcctcggccacggcttcaaagagttacgattcacctggcgcgctggggacgacctgcacaatcagtgggaaaaagaggtgcgcggttacgatccccagcgcattgtagacgatcccatcgccagaatcagcgaggccagaggcctcgctctcaagcggtgggagcggagaggcgtgtttcggccgatctgtctgcgtgggctggggtgggcgccgttggagtatcgggtttgcgctgagattggccggttggcggtgctgggagtcgaggtcccgatgtccagatacgacgggaaagaaataaaggaagcttgcgttgggtcaggagaaggagcaccggcccgggcgatatgggtactgtctctttcagcgccgcaagcagactggcgatgcctgatcgcttcaatgcgtatgttagacccatcggactactgcgtagaagaggatgctactaggtctgtctgaatagtggtttgagagcctggtgcaaggcactgatctcgattgagcggcggttagttatcgaagtggtatattattgagatatttcacagctggcagtgttgattgaggttgaactggatcgttgatgacccctattaacatcggaggctatttgagctatattgtcttcgtacctttactctacgagtcgtgtctatgatagtattctcagacctttgtatactgtcaatgccttcgcatttccgaagggaactcccataagtacgtctttttgtctacgtgtgtctcattcctttgttaaacgctctgagtacctggctttttaaagacctatttacaatgtcgtatgaagcatttgtacggttcatgccacttcgaacatctattttgagcagtctaggcttctctcacccggcacaaagaacatgtaatgaattgatgtggttttgtctaaatctctggcccttgtagtcaatcgaagcaatcgaagacctgtactttcagcccgtggtatagaaaaagtgcgtctggagttacgagtacacatcgcctcagaaatctaaacagcagctaatcaatttagattattctccctctcctcttttctctctttttacctagcaaaagaaagaaaaatgcaataaaacagggcaagacttccgagcattgtatgttgtggaactggccaacgcacacatgatgtcccaaacattaatttaaataggctcattaggggcgtagaatctggttgtgaactataaga

SEQ ID NO: 5123 - DNA, 4918 bp, Emericella nidulans
atgttcatcccgtcaaaggagcaaagtagctctttggtttcccacagtttctcgaagatctcgataactgccggctcggtgcgtgcttcccaggccattttttcgtgggtggagccgtaggcaaagtacatgctgcgttcttccatattagccctcttggacactgcctataacggcctagtcgcgtagtcggatgaagaagtaatacaaaccctcccttaaaactaacgggcagatgctctgctgtccaagtgctctcgtcgtgttcatcgaacccaagctcaaacttcttcagccattcaatctgcttgtcgcagtagtactttgctctctcggggctgatgacgttcttgagcacgacgcagccattcttgtggaactcatcgcgccagtcgccgtactgccggccgctgaagtccaccaggtcctcgacggtgaaggactcgtttgtggcctcggcggcttcttggattgttgtcgttgtggacatagtagttggtaacagcttgaaatacaatatggactaggggattctggacgaccctggtgtctttgcaagacgctccagtgggtgttcaaaaatcacttaagtaacaggcccctgtgctccaagcttggggctgtcctccggtgttgccgacgcccgaagctcggggtcagccgaggcctgcgtggggaccgaatacaggggtttcgggcgctaaacctccgagttccgcagctcatgactcgtgaatagctaactgtatactggcatgccatggccacaaaaatgtgggggtccggttcgtgtgggggacggaggattgacccgcggccgttcaaagctctcgagctccaacaagggtagcttctttaaatgtcgaggtagacactgtataggacagaaattaggaaagggaaataactccaggtacccatcgacgagagcctaaataaatccatatctccaatatgccaccccctgtccaagccgcctacaagcgaatcaaacccccccaagctggggagaacggctatgtcccaccgcaaccagggaagaccgagatcctggatgcaggatggaacggattcaacgcaaaacctctaaccagtccgatcctgatcgaacacgacgtcgagctggtggtgcgcgatggccgaagactctacgccgctatctaccggccaccctcgagcaacgacaatgcaaaagtccctgctacattgagctggtctttctacggcaagaagtacagcgccttgaacatgcgcccactgtgtggctggaactgctacgtcccgcggtcggatctgatcgggctggagaagttcgaaggccttgatcctgccacatagtgtccgcgagactacgctatcgtcagcgttgacacaagaggcgcaggccacagcgatggcctgattggggtaatgggtgcccaggacgcagaagacgggtacgacgtcgtcgaggcactggcgaaaatgccctggtgtaacggggcgattgggatggcgggtaactcagcgctcgcgatttcgcagtggtttattgccgctcaacaacctccatctctgaaggcaattgcgccttgggaagggtctgccgatatctaccgtgagcagttttgccggggcggatggttcagcatgagcaactttgacctcatcacaaacgagatcgttcgcggcccaccgagttcaggaatcgaagattttgaagagatgtatcgtcggtcgaatgtgtcaagcccgttctgggaggataagagggcggacctgactcgggtccagtgtccagcctatatccgtggttcggatgtcagctcgatccacaccatggggtctatacggggctggctagaggtgccgcatgacaagaaatggatccagtgggggagcaggcaggagtggtacgagctctacagctgtccggagtccatggacgagctgggcaggttcttcgatcgctatctgaaaggtatcgagaacggttgggaacaggcaactccgagggtgcgctggtcggccctgcagtttggggatcgcgaggcgatcgataatatcgtgctcgaggacttccccatgcccaagacgcagtatcgtgagttattcctgtcgaagaataagttgaatgagagccccgggtcagactacgagattgtctcttacaactctgaatcctcgtccgactttgcggaattttcattcacgttcatgcaggattctcgactcattggcctcccaaaggctatcctgtacatgtcctgtgaagaccgcgacgacttcaccgtcttcgtgatcatccgcaagaaagataagaacggcaagccgctgatgcacctgaatttccccttccacgctaccccggtggcatcgatcgaggagattcccccaaaggagcaagcgagcctcaacctccaccccggttctgtcgggatactgcgcgcttcccatcgcgcctttgatcccgagaaaagtattcacccgcagtttccgttccacccccatactagacaggagaaggtgaagcccggggagatcgtcaagctggagattggtatttgggcgatgggagtggactttgaggctggtgagacggtcagcatcagggtgagtctccctcgagaggtccatgcttagttagggttaacgatgtgcaggtatcgggccagtacccgagcatcgcagagtataagacgtggtcgaggccacgacctgagcacgagctgaaccgcggaaaacactttatccattgtggtggggagtgtccgagttctgttattttgccatttatatagtttccttgaagtagacggaattctggatgaatgctagaggtaataggaaattgctctattctgagtaacctctggaggaagtgattatcccatttataggtgaatatacagaggccggaaattttatgctctaatacctgaatcgcctccctggaccctcaagcatacctctgcattaacaggattacgccattgcctatctagcgcagcaatccggatggccgctcagcatgcatatgagcccctgactctccggtggaggtgggcaagcctgttagcactgttgcacttggccaagatacatttaggctgaactcgactgaatcaagcctagccagctaggatcgacaccaagttcatatggatgaatggtcaattgtttccgtccgcttccccgcagattccaggccaaatataagccggttccctgcagacagattctgcaaccgctgcggacagcgacgttcaggatgttattcccacggctctcccactttttatacttgggagtcgcagctgcaggcatcgctaaaatgcgtgcctataccaatcccatcctcccgggctggcactccgacccgtcctgcgtttacgtggctgagcaagaaacgttcttctgcgcgacttcaacattcatcgcgttccctggtcttcccctctacgcgagcaaagacttagtccactggacactcgcaagcaatattttcaaccgccccagtcagatccccagtcttgccgtcacagaggatcagcaaggcgggatctatgcgccgacactccgctaccgcgatgggaaattctacctcatcgtctcgttcctcggtcccaatgtcgaaggacttgttttcacatcggacaacccatacgacgacgacagctggagcaagccagtcgtctttccagttcacggaatcgacccggatatcttttgggaggaggacggtcaagtctacgtgacgtcggctgacaacaaccagatccagcactacaccctagatctagcaactggtgaaatcggccctgtaacgtacctctggaatgggacgggcggcgcataccctgaaggacctcacctgttcaagaaagcggacgggtactattaccttctgattgccgaagggggtacagagacaaaccactcagctacaatggctcggtcgaggaaccgaaccggaccctgggagccttgtccggccaacccgatcctgtcgaaccggaatacgacccggtattttcagacggtgggacatgctgatctgttccaggacggccagggccactggtggggagttgccctctctaccagatcaggcccagaatgggtgaactacccgatgggaagggagaccgtcctcacttctgggacctgggaggacggggagtggccagtgcttgagcctgtgaacgggatcatgaaagctcctttgccagcgaagcaagagctaaagaacccaatcaatcggccggaacatctcacctttgcgcctggaaccgaaatcccaaaacatctgatgtactggcgtttccctgaagagtcgagctacgttgtctccccggcaggccacccgcacacacttcgtctgacaccgtccgcctatgggccttcgtataatcctgcctctgtcacggatccgatcaccttcattgcgcggcgccagacagacacgctcttctccttcagcgtggacctgaccttctctccgagttcaccgggcgtcgaggcagggattagcctgtttctcacacaggagcagcacgttgatgtcagcattgtcgatattgctcgttcttcctcttcgcctgccagagttcttcagcttaagacgtacggaagggggaactataacgggtcgctgtcgaacgccaccgtggaaatcccgaaacagtgggtagaccgaactgtcaccctttcgttggaagctgtcgacgatacgacgtatgagttttctgcttcattggcatctgggccgaaagagagggtttacgttggctctgccgatgcgaggattctgtctggggataccggccggttcacaggtaggtgtttgctcttcatggtctcaacccctgctaatcgagataggaactctggtcggtgtttatgcttcccgagccggggagcctggcggcaaagaacc

SEQ ID NO: 5124 - DNA, 4756 bp, Emericella nidulans
catgcccatcaggtctgtatcatgactcgtcctgcgttgatttgccgatgttttgccgtcttactaaaagcctctttagccggcgggatgtggacattggcgttgacactgagtccagcacgcctggttgaaagatcgagacaatgacatcatggggagggtttgaatctagccattgggccgagggtaatatgtcgactgggtgactcaaaaatacagaagaaagaaggatagatagatgggatgacacaagggaagaggtgaagcgggatgaggtgaggtgagaatgccgtcccgagtcgggagaggcctggtaggctcttatctccacgttatccccgagagtcaacaaaaagcttcccaaagacaagcccataaaggattgatccttccaggagccacctgacaacagcatcctccaggaaacattggtaagctttactggtgtctggatctaggttccagctgatccatgacgtgactggcaatacgaatccgctgtagaagattcctcccgtctcggtataacccgttcaggctttcaagtcttgttacctatctttagcggagatgagctaatctttagacaggaaaagtggctggaaggatggcaatagcccaaataccagtaaccagctgttcttttcacgagattctgggtaaccctagctatcaacacacaactgacgtgcatatttgggggctgacgtacatatctggggagactgagaggaagatctactcaaaataggtcggatgctgcattatccagtgccaacttggctttgccagaaccatccatgattccccacattgggccttgttgagcgaagtcggagagaccgctaaggagctaaggtggaggtctggtcgggctgtctccatcctggaaattatgtcattcagtattgctcatctaaccttatgtatcttttatgtatcctttatgtatccgggcaaatgaaaatcgttatattctcgatcatgaaaatatactctgcttccataacgtatagcacaaagccaaaacaagcctagagctgtagtatagactcagactttacagggagcagcatcaaaaagccagctccaataatgacatactcctagagtcgctctctatatccttaccacctgcatccaacagcacctttttggcatccagaaatcgaaacgagtccagagtcacggcagggtagtactcctcccagggccgaccccgccctgttagtgattctgtcctcctctgtttcgtgctggtcttgcccagctatgcaccgacattctccacattctctgagcgcactttgggctccacctccacatccggtggtgacggcgtggtcggcgaatccggctcctcatacaatttaggcatcggctcgagtttgtgccgaagcacccaggtgcggaaatgccagacggcgtttcggagctggtaccttgcgtggcggcgcgttttcaccgagaagacgcggtcgagttcctcaagggtgagttctaagtgtgtcagaatgtactcatttgtgaggataaggtcagtaatggtgatggaggtaccttttgtttctggcacaaacagcaaaaccagccaccatccaatcaaacaccaagcggcgtaccagccgaatgcaccctgcggtttaaacgcccgctccagcatcggccaagtaaatgacagaatgaaattgaagcaccacgttgtggctgtcgcccaagacatgccgacctcccggacatgcagcgggaacgcctcggcggagtaggtaaacggcacgggcccctcgccaggcgagtaaaagacctcgaagaggtacattcccgtcgtgaccatggccactcgtttacgactagtggggatgttcgactcgatccaaaacgagaaacccgcccacaggagccatatggaaagaaacgggaatgtgaagagcaagaggttccgtcggccccatgtgtctatggtgagaaaggccgggatggcaaaaacccagttcaaaatgcccgtccccatagacgcaagcagggcttcttgtaccgtgtatcccgaattcaaaaatatgctggtagagtagtaagcaatcacgttcacgccgcagaactgctgcaaaaacatgacgatccagctggctagcgtggcgcgccgattacgcgggacagtgaatagctctaggaacatggtgaagaagttcttccctttgttgatctcgcgctcgagttggacgccaacatacgcgtagtacagatcgcgggcggcttggaggtcggtgttgcgcagaacgcggaaggacttgaaggccttgggtatcttgttgtgctcaatcagccagcggggtgattccgggcagaagtagacctggaagcaaacgatgattgggagaaccacggtgctaccgagcataagccgccagcttaggtcttcctccacgcccatgaatgcgacgcccatgatgttgcccaacatgattccgaatgccgtccacctagattacgttagaatggtcaggcatcctaactattcgtggtacttacatttgccactgcatgaccagcgcgccgcgaataggtgccggtgaacactcggccgcatagaccggcactgttgaggacttggaaccaatgccgaggccgagaacaaagcgggcaaggaagaggttgacccaggagttggctacaccttcccagacggaggccacggcggcgataacacaggagatgaagatcgttcctcgtcgcgcaaagtatcgattcatcggctcggtcagccagcagccgatgattgcgcaggctaggtacggggcgccgacgacgagaccggtgatatagtcttgcatcatatcagagaatcggggagattcgataccgagtagctggtattattagtctttgtaagcaaaaaaaaacagaagttaaaggatcaaccctaggatagataacgactgcaccgttgttggcggtctcgtccataccctgcacggctgcggccatggagcacatcgctgtcccgatctttagtcactctacatagctagtttgagcttgacgtactcctcatgaaatacagcatccaaggctgtgaccatttgtgagttgtctcgcgctgtaaagcctcgcgttcctcctcagtcaactcggccaatgtttcagccactgccggattttgcgagataagtgcaccttaacgaaaaagctccttgtactccatcaggccatggttctggcagaatcggtcgacatcttcaaagagctcgtcgcgaggaacaccagcgagtggattctcaaagattgcattcagcttgctgcggtccagtccttcgacatcgtagatgtgacgggttttgggcttttctttatgctcgaagctgggctgaccagcatcgtggctgctaccggaagagtgagccccatacatcttgatacagaacgaaaagtgctgaggttggagacgaaaagtcaggtacgaccatgggacaggctagaatttatcgatccccgcctgtctgcaatccgacaatggcactgcggctgatatcaccattccatgacgctgctacgctactcacgagtgagagcaagtggctctacgcgggatgtcacctcattgcctataaagggaagagggcaacggtcgagccagctggaggggtgagaatctgggggattgatagagtggttaacctatcacagccagtatttgcacatggtcgtgtcatctgaacgggagtcgaatctggggaaggcccaaggattgtcaagtcagtcaagagtggtcaagaatggtcaagagtcttggagatgcttgtgtcgcttatcctgtcatcaaacgtttccaccaaccaactcgaggttcgacacaatctgattgggagacagctaggtcgatccagattccagcatcccctcggtctcgacgactgggcaaatgaaaaatgacgcgctgccgagacctgtttgtcctgctctgaaccccaggacagtcttctcgcatccataacgagagtgccgccatctcccggacgcgcaattttgtgcacatatagctggaagcactcttcttgtccagaacccagaaaatagttccatatccatagcaagccacaaccgcagccaacgctcgaggtacggtagatcattccctgtaatagactagggccggtggacgacgtcagcggctttgttcccgagggttataggagcgcctcgtaagtcttgttgcatttaggccgtgagtagcttccgacaaggcttcgagcgccatggatgtcatatttcaactccactccaatccggggtttggtggcgcggggaagcctgtcaaccctactatcatcccctgcgtgattggcaagaaagatatttgaggcattccgttggctatctgatgccttcgaggcgggtcaattcatgcctggtagccattctagctcttgcagccatctggcacattgccaaccccaaaagcctgtcggtaatacaacatgactcgcagcttagttcgagaacgtgaaactttctccgaggcgtagccttcggcgcgaagtcttgtcttaagtatcttaacttttccccgatcataggaacacgctctggaccatagttgagatctctgggtgtggcgaaataatatgagacgaaaggcgattggtatctaaaaaaaaccaactcgactctactctgcttgagccggacgactgtctccttcggaccacagcagagcgcatgatgggtatattgaacagttctgtattagccgaggaag

SEQ ID NO: 5125 - DNA, 5628 bp, Emericella nidulans
tgcgaataaccctcatcaaagggatctcgatatttaaaggttggaatcctaagaattgtcgcttagttatttgttgctaacgcactcttgttagaaattccgggaaggtttggtgattagtctgcaaaaagatgaaggtttcaaagaccaaacccttggtgagactcgatcgaacctaaccggcaccgaccagctactgacatgcaccaggtctttctctacgagaaatgatccacgattacaaataccagaccctcgttctattcaaggcattacttttgcaaccaaaggtagtctatttttacttctttgctgtctctccatgcttatcaattaccacggaatagatgcttttcttcggctcaagatgcgaacggctatgcatgatccagttttcgctcgtctctttgatcccggggctcatgaaccaccttcaagattgcgccgacccttcctttgatacatatgcgcagaccgttaagaaaccgacttctctcaaaaccagcgataggagctcttgtatgatgatgcgcacataatttctgtcatgagtctttgtactgatactagcagtgctggcatatatgggcctcccgttgcagatttttggaaaggtatgcgcacattatgtgtccctccgagtatagattaatctcacattgccttagggaagtatgtttggaccgtacacacctctgcagcagctggatctactggcagatgatggaacaaaatcttacgttgttggttctacgaattctttgctactgcagcagaaagatcgctatagcgatatcttgattaatgtaagaaagtcctgcacattcacaaaacctgctctaagaagaccactttcaccagctcgacgaagatacgattaatatcacgtcatcttctttacgaaacgcactgaccctatccgttgcggatcgacgctggatcgatgccattactcagattgtgaacgatacatgggacgaagcacatcccaaccaacccaaaacgcatgggtacatgggttcggaagagtttataaggcttcaattcgaggagtaccttctggcattactatcatgcatgaagtatcatgaagaactcaactcctacctgactggtgaaccgagccgccgtaaccgagcgcagttagactcttataacatcgagggggacccagcgctagagttcaaccaagagttcttagctcattggagaactacttccaactacgctttgtttcaacgccttacctcggacgcgcttttattctctgtcgctgagcctcgacatccctctgctggcggcctcacaatcgatgatgttcaaagacgaatttctcagcaagtcgcggacctccacctcgacgaaaaagtgcgtgaaggccgtgaagccctcaatcgacatctttctacaggccagaagaaagtttccgctgcattcaacagcttctgggcggacatcgaggccatgcgtgaagcacagcgcaaacggaatgaagaaaaggcagcaacccagtcaccgcgtccatccctggaccggtcctctactcttccaacctcacactccgactccacctcaaactcgagcaccagcgcctcgtcgtggttcccaaaccgcaaagtcgctgtacccgccgtagatatgacgcaggcccaagcctccgtcagcgccgttggccagaaggcaggcgcatacttcagttcttggggtacatgggcctctgagaaaagaaaggagtggcaggagaaaaagtcagcttcgtcttccccaaccgcgagtgctgctgtgacttctccgtccactccgaccttggcaagcaccacagagtccattgacaccacgaacacgaacacagataaagacagacggcagtcgttccagtcatttcgcagcgaagcgtcctccaccatttcacgcagcggaagtagaaggaagcgattgagtaatcttttcttcaagcgcgagagcctagatttcaacgtcggtgctatcagccgtgatggtgatgatcatgagactgtttacccaaagtcaccgctctcaagggaggagtctattctaggggatgatattccggaaacttcagcagagcagtacaaaggtgaacgaaaacttgacattcaccctaaaacggaagcagacgtcgctgagcgaaaagataccacggtcaacaatgtaccaagcgacggcacacgaacaccaccgccacaacagccagcagctgcgctagattctatcgaattagaaccacgtgcaaacctccccgggtcggagtccgagaaagtagtagtgcagtcctcgaaatccacaaacgaaaacgagccgccattaaagtgaacaagataataacgagtctaatctgcactaattttgtgtaaacctacatacccacttacccacccatatagcgcacctcgtacgttgcgtacagcttttgacgaaacatgtatcaagtcaggctggcgcaattgtcagcattattttaggcgattaactaccgcaaatacctccccttagcctatttacctgtctgcttatttagataccaacttttatccgacgttttgctcgagggccgagttctagactctatgctcgagactttttgtatgacaagctgggaagactttagctattacgatgacgacacaaatgtgtccacgtactcttaaggaaatagctgaaatcgagtctcagggccaagcgaaacgaccatagcgaaagattggtcaagcgtactttatcaaacacactgcagcatatcttatctatatcacgacgaaggtaactcattctcttagtctaagtagaaaatggcaggtggaggtcgcagtcggctagcttgcagagttgggaagagtagttgtagacagaagacaaggaagtggtgctaacagggacatgatactggctgatgaatccatggtctcgcaaagaggaaacgcctaaaggaagaaattggaatagagatatgatgaataagtaaagtagatttgagagaagaaaatcatgcaatgtaagcgatttcatcgccgtccagacgctcgatgtaatccttctccatcaatgcttcgatgttcttcttgatgtcgggtacttggggggggaagcgtgatttgacctggtgaattacttcctgcacaagctgtacgtgcttcatcttcttcctggatttcatgattctgacgattgcggactgttacaaaggatagtaagtaagtatagtacaatcacttgggtagacaaggcaagaagacatacctggagcaagagcttgcggtcttcctcgattgtcttatgtgtgtcatccgtctcgaccttctgctcggacctaatttggatgttgagattgaccttgatcttcttatttttgaagttgtagttcagggagaaggtcgagtctggcccgggtttagatccttcaggactaatgttaaggaccttggcctttaagaaaatgctcaggtttggatcaaggatttcaggtgtgagagtagtggccttttgtatatcagagtatgtcaacgtgtcgctctcgttgaagagaaggaggatgcccatttggtacgtagacacaaggaaagtgtatgggaccttggtgttcttgatgtaattggccttgagctcgcccttacacagctgccagagccaggttagctttcgaccgttatgcttatcgcaatagaacttctgaaaacgctcagaagttttgacaatttcaggcggagcaaggaaagaagttgaaggggccgtgagtggccagaaaccggtcccgagaatttggaagtgcgagtccacaagcttctttcggtcatcatcatccaagaaagatttctcaagccagtccttgtagcttgagttcagatcctttgaaatctggatatcctggaacatccgctgcaacttgttcgtgtactcaaaaccacacgcctccttgagtttgctgatcatgctagtctcggcgtcatcagatactgagctcacatggactagtcgcttagcaagcatcttggagtagaatttttggaagacatccttgtcttcaatgtacttgaagacggtcatgatctgtaccaacatctcctccagctctgactcctccgcagcttttgatcccctcttcagcagagaatccgtgtacttggctagtaattctggtgtcttcgtagacccggacttgcagatcttgttgcgatttacaaactcgcgacaagcgttgtcaagcgagcggacaaattcggactcgccattgaaagcttccttgacgagactgtggtatctggtgtgcaccgacagcaatgcatcgacgtacatcttgggctcgaaggagtcaccttcagcagcaaccttctcaactgcagacaaaccagccctccttacgtgtgcttcgaattttgtgcgaagagggtccagcccatctttgattcgtgacaaaagccggtacatccgggcgagatcatcttgacgttcgttgtcgagcagcggttggaattcgtcacggaggagctccgagtgcgcagtgacaagtacatccaaacaggtgctggttagatcttttgaaatatcgttgttcaaatagagtccaacacgtgctttctcctcttcgagacggatttctgctttctttatgtactccacaacgctggtgtcccgccacaaactgacgcgactcatcctcataatagatcctggtagcttcgaggaaaggccgttggaagtaatagcggtaaatttcaagggtggacttcgtggggtcagtttcatcaagtccgagagagacaaatgaatcaacaatgctcttaatccgcgattgctcaatggtctccccattccgttgcttttcgacaagcttaagaaccgcgcccatgaccttttcatgcaccttgaggaagaaatcctccttccactttaccaagtgttgagtatacacatcatatacgttctttttcccttcatcgatttctcgcttgacccagtggcggttcaggtatctgaagagatggtttatatatttggcagcggtcgtatacctttgccattcccgaatataaaatgaaagtagagcttcatccgtatgacccatcgattctccgtggacccactcaagatggcgcgacaagtattctccaagtttccgataaagctcctctccgagcaagtgtgctaaaattgacggtcagctgtcactgtgcggatgtatttatcatgaggaatctggaaatgggaagggaaaaaatacgcaccaccacgctgtgcttgtatggcttgaccgctgacagctttgtgagaggtgcagaagttgtggaccgctctgtctcaatgttagccatggacgacgatgagttctaggtggttcggtccgtcaggcagacgtacgtgtatagggccatgtactagagcaacaccagaagttagcaagctgcattctaaggctagaggcacataaacagtgatgagccacgtacgttcttcatgtccaccccgtcctccagtttgaccatgacattgttgatgccgttctctaggaatacccatctgcaacggtcagccgagctctgatggaatgccaaaaacgacggttccacagaacaatagcgagtagccaggtgcactcacgtttcttccaagtca

SEQ ID NO: 5126 - DNA, 4502 bp, Emericella nidulans
ccagtttttcttcacaggtaggtatataagggcctaaaatctattttagcaagatcacaaccgcttcatatggtcaaagggtccattgaccacctgaaaaccttccctgcgctgcgtttggggactcataagtgtctagcagcacttgctcgaactgatcagccttgtgtgctgccgcgttccacgtcaatccacggtcagtccagttcgccaataccagagccttggaggtgtggcatgcccgggtgtaggcgtaaacctcctgactatcacgatccacaagctcgtaatttccatagacaaagatatcgaggtaggttttcctgaggtgcaggactgatgcccagtaatggtacaaagagttggggtccttgacttggtccgctgcattaactcgagtgtactctggattgacagacatccaaggcttaacgttcggcccggtgaatccggcattgggttctgaggaccactgcactggagtgcgagcgttgtctcgggatttcttccggtattcctgtctggcaattttctgtacctcggtgtccgttggtctggtttccagcaacctaccagagttaatgttgttccatttcaagagagaaaaaaacataccctttccaatggttcagacagtcgatgtctttgtattcttccattccccattcaataggaacatttcccattcctatctcctggccctggtaaatgaacggagagcccgcgtgcaaggctagtatggtagccaacatctttccggccgctggtcggagagcctgaggggggttgacatagcggtcaatcgatcggggttggtcgtggttttcccaatacaaagcgttccagccgccgttgtcgtacatgaaaacttgccagcgctcgaaaaaggccttgagatcagtgagtttccagccgccaggcttgaatttgttgccccaggggccatggtcaatgtcgacgtgctcaaaattgaagatcatgttgatttcgttgcggtcgtagcgaaccgctttcagcacttcattggtatcctttacaaaaggcatttccccgacgctaaaggtgtcgtattccttaagtatcttcccaataccctgcagatactcatggagccgaggaccgtttgcgtagtacttgtcaccccactgccatacggcatccttgtcctgttccggtgcgtcggggaacgcctgatccttactgataaagttgatgacgtccatgcggaagccatcagctcctttgtcgagccagaaacgcacgatatcatgcactgcctttctcacggcggggttctcccagtttaagtcaggttgttcgacggcgtatagatgaagataatactctcctgtcgcctcatcgaattcccaggcgctttctgctcagtgttaacactatctaagagagtgaagactggaagataagaaccttggaagtgcgataccccaattgttggaggttgacgattcccattctcgtcgtagcggggggcttccagacataccaatcgcgaaactcgttatcctttgagctgcgtgatttcttgaaccattcatgcttatcactggtgtggttcacgaccaagtccataaggagcttcatgcccctgtcgtggcagcccttgatcagcttttcgacatctgcgaccgtaccatattcgtctgcaatactgtagtagtccgcaatgtcgtatcccatgtctacctggggagacttgtaagacggacagagccagacaatatcgacaccaaggtcacgaatgtagtcgagcttcgagatgatgccaggaatgtcgccaataccgtcatcattagagtccttgaacgatgccggccagatctggtacacagagctttctttccaccaggcccggtggatctcgctggggggtttgacgtgcgcgtagctcattttgctgtctcacctacgactgactataaagagtgttaaggcgttgatgttatgaacaacaagagtagtgtgccgcaagtcgcggcaggaggggtaacgtggggtcagttaggaggcggagaccttacccctcgtaagctggcggctgtccagccattgttgttacagagttaggacctaggagccagtgagatagagtagactggcccaccagtcgcttggagagaatgagccagtcgttcgaattgttgagacattctcattgcttgacgctgctgatcctgacgtcatgcctgagagataaaaagtattgaataaaagaattgaaataaaacactcgacattcaagcgtctgatacagcagagatgttcaaggccaaaacaatctactcagagtaagctctgaagtatgaattatttcttgatactgtggtgagtccggaaacggaatggacccgatcatctgacaatccggatacggcaggtatggcgttccaagcttcaaccaataataccgtagcgaccgggactttgggactgtgatctgactggaccctgtgatctaaaaatggcgagtgggtcgatagagagtttgtacctggcaggtacctgagctacgactaatactactgccgacggatccgtaatggtcctgcgtctgctacttccgctggaatgtgaacgcagacgcatttggcaggcgaacgataagcgcagcaagggcaattcaccagtcattcaaaaggatggctgcaaaacaccccgcgataacaacggccgatgatcgctgtcgactctcgcattcataatgattttgacccgcgggaactccaggctgatcaagaccacggccgcggtattctgtgcctgcgttctactcgcctttctcttcaatcaccaagatggctaccaatccaccagaaagttaatccacgccggccggtctcgcctagaaaatgccatgttcgagcgaatcaaaaacgagacgctaggggtgcgctctcaaatcaatccgacccacgagtttcagtgctgacaatcagtagtttcaacacatttatgccatcgggctcaaagaacgcaccgacaagcatgattctctcacactggccgcctcggccaccgggatgaatgttgaatggctcgagggcgttcgacccggcgacgtatcggaaaaagctcttccgcaggtgtgttgacccctagcctttacaatatattctgacccgaccagggaatggacaatccagagatcccatacgccgttgtcccgaggtttcagcaggacattttcattacagcattctggtttggaccttgccaggcctaatcgcaattgtcctatttgcttcttggccctaattacagatatgccaagaggatctttggtgtctcgcttttgtgtcataccctggaggatattccgcgaacgtggtacgtcagcccttcctagtctcttcgtttagactgatctgtttcgacatagagagaacatggtttggccgccgatgtagtcgggattatagacttgtaagacctgtctgaaggaaaacggacgctcgcaacgtcaaagagaaagggcggagctggtcaagggtttgagactgacactattagtataccctggagcagcctcttcctggcaatatcatggccccttatagcttgccatccttcgacaaaccgtacagttgcccgcgtttctctcttattagagtatagaagctgtgatagcgagcagataccgtctcctacctagtcacagttacctacattcaacatgaaaacacccactcctgccctgactctggcttattcaacctgccagtctacaggcacgtttaagcgcaaccctaatctttacactattttccatggatgcaagcatcaaattattgtggcagtgttcgtttgagaatacgaactctgtgcgtgagcgtcatacctataaacatgcgaaaatggagataactcaatgggttccatatagctcttccgcctgcgactaacgagtctaattcatcttgatctgacactagccaggctcttacagtggatacgtctatgcggcttttaccgctccctagaggcaccggctggcgcctgcgagtgatggtcccatgctgcacccaaccatgtagcggaactcaggaacgacaagcctcatttttggatgccgagatagtttgacgtacgaaaagcttatttatttcctggtagtacttttttatatgcagatatcttcccaattagcaagttaccatgacgtgagaatcagatggcatctgggcatagcacatgcctcctgggcgtccaaatcccagcccggccatcgggccactgaatgacgctgtaaacatactaacagatggaattcttgaaccgctggacttcagttatgctgggacaagatcgggatgtagacgaggggctccgcagaggacgcccaatattgtgacctcctgaggaaatctctttttactaatcaatatcgtgcactcatcgacatatcaaattgcgtttatgacaggtcatatctcctattcataagcgaccacttttgaagctgcaaatatacgaatcataatggg

SEQ ID NO: 5127 - DNA, 2293 bp, Emericella nidulans
tctggataacgccggttccgatggtggaacagtggatgtaactctcaaccggtgacttgttgaagatgtatgaagcttctgtattcgctgcaagctggttagcaatactgaaaaggagtctggagccagccatatgaagcgcgtacagaatgaatcgcgaaaaaggaaatacgaaagcctggagatcgctaatgagtgactactgagacgaagcgcggagtactgcagacaaagaaccgtgctgtgcaacagtcaatggccaaacgagaactaggcaactaagctcatgagactccttgctgacggtaagtatgagagttatgagctgagcctgtcacaaccaaagaagcagcatcgtgaaaatcgcgatcctcgtccatcgaaaggaaaggtccgcagcaggcaacttgggaaaaaaacaaagcgatgacgcccactcattgttgcccgtgggccgtgagcccagcgatgactcagcgccgccccgtacggatagttaccagattgtttctgcttgacgatcaacagttcctgtccaaatgatcgactgacagtcggtgagccggagtatccggctaaggagtgtattctagtcatcatatgatctagtaagctatactccgaacataaagctttgaaaatggtgatagatcgaaggtgcattattctttacttacagccaaaacaaggcccacacatagagctgtaagtaatgtcgtcatctgtttatccacaccggctcagatccggctcaactatgggacaacttatggctgggagttgagaccgctcaaatgtctacgccgcggatgagaacaaatatatattcttctgaaaaacgcaggggctagtttgtagaattgattggcttcaaaacagatctgtcatggcaccgtgcgaagcatcccctaccagccgggcatacttcgcaagcacaccgcgcgtcacagtaggagccggtggcttccattctttcaaccgccgttgaatctcctcatccgaaacatccatgctgagttcgttggtctccgcgttgatagtgacagagtccccgtcacgaacaacggcaatggggcctcccactgctgcctctggcacaatatgcccaacgataaagccatgcgaggccccagagtaccgaccatccgtaatcaatgccacgttggtcagttttgcacccataagcgccgcactggctttgagctgttctggcatacctggtcctccctttggaccttcgtagcgaacgatgagcacaaggttttctccgcgggggatcttgccctgcgtcaaggcatcgttaagctggtactccttgtcgaaaacgcgcgcttttccggtgaatttggttccttctttgccggtaatcttggccaccgcgccacctggagcaagattaccctttaggatctggagatgaccagtcggcttgatggggttgttcaaaggacggataatgacctgatcgtcgggaagagatggatatgaggccacattttcagctagagtcttgccggttacggtgggaataccaccgtcgatgaggccagccgcaatcaacagcttatggacggagggaatgcctccgatttcgtaaaggtcggccataaagtattttccacttggggaaaggtctgcaatgaatggaatcttgttgctaactctttggacgtcatccaaggtgagatcaacgcccgcggttctggccatagccaggaaatgaagcacaccattggtgcttcctcctaatgccatagtcataacaagagcgttctcaaaggaccttttggtgagcaagtcacgcggacgaatgtttttctccaggcaggttttaatagcatcggctgccttgacacattctcgcatcttggtcggcgacgaagcaggcgtcgacgatgaacccggcagagtcaaccccatggattcaattgcggtggccattgtgtttgcggtaaacattcctccacatgcacctgcgctaggacaagcgtgcttttccagatcgtccatgatttcgtcctttgttaggctcgtgtcgcctccatcgtcaggctggcgcagggtatcatatgcgtatgcgcccgcagcttcgaagcacgaagacacgctgatgttcttccgaagtgactgcgagtaacccttctgaattgtaccaccgtatatcatcagggacggtcggttatgtctggccatacccataacaacaccgggcatgttcttatcacaacccggaatggcgatacaggcatcgtgatattgcgcacacgtaacggtttcgacactatcggcaatg

SEQ ID NO: 5128 - DNA, 5940 bp, Emericella nidulans
taggtaagtatagggataataattataaaaagagaaaaacatcctttatgagggggaaaagcgacacccaaattttttaaggacaccaccttcagaaaattcccccctcctcttttttccaccagaaaggggttggcggatgtctggacaacgttttgggcttactataagccaataaacttgcgggccagagaggatatctgcatcatttatttactaggtgcatcggtaagtggcgactgcagccttagcagcgacttaggtgatgatcctagcgtctgtgtccgaagtagtggtaggcagaagccacctagcggtactactggtgattctgtcacagtaatcagcattggtcagacacagtcaggttccgtcgtattctaacagtgcagaggttattgtccatggtcaccagcgttgagtctgtacgcatttccttcatggctcgggtagacaaattgatccgatttgtctgacggtatgttttctgtacatgcgatcgttgagaccaaaaagttctagcccgaatccgtcaacggcacagccaaggcagtctagacacgtacatttagatcagccgaatcagcgacccttttagctgcataaattcactccgggaatctctaacgtgtataaaccttgcttctgcatccattcacttggatctacattcgaaccacagtaagaatgcacgcataccgatcatttacctcgtctgtttcccactcttgctcagacacccctcaacctcgatcgcgagagacttcggaatggcatccctcacctgctcgatgtcctccccggcaataacctgtccaaagctcgccgcaataatatcatcactgaactcaaacgtctgccttgcaaccattgccactgcaaactcatcagacgtaaacgcagcggtaaaattcgcggccgagcagtccggattcacctgggtatggaatgagcccgccggaaaaatggtcatttggccggcgtggagatcggttttgatcacccgcggcttgccggaggagtcggtaacgccggcctcagggaccatctccgtaaggacgtgaccagaggttagggtgaggagctcggtggcgcgtggatgcaggtggacgaaggacatgctgcatgctgtatgacgcatggtgtaagccagaaaggccgacagctgggagtttagtctacggaagacgtaccaggtaacgatcccatattgaacgagatcccggtgccaacaagtggatagaagttctggcttgtggcgattggagtctcagctgtgttgaagtcaaagacaaagtctgagtcgtctggaaggagggcgtagcgttcaatagccctagtggcagttagtcgtggcacttgccgggttcaatgagtagctatcggcgtcagaggcgtacgtgtctgccagtttcaattgagccgtcaggctgagctcgggggctcgcttggtgatcgactggggcgctggcgctgctgttactgagagcgcaatggcgagcactgcggtggtgacagcaggtagggtagattggggacgcatgtcgtgagagtaagtgtttgggtagtcgatggtggtttggcttgggaagaaactggatagcgcagtggtgtcgattgaatgctgtctataatagacatagctgacacctgtactcaagtttatatacctcgagataccaactattttctgcgtatagagctgcgagtggagtccgtataggtatgcgtataccttcatgctccgtgcctcagccgcccttggcgttactcagcttgagttgctgcggtgctcatcttcacctaccagacaagtttggttgatgcacattcaagaaagatgtatgcaagtaactgtgccttgctgaggactttcgcaacatgattactgttcatggctctgttaatacagtatatcaaggcccttgatgacaacgacctatataaacgggttataaataaagtaatagtccttacacatcacgcctactcctattggagcacttgcggccctaagcagtcgtccgctcatattgagtggctcaaggccctatggccctcactactggcactccagggtggccctaactgacagctaacggagtctaggtgagcctgaggctgcaggacattggataatgcgtattatagtaaccctttggaacttgcgaaaccgcacccttgacccttgcctttgggaggccatcggcattacttcccttcctcgtcccctcctaagaagtatagcatatttcatatccagcataaaatggtcagcccggtcaagccagtctctgattgcaagatgaagtacggggtacgtggctagccttgccttccgggcttgggggtgggagtcggaatcaacatgagttgctcgtcaaatgtattgagcaccttccctgtgggacatgggacttatcgatcagctgttcccatatacttctcagatatacgttgtcgggatacgcccttaggctcggtttactctgggtggtcatcccaatgctcttcggttttctttgtcacaagcagtaagaattgattaccccggggtttgaagatgctcaagtgtctgcagataactgggattgcaaggctgcgctgcgtaaagggtgaaacggtgataagtgttcgaaacatgaggaattgtcactgagcctggcacgttctcttcggacatggtgtagataggcagacatcgtagcctagcagcgatggagcattaggacactttagagacggaacagaactccagtattgtgaatatcgaatctagtagtattcccaagataaatatgtaaatcgtagtatcatactcccattcgaaaggccagcctagtccacagacatgcaggggcacgtaggatagcccaccaatttcgctcataacacatatttcagacaacgcgcttcacctgtagattcaacccatcgtcagcaacgatatcgtcattgcagtgaataagacagaataactcacctcaaagaacctcttcaaccaccaaacctggaaaataccctcgccaataagcaccgcaagctggaagatgctccaccacttgactcgtgcattcgtgctctcagccgtgttccggtgtaccctttcgcgcacaacaatgtaagactgctcatccttgacttgggccagattttccaaaagccgtcggactagcgaaaaaaggttcatgtcagtgtctattgcccaaaagctgccaggataatctcccatctgcgacgctcaccttccgtctccagcggatcctgtgccatttccgattcaggaacgtagacaattccgtgaacattgaacgagacttccttcgagtttgaggtccagccttcattgctgaagcagtagacgtattttccgtccagctgcgcggtgaacgagtagtcttcggaggagatggcttgtttatagtattggcggttggattgggggtcttcgacctatgccgcgaaaatagtcagcaaatgttgatgacagccagaaccaattgagcatgaaattgttgataccgattgcgcatatttggacgagttcggagcatacccagaagtcaatttttagatttccgctgccgccaaattcccggtcaccaacttggaacgacacagtcatcttgtcatccttgtgcagggtctcgtgaaagcattctcgtgagtgggcgcggagctggatgttgtgtgcgacggcggctgtgatccagctcagtccgagcaggagggaggctgcggaaaatcgcatggtagcagttcggctcactaggctgtatgtattgattgttcgacggtgattattatctcatgtaaggagttgaagtccccgcgttgagatgttttgtggtggattggagtgttggcttgctagttgacgcgcaaggtggtctctccgtcactctggaaattcatgacgctcggaccacctccccgttcaatcatcgctattgacaggattctactatgcatccaagtccatctaccatatacatatccataatttggaggtttcaatgctcgtaagagtgatgccttgtctggcacttcagtgaaacatttattatctctcgtggaatacttacaatgtccattacccaatgattgaggtctctcgcatgtagagtcaatacttcgaatacaagtaggctttaaacatctctatccatatagctacatccctaagcatcatgcatatttcataaatatgcatgagttacatcgctgggtcaggcgttcttaaaccaagcacctcgtttcggaagtagcgacggctgggccctcccatcaatcaattactctactcggagtagactacctcttgtgcatgaatactcccttgcccagaagccgctcaagaaccacgagtttatatcatgccgatcctcgtagcaaatggcaagcagtatcggatttcgcttctaggtggtctccgggaagaaagaccttccccatttagtgccagaactgcgagcgtcgtccgctaccaggtaactgctccatctagagctaatagcacactgactgcggcttaccctaatggatgtggctccaggttcctgccagagcgagtccacgatgggtgttcgcatatcccgcaatgcgcagaccgctcactccatatcaacactcaatggcagtttttccagacgcatcttcaggatctattccgtggtccactgagaacgacagagtactccggcagttgagggcggctaaggtctcatggaagcgaatttcgatggtcatggacaatagacctatcgcagaactcaagcagcggtgggtcgatatcggggacggcaggcgcagaaaccttgaacggcatgattttgaggtggtcgataatgacaatgactggtatcttgaagataatcatgacgatgattatggcagagaggagcgtcatgtgtcgttcagcccatccctcggtgaggatgtgagtactagcgcgctcctaaatgctgaatcagaagccattaacctttgcagacgaatggtgattatgtcccgtccaggcgagcagaaacaaaaagagcttattttatcgacgacgagttcaccctggacgaggtgcttctcctccaccgcattgcggcggattgggaaagggaccgttgggaaacgatctgtcgtcggttcaataccgaaaccggccgcagtattacgccgtggcaagcaaggtccgtcgttgaggagtaggagaacaggaagtgaaaatatcaagtactttcatagtgctgaactttggagaccaagaaatcccctgacgcgtttgcctccatatatttttagaacagccccagagctatcagatcaatgaatataaggggggattcccaggattgaaagcgttacttaagcctgcagggcaatagaggaaatattgagtccagagctgtcagaaatcataatgaatccaagaatagcgcagggtgatagggatcgctggtgtggagaaagaaaggacccttgagtggtggtgcctgagtaatcccggccttatggggtatggtcggtttcaggagtacccagggttcacctccatccctctcgtccaacgctcaaacatctgttcgacatcactcttttcaaatacagtcattccttatctttgtttgtgtgatatcacttttttttcattacgctcatttgtctgttaatttttaggaccgaacatcttgcggaacactcgttcttaggaattacagtgaacaaggccggagacagttcgatctttttgacaggcaccgagttcgagcttctatcgactcatcctttcgttcccctctacatcgtatagacgagatatcgtaatgcgcgtcgccgggattattgctcttctagcggcacgcatgccggctgtcgctacacgcggaaccttcggactagccctgggaaaccaaaaccccgactcgtcctgcaagaccgccgatgatt

SEQ ID NO: 5129 - DNA, 3216 bp, Emericella nidulans
gttcagcttggcgttcgttgccatgagcttgcgattcacctttggaagtgtatccatactcatcatgacggacttggccgacagaaccataatcaccgcgcgagccatatccatcacttgatgcaccatattgaccatgagattctccatacccgcgagagccatactcatcgcgagcgccatgactgcgtccagaaccataaccaccgcgcgagccatatccatcacccgatgcaccatattgatcatgagcttcaccatagccgcgagagccatactcatcgcgagcgccatggtcatcacgagcgccgtgactgcttccagaaccataaccactgcgcaagccatattcactagccgggccaccatactctcgttgtgaacccacatacccggaagaaaactcccttgtcgtttgttagcccattgcaaccgtactgttcagtacccggtgggaagtggacttactgtctaggcatgctgtcctggaagtgtccggtccgggtcacagtattatacccagaactcgattcagtatactccgctctgtatccgccacgctcggtatatttctcagaagtttgatgaacatactggcgctgtccatcgtcatactgatgttcacgtcgtgtatactggtattcgtgctcgcttcgctcattctcagagtcactgctacgttcatttgaacgggaacgttcatggcttcgatgcttgctagaacgtctgcgatggtgtttgtgccgcttgtgttcatcatcggaatgctttctgtccttgggtgatccaaactgctctcggccatgatccttgcgatgttgatgcccatctttctcgttcgagtcccggcggcgtctagtcgagtaatgatgctcttcatttcgttcttcatctagagacccatgtttttggtaactgtgttcttcgcccgattttcctccagactcgttgagcaacatcgagctgacgccacttacaagcccgcccacaaggccacccagagcccctccaccagcagcttctgaagctattttctcgatgcgaccgacttcgggcttccttctttgactggaattctgcgggcccttgtgcaggctaagtggttttccacagccatgtccagaatcgtgcacgctctctttgtgattcctgccctcccgtacaccttcgcgggaaagctgctcacggagactgcgaatctcgcgttccgatttcccttcccaccacttttgcacggtctcaaacataattcgacggatttctctggcgccatctcttccaccacgtcgcgaggccgggtgatggaagacaccggaaacgattctatccagggttggttctatgtcagcctcttcatcatcccatagctccatcagctgcggcactgtccatttgacaatttgggaagcgacacgaccggccggttcattaagaatatttgaaaagtgatctttggaaagcatcgaatgagtgggattgccgcaagaatcatcgttaaagaccacatgatgctgatccctgctgctatgtatgacttcggatgatccagtctgcagctcagctttcacctgctgaaggatgggcaggacgtagggtgcaagaattgagaaaacagcaatggttatctgttcgtgcgcttgttcaatctagctccggcaagaccgggatcttttcaatagaatcaaatatagacttgagcgattcatcgtgccactccagaacgggatagatcttgttttggacgtcatcgagggtatttagtccactcttctggttggcgaggagaaacatgtctgttttgcttctttgcgtcctctgactcggccttgagctcatccatcctactcactttttcgtcgctgttcccaatcaacccttcagggattttgtcgagtagattctgaaggaaactatcagacggtgaaccgttctgggattcattgatagcaccctccaattcttggatctcggactgcgttgccttgtccgatatctcaccgagcacagagtgaaaaaaatctaccccgccaaaggtgccagtcacaataggataaaccggatctgacaccccttcgatctcgaccttagtatcacggccgacatgcggaaatacctctgattcaccaagttcaatgagacttagctcgacataattggagtgggccgcataatcttccaggcaatgcaaaccggttccaagtagacggagagcttcatgcagatcttcgtcattcctagacctcgcgtatctccggcccaattgaacgcatcggccgaatagccgtcgtacaagggcagccgaagttgcaatatttatgcgctcattcgctatgtagtttttgaggcctgcagggtattagctgaattcagagaagtagaaaatgcagctcacctgtcttaggatcaacagccagttcacgctcctcatcaaccgggcccctgaggcgccggtcatagtctcgggcgtcttcgccttcagcgtatccaagaggattatcaatatgttcagtgggctgatagcaccccaaacgctctgttgtgacttcgaactccttcgtaccatatctaaatattcagtaaaatccttggagacattgtggtattcatacccaaaactcagaaaaccgagaacccataaaaggattcgaatagcctcggcgctaacatattttacagttccaacgtctacggcctggctgtaatcccgcagccaatttccgaaataaactcgctgcacatcaagtttgttgaatttccggcctccagcagcgcgagccaaaaacaagcctagaagagcatcttcaatgtctccatgacgccagttctggccttctatcttggagattgacgcgatattcccagctccgaaggcgtgggctcctccagacaaggaaactataacgaaaaggagaaggcacagcttctgaaaagagacacccataacttctggctcgcagacggtaagtttctggctttacgcggttgataatgaaaaaatcagcaagacagacggaaaagtagtatgatgggagaaagttcaggaagacaagttgacgaagctgaaacatggcgggggattcagctgccccgccatcaggtgcacaaggctccgatcataactacaagagtaatgatgagcatcccggcctcggtactgcttcttgccactaatgtttgcccgctagaattcgtgaggattacgaagaccgcaaaact

SEQ ID NO: 5130 - DNA, 6963 bp, Emericella nidulans
  unsure (1)..(6963): unsure at all n locations
ttatcttatgctgcgcactctggcgggcgttgaggctcgtgagacagaccctattgtccgtgggcattgtcgggttttgatctgagagcttagaggcttggattgagaagtcgctcttgtggggcgttgggcagtacgctgggaatgggagtgaagaagaccagccgagattagagttaggtgataaaattgctgggttgaggattaaccctatggctggaaggggtggtcatgcggagaggccgaagattgaagagattgaatagtgcgaagatgtgaattttgtctcttaacacacctgctatagcaagctttttgcatattcacttacgccttgaattggtagtcggcagcacgcatgatatttcgtaatagattcgtaacacatcctagattacatgcagagataggaagccagattgagaaagccagggtactgctattacaccaaataatagatggactcgctcagtagcgacgtccatggccgcctcggcgggcccctcgccctccacgagccctgaatcctccacgaggacgaaaattcccaccagaccgactcgaagggcgaggaccagcgttcatacgtttctggcgctcctcatctgtcagaacgaacttgttctcaatcccaacaagatcacagaacgcagctgtttgaggattattgtattcagggggctgctgatctgtgttaacaggaacctcggggtcatagaccggtgcagttggcgtaaagtttgcaggaacatcgagcttgccaggcttaacgatgtgctcctcaacccatttttcttcttcctcaatcagtggtctatagactgcttcacctctgttggccggtgttctatcgtctggaccaccactaaggcgaagctctccagcgaaaacgcgcgtgattgccaaccattctttgtcgtattggaggcgaaaagggcgttgagactgagcctggtcagttttcccgtacagtgagtctaactccagaagttggaggaactcccggttcgggaggcatttatctagagcaaggaagttcgtggttttgttggttatctctgcagggaaggggagggtggtatctgatgtagatggaggggactcatgtgaggtaaagaaactagccggcaactgacttcggacgtcgtctgacacctcagagtagcgacttgtagatggctcctgcggtagagcggttccttggaagccactgaccgattttgtcgcagtgaccgtctctgcagaggatctcgctgatacagcccccgcatccaagtcagaatcactttctaagtcgaggtttatttcgtcagagttcttcacaagtggcggctcgtgctcgaccttctgcttcttggcctcgcgcggtgcgctcttttcaatgccccctaatttccgctcaagtccgtcctcgtcagtgtagattttcttccaagtgacgttgtgagattgagtgttaagagcagaggtgccagcgtgcttctcttgtcctgcgggaaagagggagttctctgccgcctcgttattcgcagctacttggtggaaatttttccatgccgataaggactcgcgggtttgagccggcacagactcagccgtctcagagtcatgtgcagtaggtacgggtctattctcgttcatggcctgcgtaaaagcttcagtggttgatgggtaatgtgcttcagttgttcctgtttcagaaacggcgtgcgcgttgggctctgcctcggcctggctgtatccagtttgccggcttgcctcttctgtttcactcaacatagaggtgagagacgcgccatccagcccatactgacggttgggaacaacttcctgcgggccatgctggacggaagccgcaaacttcacgtgtaaatgagcagagaaccagtatgctggacgcagacggttgagtacatattctgctgctgtactaccgagtgttccgttttgcgaatcccggcggaataatggtttggctctgaaaagctgctgccaatcaccacagtattcaatctgtctgggccagtcatgtgataatcccacgtcaatctgcgtccgaacctgaagcaatttgcgcacgtcaagctctcgaacatgatatatgcttttgatgtcatcgtcattgtacgggagcctctcaaaatgcggttttctgtaatcgcgacctttccaaatgccggagaggccggcgatccgaaggggcccaaaacgaagtacgtttgcggcacccatgtaatagatattaggagcgacccatccgccgtagtaaagctcaaacaaatggttactagcttcgtgatttccacctacaaagatggtcaggtagggagcagttcgctgtccgctatagtactcatggaaatccccaatttctttatatttgttgggtacagacatgcaggccatatcgttagagttccgaaccgcctaatgtatcattagatgtgacaatgaagaccgttttgtggcttgaaacgcacctggaagtcgcctccaatgatcaataggtcaacaccatcccatcctttcaacgcagcagctctctcaacagaagcgtaaatgctgtgtagacaaccatggccctgagaaatatgtaagtggcctgaaataatcacagaatagatccagatggatcaaaacaaacttacacaaccttcaatcgcgacgcggacacctgacgattcacctacgaccccgctacctgatgtgttaggatcactcataatgacttatcaaagccagaggccctgagagatgtatctggtgaataattaagcgaactgttcgctcaagggtgttgttactgcgggagataaaccttctcagaacaacatgaccagagaagatagtaaagagagaaaaaccaaaggtaaggaggccgagttgaagagtctctcggcaaattagaagaaaaaattttgtaaagtgggagacactcaagagggttggaagtgagaaagaggaaggagttgcatcgggatggtgattgtgttccagttctctttccccagacacttgggtaatttccctcacgcctttttctcctaatctgaatcttgattttgaaattgttcaacttcagcttcacactcgtcttaatatctcagtcaaagatgcatttcaaagaacacacccctcgattgaactttctaaaagactctgctagttttttaagttccacgagtccctctaccgccgcctacttgatgtccgctcataatgccatcttctatgaagaccacagaccgcttaaccaacggcttcatggctcgttctgtggcgcctgtggcagtccccgaaacagcgaacacactaaggtagcgtctgttaaaaagaatagccagaaacgtttttcttcctcgctgaaaggtcaaaccgcagacggggctactgtctacaagtgcctacggtgccgtcgtcggacagtgaccccaactcgcacatcttccaaaggtgctcctcttattgctactactgtcgattcaactgcagcaaaaactcagcctgctcaagtctctgctagtaaaactgcggaaaacgccagtagtaagaagagagccaaggcgcgcaagcagggcgggctgcaggcgctgctagccacaaagcagtctcaaagtggaccatccaagtcccttgatctgttcgactttctccagtgattttaccattactgcattatcttcgtgtcctaggtcactacacttctttttcaactttttgatgccaagagcccggaacattggggctctgcgttccgagccaaatcgagactagcgcggggctccccacagcatgtacacgggcggtactgttggacctagctcctctcactgacactgaagctctcgagctcggccgttattatccagtctccagtctttccgcttcgctgttttcttttcctgctggaactcactcacccgccacaatgtcttccgacgcaatgtcggactactcccacgatgacgaacacgaccctcagactgatgagctccgcgagaccgctttggtgacgttggaggcattgatcagctcgtgcagttctcagatgcaatcatacctgcccaataccattaactcggctttaaggtttctgaaatatgacccgaacgttgccgatatgggagaagacgaggaaatgagcggaacacaagatgatgggtccgaggacgacgttacggaggagcccgatctggaagatgacgacttcgaggactttgaggaagaaggaggctacagtgacatagatgatatgagctggaaggtccgtcgatgtgcggcaaagcttctctatgccgtcatttccacctatgggcgtggccgtgctctggacgatacatctttgtaccagcagatagcacctgctatcgtcgctcgcttcaacaaagagagggaagaaagcgtgaagctcgaacttgtgtctactatggatgcccttgtacgcaaaaccgctgaaggttctatgataatgacctccagtggatttttggagtcagtcggtagtggttccaagatctcgagaaagcgtagacggcaagatagcgatgccagtatgattgactttgagcccagtatgggtacttcgtccgcagcgggcactcctctggccgcaccttcttcgccacaatcgggtccccaatcagaactggctaatgccttgccagtcattgttcgaagtttggtcacaatgtggaagcaggcctccatccatctgaagcaagccatcataattctgctcaagagcttggctcttgttcggtatgggggacttgcagatcaccttcagcagattgaagacccaatcgccgatgtgctcaaatcgtcattgtctggcgctccctctgcgtctatcggaatatctgcgagcgcggggacactgcagattgaaaccctgagtttgatttctgctatctccgaaacacacgcttcggatgctcttcttccgttcctcattgcactgattcctggggtcatcgttgcggtcaatgataaaaattacaaagtgagcagcgaagcgcttgccgcagtcgaacaaattgtaaaggctcttacaccgcctcgggtgactactgcgtcacaagatcttattttccagttggaaaagctgtatgatgttagtcacagccgtattactgacacgagtgccgacctcgaagttcggcagcgggctatccatgttcttggtgtccttcttgctcgaacatctgatgaacaaggatccgcattcctctcatttgagaaacgatccaagggacttgtaactcttgtcgaccgcctgaagaacgaaactacgcgtctttctgccgttcgcgcgatagatgatgtagctgtcctctgctcacgaaaagatgacgttgactctaactgggtacgtgaggttactgcagagctcggagcacagctgcggaaatcagaccgtgtcctccgcagtgccagcttagagaccctccgcagcctctccatgaatcctaacacacgagcacattatgatggcgaaacgatgaagaatctcgaagagtgcctcattcctctcatcagcgtggaggatgtccatttactagcgccgtcacttatcatcatcgcaaagcttgtccccgggaatgctcagcttcttgtcaacgatggcctggtgtcagctatttgctcgatagtccgtacatcactggctggaacggttttgaaggcgttgttattattggtcaaggttataggagaagagggaagcggattaaccctaatgcaaaatcttttgcaggatgttggggttaatggggatacgtctgtggtcggtcggtcaattggcacgctcctagtccatggcggttcgaatgtcggtgtgcggatggaggatttcttgtctgagctgcaaaagacacaagatcctcagcgccaatgtcttgctctcgccatcctaggcgaatctgctcttcgactcggtgccagttgctcactaactcccaacgtgtttattcctcatttcaattccaaatccgaaaaggtccgcttggcttcagctacggcgctcggaaatgccgctgccggcaatgttaaagcctatctaccaactatcttaggtggtctggaaaagtccgatccccaaagttaccttctcctccattccgtcaaggagttactgcagcatcctgagatggtcaggcgagatgtggcgccctctgcactgaaactttggcaggcattgctcgttgtttccaaggaagaagataaccgtgctatgggagctgaatgtgttgggcggctggcgttacttgaccctcctgcctacatcccacaattccaggtaagtcatattgcccacactatttttccgccgctgactccattttcccgtaaaggaatatctggccaacggagatgctgggatccgcagcatcgtggtatctgctttccgattcacgctctccgactcacgagacgtcttcaatgatgttctcagacccttgattgtgcccctcctcgtcaacatgctcagtgaccgagatctaggcaaccaccgtcttgccctgacaactctcaattcagcaatccataacaaactcgctctaatcctccctcacctaggcgaactccttcctgcggtccttggagacactcaaatcaaaccagagcttatcagagaagtgcaaatgggcccattcaagcacaaggtcgacgacggactcgaactgcgcaaggtgagttcttgtcccaagcttcaatcccaccaccttcctctattcaggcgagttttccgctaacaaacaacagagcgcttaccaaaccgtctatgccgcccttgacaccttgttctccctctccacatcaccgaactctacagccgaatcctagctggaatcgacgacgagcaagacattcgttcaatcttgcacctcatgacctcaaaacttatcaccctcgcccccgaagaactcagcgacacctngacgcgctctcagacgctacacc

SEQ ID NO: 5131 - DNA, 5985 bp, Emericella nidulans
ctgtaaagctttgtcggcgaatgctgggttaatgggtagatgagagtcgtttaagtggaaacttcggtcgtggacgccatgccgtgagtttggagtgggttgagcgttaatggttgttggaggcatcgaattggtgttgtacgtcccttcattagagcatttagctgctgggttgattggaaggtgtgaagcgttgaggaaggaattctgattactgtcttggatgactggtaaagcgtacgaagttgacccagcgttaatacccggcttgatgatcgcctcgtagccgatcgttccctctggcgatgttatggctgggttgatggggaggtgatagttacggaggaaggagctttggttctggtcgcggatggtttgttgagtgcatcgaattgactgagcaatgggggttaagctggcatctatgttgtcactggatatgtcccctgaggttatcgtggcagggttgataggtaactgcgagttactcaagttttggttctggtcttcagaggtctgctcagtgggttgggttgaatcaatcccgtggatgaatgaagtaccggcttcaggtttcaaatcacctgtcgattcggttgccggattggcagtcaggcgaggtacactccaatcgggaatttgggcttgtatgacttgttgatgccactcggaagcaccttcatcttggctgttcgatgcattttccgcgctaaggtccactgactccgcctctggttgtttggtcactaaattcaagggtaaggaacgatcgctcaggcgagaaatgacggcaacatcttgggggtactccaaagtcgactgaatattagcctgtgattgaaccttccccgggagtactctttccagagctctggcggccgggttgattggtaaaactgaatcgctcaggtaagtgctcggttggtcaatggcttgctgagtattttctaatgccacattcgaaggtcgcagaatgtcccctgtcgtacatattacctgctccagactttcggctgccggattgattggaagtgaagatagcaggagcgttggcacagggcgcagtgactccagactagacaggcttttggtcaccgaatctaccggatatgtatcggcaggcgctggtgtggtagctggctgctccggggcattgtagtggatagaactgttttccgacgagattttccatgattcaccaccaacaattccatcggacaagggttccccattggatgtagggtcaaccatcgtcatgtccgtcgatgagcttcggtagcgagggtcaacgtcaaactcgttctcagcatagtctattggtggacttctccgagactgctgtgcctcttccggacgggctaagcgcctcatttgcaccatgtcatccaccacagagctccgctcatcgaagattagtgactcgctttttctaaacccattcaattgcactgcctcgtcatacagctccatccgctgctcttgttcctccctatctgaaaccgttctatcagtttctggcgagtgaatgctctcggaactgttaatcggcggttgttccgggatgtgtgtattgctatgagtgaaatttcccagttgcctgccgcgtgagtacaaaaatgcagcgcgcgaatcgtacaaaggcaaagcaccgttgtgtagacccactccaatgcttgtatggggttgcattctgggcagctggtcgaatgttcctgtttcaggaggaaagagagttagaagttctttggccgacagccgctgtcgaggactggggcttaagcaaatcgacaccaatctccggtagtagtccgggacggggacgtcgccatccaagacgaatggccgtcgctgccgctcaggctcgtcttcctccatagccaatgcccacagagtcatccctagctggaaaagatctgtcttcaccccaatgtacatcgatattcgctggttgctctcaatcttggccggaatctacggtggttcccatccgaccggacaaccttgtctgttaatgccgatgattttcgcatcatcgttggcgctgattacactgttcgacaaggtgaagtccccttgtacatagcctgcctcgtgaatttcgcatagcccctgtacaatctgcctggcccaacgttcccgtcgctcccaagagatcgtcccacggtattcgtacaaaatatccaccaaggctcccttttcggcgaaactaataagaagccctttgacaacctcttgtcggtcatctaccacaattccctccacctggatcacattcggaattccttgaagcgcatgtaaggcgttgatctcgtataagaattcatcgacggtatccggacccggaatctctttcttgataaatgacttgtcgcccagtctcacattatatacaaatcccgacagatgtgcctcgaagtgtaaccagcgttcgggaacaagtcgggcttccggtaaatggccaatactcgagatgggaggataagggatgatttcattcacgtcttcagtgacatgaacatgcagacggccgtcacgtgtttctaatttcaggttcgtgacggtgtcgtagaactggatctcggggagcgattcgcgtatggactcgtagatgcgggcgcatttgtcgcgctggtatcgtaattccttcaggtcctcctccagagattcaggttcggcgtcccggtagtcgcaggatatggtaacgcggcgccatctgttggcggcttcggcataggtgacgaaaaatttttccctctctgagcgatctcgaaagtgcatgctcaggttgagaatccaccggcgatccaactccatgtcgacactatcaacaggatacccctcgggagtatccgtcacctcggggttgtggtcccattctgacctgccatcgttatcctgggtagtctcctcattcgatgccggaggctcgtcgtccttggttattgaggggtccgggtctgggtccggctcgtcgcgcggccagttaatctcgggagcggataatctgggatccacgacagattgtggggacttcgtccgctgtaggctcaatgtacgacggtcggccgatacagcccgcggtcgaggctctgattcaacgggggagaggcggtctcgccgctcggattcttgtctcttgaacgttgtggatcggggaaggccaacgccgacctttctcgacagacggcgcgtgaggttgtcgtgtgatttgggcggagtattgttgcctttgaaacgatcgttggacgcggggggtgaagattcgttgctcgcactcgcaggggaccgagaatgaaaatctcggtcatcgcggccaagccatcgccgaagacccaggcgatgccacatgctctgcttgggacgcggcggctcgaccttgtccgggtccagcaagaaggccagagacgacctgggcgagctattggagctgtctgcaatggagatggccatccagcacaacccaggatttcgagaaggccggacggggttggacgacttgaaatcttgagggggctgggaaggcgacggccataagaaattatcgcggcggaatacccggcggacagggtttcagagggaaaactcggagcagacttttaggtagtcacaaaaaaagaaaagaaaagaaaagaaaagcgagtatgtactgggcagtgctcgaaagagatccggagggaaattttcaacaggtcgtgctgaaggcagacaaatcagacagatccaggcagagcatcgaaaggtcctcgacgagtcggtgagtgttcagcgtcgtaacaggtcgcacaacagcagcaaagaagcagtaggggatgattctaggagttgatcattaaaccaatataagagagaaaagcgagccacaaggatcaagtataaaaaataatcgaggagttggagaagaaaagaaatcggaggggaaaagggaagacatgaaatggatggatggatgaagctgttgctgcgttagccaggatcgcgcttggaatagccacgcgattattatttattattatctatgactcactgaaagataatggttcctatagctacaggcagactatcaaagatcaacaaagagtcgaagctcagagctttaaacgaagttggtagtggtagatactgtaactaatgtagatacgggggacgacaatgcagtaggatgtatacaaacaagcgggcgcacaatgagcctggaaattctgatatccaaaatttctgagcccagaaattctggcagctagttcgaacgaaaacgatccctgctttgcctagtatgattaacctaagactatcactccaaaggacgcactgcggcctgacagtagtgtgcttgatgtccaaccggatcatgcctcgacaacttgtagatttcttttctgtgcagtgatataagactattccagttctatacaatcatgtagctagactcggtagttaattgatttatcgtctacctaacattggttaccgttgcagctcacctaggaccgtttcattagcgagcagtatgagtgctcagggtagtatatagtactcccctcggtattacggctccagcataaactggaagacctgcgccatctacaccgtacacaaataacattccaaaaaatcacacgtactaagcagtccatcacagattcgtttatctctgcgactccacatctgcaatgcacagcccaaacgaaaccaagtccttctcgaagcctgcccttccccgtccactcggccacagttcgtgtccattgttcaaagtgaagctctcattgaaacaatgcacccaatcaactgcagtcatccgatatgactatacgccattgacaattctgccatgctaatcatctgcacccactgaacccgatattgctttgttggggtgcccgcagcgaatgctttacttcggcatcacttactggtggacgtaatgctgcacccggcgccttcccatgctgctggcatgctctgcggtctgcgataggtaaaagcaccacagacgatataaactagacatagactagacatgaatcaccgatcaatggcgaaaggttttcgatgaggcttggaggtacttgcctagagcggtagttggtcctgattgagagccttatcgtcttgtccgtgtgcttcgatgtggttgggacgtggagtttgcgcccaacaacgtctgtcgaaagtacctccagcacttcagcagctagaattcagtagagtcgtttgtgctgtatgagagaatgcatttgcaagtcttgtttaatatatacatgcatatgtctgtagatattgaaccgatccaatcgtacagccgcctcatcatacaatcctcattttccagagtggagtgtgtcaagttctccagctttcttcagctctctagcaaaaaaaagaatcaagagaacctgcaagtctaaaaggtgtttgaaatcgaagcaactccgaaccatgcattcgcaacaaacgcccgttcatgaccagaaacacagaaaccaataatcccaaggctcacagcaacaaaagtctaggtaccaaagaaatgttgactcggtcgagtcgctgaccaagattccaagttcagtggtcgtccttatcgttggacttcttgggctccttcgacagctgcttctgccagacgcggtttgcagcttgcttatcgagatcggcaaacaggatgtcaaacacttcagagtaccagctcactgcgtggccttcgattcctgatttaatgttctagaacgcagaccgttagacaaagcaagttaggctgtcttggaaaacaagcactcacctcaggtagctccagccagtcggacatgttatcggctgggaagataatcgtcttggcaccggcacggcgcgcagccaccgtcttctctcgcagtcctccaatgcgcagcacttttccggtcactgtcaattctccagtcatcgcgatcgttgggtcaagcgggtggttcaatgcaagcgaaagaagggatgtcgccatagtga

SEQ ID NO: 5132 - DNA, 5269 bp, Emericella nidulans
caccttttgcaattttcgccgcctcctgtttcctagtctccgcgtacattctttcacctgctctaactaattcggagatccgcctggacttaccgtgcgaagaggatatttgggcagcggagtctccgcaagcatggaaacagatgggcggtcatttgtcatcgaagaagaatgttgctttctcgtctgcgctcacgacgctgttgaccgcgggtcggcgtgttcagaactccgctgcgctctctccggacgattcaaaaagcagtgaccttaggcctagttcttttggctgctttgtattaatatatgccatacacaattatatctgggaaactcgccaacgccatatgggccgccagtggacgacaagggagacggatgcaatgagagcccatattgagcccgctctccgagcgtggcagactgcttgggcgacgaatccactgcacagcctggagcgacccaatccttacggtgctggccctctctcggctgacagcattcctttgttagacctcgcttatgtgcgcctctatgtcgaccttggccgctgcaaggaagcattttggcaacgagattggaatgccatggctgatgaactggcccggggaacggatgtggagaacgctttagacggaattccatctgatgttttagacccctcaataacagaggacgccctttcgatggatgctcgacgcgactcaatagcgtctctgggcgtaggagagcttgcgatctcacagactccttctcaagagcatcctatgcaaccgctattaggtgcttatcgaccagggcaaaccaagcgcgagaagctcttacgcagagcagcttgttatgctgctgattcattcgccatgtccgaccagctaggaagcacttttgccgacttcacctgtcgagaactaccacttcagagcgccatgtgtacctttgattgcgctcaagtactcgctgaatggaccacgacggtgcaggaacgagtcggaccataccttggaatgctaagccgtgaagatttcgatttcgagcaagctatacaaagccagcttctcgaggatgaagactgcaagcttctgcagaagacacggagtatacttgcgagcattgaacagaagatgcaaaaggacattgcaaacactatgtctgtatcacaagggtcttcgggcgatgcggacgaaggctttggttgcaaaatattagtcgcaacggctggcctcctagacagggcttccgtatggccaggtaagatcgctcgtatgtgagctgtcgactgaatactaaatgacctacagtgatgagactcatggctcggtcactggaatctcaagctatgcgcttgaaggagcgcgcggaacattctgtcataggatctacgcaatgacggtgaaatcatactccccatgctcaaacgcgtgtcggccttccacattccttgagcgcagaacgtggtgtttgggattctattagggactgatgaattcacatatgtggccgcggtaggattgcccttcgcgtcattcgtgctttctcacaccgcccatctctataattggcaccccaagtacacctttgccagaaactcacctgcggaggcgacgttcttcgttcttcggtctcatgctctgaaagtgcaccgttgctacgttctgcagtgatttgatctgcgatggaaagacatcttaatcgacctttcatataccccaatttactggccaatctgtccccttatatctgaactatctcttggagctctcgattatccattaaatcccatttctgactagtgctctatggctgtgaactttcttacatctgcgagattgaattgtaccatttccccatattatacactggtgttgcgtgacttgaactttattatgtgccatgacatgacccgacgactattccccttcccaccagtgatgattttctgacgactctgcgttttaactccgttggactactgctgtgttatgtgatatcttttcatttactctttgtttgttcgcatttgcactttcatggtgcgggcttttttatgcccatgcttatccttattatggcacctgtgcctgtgcttgtcatgtcgcatgtatctcaaaaatttgcttaccttacataggtggagacgaagcagttggaactttcgggcaattatctagagcgtgctttgcctggcgcgggcaatcatccggagggaacgggtaacggtgatgcataatggatgcatgcagcttccatgcgccccatgatattcaaggacgatctggatgctatgcgactgactcaaagcagtgtgatgtgatattgcggatgcgatttgcagagacggcctatgatatatatccatacgcatagatatttatatactgtttgtacatatcgagttaatgtcgatggtttccccgaatattcatttacaaagtaaatcacaagtccagaggaagaaggccatccactcatggcaaacatggagaacataaataggtacctgcatataatttatcacacgattcattttctttttaaccagagatgcatagatacacagccatacaatccatggaaatcacgatataaacagactaaaggaccaaccgctcaaaggtatacttcccaacagccttacgccgtaagtacccaatctcacgtttactccgctgcacgactttgccagttcccttaagcaccttcgtcttgctgacatccttagcggccttcaacgacagcgggagcaatttcccgcttgcatcacagtcaccaccatccgcatcgtcatcctgcgcaccgaaaacaagcaagtccgcaccattgagcttctcgtgacggaccgacgtagatgagggcgccgcgttcaacatatcatcaggtaaggctgaagttgatgaggtaagggagcgggagtcgttcgtcacactcttcgcataccgaagatactccctcagtattccagtaaggagtgtcgcctcctcgacgcccgctagagccgccgaaacctctgatttcatttccgcgatgagcgccatgtcgcggaggcctgagagctctgcttcgctgttgaggctaaaattcaggtctccaggggcaatggagacccagccagaagggccaattgcgtcgacagccgcgttgagaagatcaactattgttttaagggggagggagggggatgtaaggtgcggcgaaatgggggttggaggggtctctgtgaagcgagttgcgtgtccgcctgttgcgagggaaaggcggagatggtgaattgttgtgattatgtcgttgcgggagagggtggagcggagggaagattttatggacgggtgtgggtgggtgtgcaaggagaggagggtggtattgaggccggtgaatgttgtctgcaaagttgaggggggagagggggggaaatcggattcggcggatgttttcgtaagtgcgagagcggtattggttttgccatctccgtttgtgagggctttagtctctgcctcctcgccttgctcggtggggatggagattgagcgcgcggcattgagaaagatcttcagcacgtgggcgagttcgtctgcgctgaaggcagctggccctttaaggacactgattaggcgctgcagggaagggtcggaagtttgcagggcctgcgcaaaagtgccgatgggtagttgagggaggatacgcggcttgtgggcgcggtgtagagcggcctcaacgttgccgggatagagatatcctaggcggatgagccaattgcacgtctcggttggccaaaccgcgacggtgacgttgaccgaggaagatgcggagagtttgtcagtattttcgctattgtctcccacagtgaagatgagtgagagtaagaaaaggaccatttccaggttgacatattggcctggttcaggaagggcctgggtatctccgatttgaaaatagctgtgaacagctcggtcgaacccgccggtgtcatttttcttggcgcattcgcgcactgcacgcgagaaattattccatttctcaatctcctctgctgatgtaaggcccagcgccgctgcggcatttgaacgatgtttcttcgagacattctcccactgggacgtggaccctatcccacgaccgattgcatctatcagcagcccgtctcgggagcgtttgcttggtgcgccggagatgctgtgcgacgagcctaggtcaaacgctaataaggagttgccctttgacgcaaccacaaggtcgagtttcgcgaagtagttgataaacgtagtacgtgcgttgttggtggcggctgatggaaggtcctcggtcacgatcgtgcgctggatggacttgtactgggtgtcatataacgcgatcatagacttgccggcgccgatcaccgactgggctgaaacacgcatgacagatgaaaagttctcatcttcgagaataaatattgaggttgccgttggtttatactgggagaggtcgaaattgacgaaccccttctcaaaggacaagttcaaaccagcagagttggaatggaaatgccactgcagattcttcttatcaaccttctcaccgatattaggaagattggccgtcataaggtgtctcatctgttgactctcgtcgacgccgcggttcgaagcttcggcgggtattgagaacatttgaatcttaacctcactcaaactgatttgttcagtaccaacgggataagaaacgagaagcaagatggacgggtcactgcctcctgcaatcatagagcttccagccgcaagagaaacaatgtccggccgtcgcttcaacagcgatttcttggcgtcgtcaaattccagtaaaaaacagccatggatttcccaactgccctgagggatctcgctgtgttgcatgctccatcgttgagtttccaagtctggagatatccgccgtacacgaccatcgcgatgaatagctaaaacgtcgaatggatccttgtcctcaatctcagagcccggcacaataccaataaagacggtcgggcttgtcgaatcgtccaccccgaatgatgaggaagagattactggtgcaccggttccgctcgcagcactttcctcagtaaaagccttaatctcttttttcatagcgacaaaggtttgccttttcacacctgaggctttcaggagcttccggcgcaacgagcatggcgggcaagaaaacgacgattgcggagggacggcgtaagaggtgaccagtttcgggttttggatctgtcattcctttagtacaggaaccagaggatactagctcacacctc

SEQ ID NO: 5133 - DNA, 4438 bp, Emericella nidulans
gagagaaataagaaaaaggaaacgtaggttaataaaaaagatattgaaaaaaagagtgaaaaggaagagttaatataaagggaaataagaacctagagatgtgagatgtccaatcaggaaaggaattagtatcaaaaaaagggaatatttgcgcaatgggggtatccggaacctaggctgaaaaatatagtctaagccgtgaagcagggcccttaattaaggttccgctttttaaatctgaccgttcggggctttattgaacccttggttcccactgatgtctaaattggtctcacccacgggaaggggtctggaccttctggctccaggagaaccgctgcctcagagcctcaaagcagtctcaacagtagtcctggtggggatccatccctacagcctcacgagggttgatattaagaaaagaggcatcaaactgccgcgggtcttctgacaacaagtacgacgtcccgcgtacgtctgtgctgccgtgatgttctccatctggatgatagaaccgagcaaggttcagtctctggggaggaaaggtcttgcgaaggtcgatgggttcttttaaccgggtccagagctttgaagggctgtctgattgcccaggaagccgacaagcagagccagcaatggcgatcaagtcctgcatgttgggggagtaatgtatgtttatgcacagtaacgaagaagagggcggcaagtatcaagtaaaactggggtttcgatggcagtcgcttcgactgcctcgtagccgcctggtggtagaatgtttcttgaaaggttatacatccagctggtacctatactgcatcaccaaggtatacataggtcatccgcaacgcaggaagagtgggtcctcgtatacagccctaattgctgcgatagatgtcgggtcagcccgcccgccggcgacattggggccgaaacagcgggatagcgggatattcagcgggataacgggaaatccaagcgatacccacaacggtatcaacggtaatccgaggtgctcagatagctatgaagcattctccagagtaaaataaacgggctgcccttggtttgcggagagcagcttggtagtggctttccgtatccgctacctgtcaccattatcttctgcaatgatgagtctggccagcacgcttccgagggcgagtttcgaaactctcctgcagcataccaactttatggatggcataaaattcgttttctttgcgtttgtggtgtattcctgcttcacgattgcagtaggctgggtcgtttatgaatggaaacgcaagggcacgggtgtggcaagatcccccgataccctcatcgtgacccattctttggattcgacatcgtttttggtatggccaagtccctgcgcaacgactacttcctcgtctggctcaataaagtccatgagaacctgccaaagaccttcttagtgaactttgtcggtacccggttcatctacaccattgtgcctgagaacatgaagagtatgtctgcaatcaactggcaggactttgccgtcggtccaatgcggcgcaataacaaggcgactgctccgtttgcggacaaaggcgtcaatactgttgatggacatgagtgggaattcagtcgatttctgatcaaaccattcttcaagcgggagacattcacagataccagtcgtctaaccctgcatgttgaccgtgtcctggaacaactgccagcggacggtgaaacagtcaatatccagccactcattcaacgttgggtaagggccccctttccgttgcttcgaggtgcgaatatctaataccgtggtccaaaagttccttgacgtgaccaccgcgtctctctttggggagtcgatcgagtctctagtctatccggagagagcccctatatgctgggccatggtggacgttctccggggtctccgtctgcgacttcagtggtacaaatacctctggctcttccgccaccaggcatggcttgatgctgtggaagtagtccatagatatctgaacgcacacattgaccgaacgtacaaagagctcgatgagtataaacgccaaggcaaaaacccagaggcggccgatcgcaacgacctgttgtggtatatggccagcaatctgcaggacaaggaagccctccggtcccagatctgcttgatctttgtgccaaacaacgatacgacctccatattcattagccatatcctatggaaccttgcccgtcatccagggatatacgagaaatgtcgccaggaggtacttgcgctgggcgacgcagagttatcattttcggtactgcggaatatgaaatatctcaacgctgtcctcaacgagagtatgtagcttgtcctcttcccacctccacatctgtgactataaggctgacatctatgaaagcgcaccgtcttttccccaacggggtaactcaggtccggaaatgcatcagagatactaccttgcccgttggagggggccctgatggcaagcaaccaatttttgtccgtaagggggatgtcgtccaggtcaacaagaatgtcatccatcgagatcatgatatctggggccccgatgcagaggatttccggcccgaacgttgggagaatttgcggccctactggaacttcgttccctttggtggcgggccccgtcgctgcccggctcagatgctggtgacagcggaacgcagctacttcctggcacggctgatgcgcgtctataagcggatcgaagccagagatccaaacccttatgtgggagtgatgcgcgtgggaccttcaaacaagactggcgtgcatattgcgctgttcaaggagtaagagaagcaaatagctctaggaattctggttgtagatagcttttttcgtagtcggaactttgcagcaacgatgtcttcaaagaggttcccgttgtgaaaataccagcagtgtgccatttctgaatagttgcaagaaggcaataatcgcctacgtggcaatgcagaccttgtccgccttattatggacactattattgtcagatttattgccttagaacacatcacaaatctcttgattgttgcccagaaggccttgcctcttgtggtgttcataagaatcatcaagagagcttactgagcttgctgagcttcattatcaagatatcgttcacaggtatttccccgctgttttcttgcagtacgccagggacagcagcttactcttcgcagatataaaagcagacgtgtttttgtcaaccagcacgatctcattgtctagaatatagttgaccaagtccagcttggggatctagaagggcagctcaaatctagccagggtgcgattcgtcccttgcgagctagaagtaaaggagttggaaacgcatagagcaattgcgcgcctgcatccgacacgagaaacatcgtctaagtgctccaactacataccttcctccctcagtcatggcacaagagtggtagtcattcccctctgttaagcgttgggtacgcatgcctctcagaaaccggcgcattcgcaaaccgccttgtgcaatggttgatgctgcaactttgcagccgcgtgcgaaacactatattgtacgtttcatcagggttgcagcaccaacctatgttagtttgttagattggggtcactttagtgtttatttggatgaggttttttgcattaaaggcgatagattgtattcgcgattgggtgggtcagacatctctgctcgggctggctttgcggatagtagatacttctggtaacaggatgaaatcaagcagagagcaagatataaaccaggaaggaagctatcaaagataactgggtgcagacatcgaataatgaggactcgcctggcactagaaattcctatcgcggcttatgcttagttcgtggcaaaagggtgaatctttcatatataaatcaaagaactaagctcaataatcaatttacaaggcacttctctcttgcgcttgtacatgattacccaaatgttcagaatcaaaaccactggcctgagctataattcgatcagcttcttcctgactgcggacgctgtcaccatgccatgaaacgaagccgtctggtcgaacgagaacaagagaagccccccagacttcatgagcatgcatttcccctggcaactcaacaacctcgagaggcaaggctttcttccgagccgcttctctcagctgctcagtcgacgcgttcagtccttcaccctccggaaacgcaacgagcgtgaaaccgtcaccgaacagacgggacacgggcgttccggtggtcaaatacacatgaggggctcggtagccgggcatggtgcatggtgtgtactttctaggatgaaactctggcggggaaagctctgcatcaagagcgccagggacacaaatattggaaacatagcggtatccatctccacccgatgctttggttatggcatcatgtgtttggagataggag

SEQ ID NO: 5134 - DNA, 4942 bp, Emericella nidulans
attctcgcccacctttacgacaaccccggcgccttcgtgacctgggcttctgacaccaaaggtgctcattgagataccgaggtcgtccagcatgtagtgcagatcactctgacagagaccagtgacattgagccttatcaaaatatcatctgctcctgtaggggaactttaagctttgctggaacttgctaagggtggatggggaaaagtcgagaggaaaggtcatacctggttgcgggactgggacatcctcgactttgacggtgaaatttgggcctgggttatagatgacccctgctttgcagtgggtgggaatttcaaggggggtgatggagcccatgctgccctggcgtgtcctagaaaactgatgggatatagtccaaatcgcgctttgtacatgaataccgtcagcaagcgaggtgaagatatttgcttgttatatatagacccgctatacagaaagagaccctcggctccccgcttttcccctccccttcccctcctctcctcaacccacttaacgcttaacgaatcttccattatggttaaggcgcagaccccggattcaggatccaggatgcacaaatatccttgaagagcccggaccaaagcccggccatttgacactccaaactatgcaccccgccatgaaaatcgccaccagcgccggacccactctgtcccccgtctcaagtccccctcaccaacaaagcaggagtaggcaccggcggttctgaccctggcatgcggaatataccatgctcaaccccccttattgtcctaggaacgggcgggtcaaccttccggaaagcgacgactggagaaccttcaacgccgggatggggatccccacatacccacctgcacgtccaccggtatacttctgctctgtccacttgagtgagcattctgcgccgtcactgccaccagtacatgtttttgcggccgcgagcgccgaggagcgcagtttgggcatcaccatgtcgtatgtaaaaggtgcgaactgggtgctttgtgccatccagcgggccaggaagcccttgaatgcgcgctggtcgactttacttgtgttaatggactcgcaggcgcgttcgtacattatatctttggacgaaggggagtcggcgaagaagatatgcgcggcgttaattatgccttctgtacgttgcttccatagagggtcgccgtttgtctatttgcctgtcaatacccgcagagacgagggcaacatgttgaaggtgaaggggccctacgtagttgtacatagctgcagcgccgaggagatagacgcccgcattatacgtccactggacatggtcgaagttagtgcagttcccgtcaatgctagccccgtcgtagaacgagtagtcgtccgtcatgaatccgacggcatgagtccagttccaaacttttgttgcccagtcagcatacgtctggttccctgtgtacctggccagtcgggcggcgaggttgaagaagcatccgtttgagatagtattcttgtacatgtatcctaaggcaggcagtcagcgccagaaaccgggaatatagaaaaataggcaacccacccgcattccacgtgaaaatctgccatcttaagccaccaccgcaattctgtgcatcccacctccacgcctgcgtattgaacgttgcctgtgccatggcaagccaatctggtcccggggtttcgtgtttgtcccgcggcatgggaaagttcctctccgccgcactcatggcggcaaatgcccagaagccctggtcatcgttcccttctgtccgtgtctggttcgcgggcataaatgacccagattcaccggcttgccatatcaatgcctgacttgtgatgttgttccatctgctgtcacccgtgtagaaccagtagtcgatcaatgcgttgaacatcgcccctgcttcccaccagtagtacggatcggggaggttaccaggcacgtcgccaggcttgtatcccgtataatgcgagagcatgttcttcgcgatggcgtaacatgctttcttgaccgagactgtgggggcggacgggggagtttagcaatggtcgcgttagacgggaaggtggattaccggtgttgtctaggtccaattcgaccccctggacaggaatcagaaagataagcagcagattccatagtatcttcatgctggactagctgcgggcgatagcgggctatacgctggggttgtcaaagggagagatggatcaaggggtgggacggccgtggtcgctgcgttgttgatctcaggcattcctgggatgcgacaggaatgctggaccagcggaagtccacatggtttgttgcgcccgtcgaatcaatcgaggtagaatagtttctgacagctgacttacttcatgaagccggtcccgctgatcatgttttggcccggtgtgggttcggaattgtattcctggtgctggatgagccctaaattccggaccggctggtggagtgagcggccagtttctgaaggctggtctccagaactgactttcaggtatatggctgtcagggatacatttactaaagtgctggctatcctctatcgggcgtttttaatgcatttcatccttgcccgccgaatcgcgagagaaccagagactttgactggatatgcttgcatctttcgaacaggctagacaatgattgacagacattaatgcaagcccagttagatgtctcatattagttcatcattgctgtgtctggcgcgggcatctgttgtgcaacagttcctgtatggctagcaccttcctcacccgagagcgtttactaacccctcttctcttccccaatagaccatctcgatgcattttcctgacatgatccagcaatttacagtactcatggcccttagaaaccgcatcgtgatgccgggatggcatatccagaacaccgaggtcctccagggtcctatcagcggctggtctctccccaatgccgacgtctcgaattggtctcgcatcggctctaaggggactgtcatgggcggattgatagagagcgggaggtacaatgaacagacactattcaggtctgacacgctttcgacgatcgagaaatcccacttccagtctccgtggctgttccgtgaggagttctcaattcccgagctggatgcagggcaccacgtctttcttaacctgcacggggtgagctctaaggccgatgtctttatcaacggccacctggtggtctcgtgtgaggaccagaagggtgcgtatgcgggccgtacgcaggaggtgacggcctttatccgtcctgaggtcaactgccttctcatccaggcatggccaaccgactacctcaaagacatggccatttcgtttgccgactggaacccagcgcctcccgacaacggtatgggggtctggcgccacgtcgttatcaaggtcaccggccctgtttcggtctcgccactccgagtcacttacgcccaggatgaagctaatccgcacagccgagtgactgtaactgtcaagactgagattgaaaatcacgaaaatgcccctcaagacgttgccatccactgtcaaatcgcggtacctggcaattcgcaaaacgtcgcgctgtctcgccgaatgtacttgctgccacatagcaggtcaaccgtcgcactggaaacgaccttggaggatgaccaagtacaaatttggtggccagctgcctggggccagcagccactctaccgggtcgacctcaatgtctcacttccaccaagctttatatcagactccgcttgggccgggttcggaatccgtaaagtggaatacacactgaataatcacggcgacggccaattcttcatcaatggccgccattttcaagttcggggtgcaggctacgctcctgatatttttctgcgtttcgacccggagcgagttgaggcgatactgcgctatgcggtccatatagggctcaatactattcgcctagaaggaaaacttgaaaattccatactgtatggtctagcggaccgtctagggctgctggttatggcagggtgggagtgctgcgacaagtgggaaggctggacatataatgagcatgtgcacggggtcgaggtatgaaaggacgaggactacaggatcggcgaggcatccatgctgcatgaagctgaaatgatgcagactcattcatgcatgctcgcctttcttgttggctccgattactggcctgatgaacgcgcgactgcagcttacctcggtgccctgaaccgcatggactggtcaaatcctgtaattgcgtcagctagcaaacgcggccacccgccgcaactctcctcctcgggcatgaaaatggaaggtccttacgactgggtgcctccgggctactggtggggggaacgtcttggtgcagcgtttggtttcgcatcagaactcagtgcgggttctgggacgcccgagctgagtagtctaagacggtttctgtctgatgtcgaccttgcatcgctatggggcaagccccaagctggacactatcatcaggctccatcgggcagtgtgtttcatagccgcgagatctacaacaaggccttgaagaggcgatacggcagcccgacaagcctggaggactatgtgttcaagtgccaggtcatggattatgaagccacccgtgcgcagtttgaagcgttcgccgcgcgtcaaaacgctgctcgtccggcagcgggcgtcgtctactggatgctcaacagcgcttggccgagtctacactggcaactgttcgactattatctctaccctatgggcgcatactacggagccaagattggcgcgcggccagaacatgtcgcctttgattaccattcaagcagtgtctacctgatcaaccactcgctgtctgctggcgtacgccggattacggctgagtgtatcgatctccgtgggagaagactgtatcaccgctgagagacagttgaggccactgag

SEQ ID NO: 5135 - DNA, 3847 bp, Emericella nidulans
cagggccgctcgctggatgcaatttctgtccacccagggctcgggtgcccttcgagtcgtctggatatcaccgattctaatacagaacaagaagcctagaacagcaggcagctcagatacgtcgacgcaggagagacggtcagaggtggcttcatcagttgttcaaggacggtgagaaagaaaggatgtttgtttagcccttttgctggacccagaagtctccgccttgaaacaattatcttgaaagggcaactctccagacacgccatcacgcaaaccgcctcttagtctattggaagcctgatttgtccagactcggccagcatccattcaggaagctcagctgaagcgtagctcaactctgacacctctgacacgactcgagcaagccaattccgaattaagcaagtatatctatatattttgaccactgaatacgacatttagcatccagcttatccataagcttttctcagaattccactttccctctcaagaaccaaaccgggagtaacgaagagatgaacgagcgagaccagcttctgaaacattccagtgagcaacacacacacacacacacttgaccctggaaactcaatcgctagtgataccggcgatttgcgcgaaaactgggcaaggggtggtagttgaccctaagaggagctggagccgttgatggtatggcgtgacggtatagtcgaaagtgttgacctcacaacgcagatcgaaattgcaagacatgctatctttaaagcaaggcacagggttcgccgctgaagacgcgttcgagtagggcatatattgaacgtgactcctgccgatctcggaggtgatgggagcataaagtggtatatagccttcttagagtgtttcttaccccgcattccgaataaccgcggttgctttcccgctgcggggatagtggcctactcttagatttcctccatcgtcttcggtgaagaggaaaagtgcttgctatcagcgttgaactgcgttttctgtactactgctgtgcaggaacagcaaaagaatgctcgccgcgcaattcgcccgaactccaggccgccgagtcatgacaaagctctcctcgcaaaatcctattcttcgccctgcatccttcctcatcaatcaacataacagcactcgaaaacgtgccatgtcctcccagccttcagcaactcgcacgcgcgccctggtagactgggcaagcgccttgcagttcaccgacctaccacccgccgtcattgcccgcacaaaagactttttcgtggatacttaagcctgcgccgtcgcaggtcgcgagcacatcgccgtaaaatccatgctcgagtactccaagataatgggcccagccgatggaaagtgcgagcttatcggctttccggatgtcaagacaaccccggtctttgcggcgctggtgaacggtggcgcggcgcacgttgttgagcaggatgatttacataatagtagtatgatgcacccggtgggttaccttctggctgagtagatacttgaatgtatattgatcgcggagccaggcgacgatcatctatcccaccgcactagccgtagcgcaggatgtcggcgccactggtagggacttcatcactgcctgtgtggtgggatacgaattcgcctgtcgggcaggtgagtacctcggcaaagcccactacgaggtacgtatacgccttatcttcctttcagttccttcgccattaacaactgagtgctagaaattccacacaacagcgacaacaggcgtgctgggcgccgctgcaacaaccgcctacctcctccgtctggacagcgatcaatttctctcctccatcggcaccgctggaacccaagcagccgggctctggcagttcctccttgatgcaacgcattcaaaacaagtacataccgcgcaaccatgtgcggccggtgtattctccgcctacacttccgcgtccggacttctagggacatccgatatcctcgagggcgaaagaggaatgggcgctacactggggaatctaaccaccacccctgaagcaatcgacagggatctcggacggaaatggtctgtgttagagagcagcttcaaatggcacgcttcttgtcgccacacacatccgagcgccgatgcactgattgcgctcatgcacgacgagaacgtcaaatataccgatatcgaatccgtcacagcatacacgtataaagcggcgctggacgtgcttggacttagcggggagggaaagacggtgcaccagagtaaattcagtatgggtttcgtgttggcagtcgcggcgaagaaaggcacggcgggattgactgattttacggaggaggcgctgaaagatcctgaacttcgggagctgcagggccgggtgaaaatggtacttgacgaggagatcgacgctgcgtttccggagaaatggctggggcgtgttgtggtgcagacgaaggacgggaggacgttgagtaggacagtggacgttgtgaagggggatcccgggtggacgttgacaaggtacgtagcctcttatactaccttttgaggcgagggttcctaacatttggcagggaggagatcgagtcaaaggctttggcgctggcggagtatgaacgtgtgaaggatctgaatgcgttcaaggatgcgattcagagaatatgaagactcgaggagcaggataagataaaccgattctccttttcgtgagattgctcagaacgaatccatctccagctatgtatcggccactgtacacaacggcctcgcttttcccaggacctggctcagaccgttttagtaatccgtattctgccaaaaaacgtgctcagagggaggctcccgctgctaactttatagttgaaagtgatttgagtgttttggccaattttctcaatttgcgcgattcgataatgcgtcattcaagggggggggtctgtcaggacctttctagggcaacatcgagcacgtgcggtgggcatcatcttatatatcaaagaaggagggatagcatgcggtgttaagctcatcccaaactccactgattctcgactcatgatttaccatcaagggccgacccgtctcggtctttaatcggatgtgaatagctcagttcaagatcttcacttttcatacagccattattctcgtgcggctctcccaccaaagatgaattagtgtcgccgagcaataaaagcaacgaacaccctttctctatccccggcatggcccatgcccatcgcgtgaggcttcccgtaatgtcccatgagctgagcagggcgccttatgaactttcagggagtacgggatgcctgacggtaaccctaggtccatggcctgcggcttccctgccagacaaacacgcggtgctagctctcgcaagcgtcgctgcagggaaagcgacgaacttccatgtgactggtcaatagcttcttaacgaggttatgaagtatgagtgctgatcgcactacggctctgtacgcaggggtgatggtgacagaacgtcgtatctaccgcgatccatgaccgtctgagatctcagcttgtcttgtccatggcaagttgtacggcttgcgataggccgatgacgagtgcccgatgtgtaacgggttacgtactcacagtctgctgacgagccgctcagtcgccagcagagaggcttagacggagccgaaggatgccccacgccttagccccggggagacgcttggctctttgggagtgcttcaaggacgttgccccctgcctgataactccactcgtgactcccaagctcaaagctttgacgctctacgagtggtagagcataataaactggctggtcggtttatccagcaagccccttactacgaccat

SEQ ID NO: 5136 - DNA, 2137 bp, Emericella nidulans
tatacacgcatctttaagtcagctctggaatatcttccaggtaacagttcggactcagattcgaacaacgaaccatcatcgccagagtatgtgcatgtcggctgggatcacaattcggagatcctccaagacttgtacccgctatgtgaactcattgaatcccgtatctcgcaaggaaagaaggtgcttgtccactgccaacttggtgcaagtcgatctgcctcgctggtgatcgcctacgggttgtacaagaatccgcaactggacttcaattcgatgtatgaaactgtcaaggaacggagtcgatgggtttctccgaatatgagcctcatctatcagctaacggactttcggtcacggctgctgcgtggctcacggccttcatccggggattggtcattgaaggggtctgcaccaccaacaccgcttcccgacgaagccatgtcctctcaaacggagccatcaacagatgcaaatggcaaccctgacactgaaaccacgtcctctacagttccaacgcaaggttctcccagctctaattccctatcggtacccttgactagccacacaactccggtgtccgccaacaacttgagtttttccaaatctctttcaaagaagcgaagtgtttcaccaaggcctctggctttacgacaaagcttcttcaacccagagagcggtaaccgtttcttggagggtgagtctggtggtgacagtgcagggcgccagtcaagagatccccttgcgaagaatgccgatgagccctcactcttttctccgcgaacaacgggcttcatgtcgatgactaggtctcgaccactgtcaggaatccttgaggatgggcgatcaaacgtggcttcaattgcggatcccggtcacctcctcaaggccatgagcgattaattatgagaagcattgatgagtctctgtgattgcgtcgcaacactcgaaatgactccatgaccttcgcgcttacctatcatctttttctaatattcacttcgactctcatgaccaggagcgggctttacggtcgttaattccttcgcattcacttttatccattcgcttatccattctctctatccattgctgtttgtagtcagtcagcagactgacatggtatggcatgcatgcttcatatggcgtcctaggcgttcaaaagaggtcaaaggttcggattatcgtgcctgttaacttgtaatattattattcatttgttgtggttcggcggtctggcctcggcaaaaaacattccgctcgtgttaactgttaattttctattatgtgatggctggcgaatacccatgctcgaatgcacttgcgaatgcggccgttcttcaaacataccttgaaatgagctgtagaaaagccccggtagcctagtgagtgtctggtttgcctacacctctaggcgcgggccgactggggcccgagatcaacttgagatctatttttttctttgatatgtaccttccgtacaacgctattgtaccagcagaagagtctatcaccatggaaaatacgtcagacgaaaatcatccaactcatttatcacctagtgaactaggcacaaaggaatagtaaggcatagtcatccctcacatgtgggaaaaacatttctcatcgctaccccgcaacccctcttacaccacactgcctatgttcctacactactgatctatattatgctaacaagccgcaaataattagttgggaaacattctactctagaactcttacgcacatttctgcgaaacacaacccgacttccagaaaatccacctccggtgacaccaaaacaacagcttcagatgtcgatgtcgaccatgacaattcagactcggaggacgactacaacgccgactcagaccccggcacctcctggttttcagaacacaatgccccacagaaggtccttgatttcctgacgcgcgagacattccctcttgcgccgtgcaatacccttcccaatgctacggctacatcagacaatagcaatggcggcggcagcggtatccggtcaatacgaagaagagcaaaaaggctaagcgaaatcgagaagaagaaccagcctagcatcctggatctgtgaacaggaaacgggagcatgctcgcgctactgagaaaacgtggt

SEQ ID NO: 5137 - DNA, 3434 bp, Emericella nidulans
cattactggcatttccttgcctgggaaactcaccgatagtcacagaaacatccacaaatttccccctctgcagcgtctcgcttgtatttggtacgaaattccctaggatgatcccaactgccatggcgaggaagatccagacggctaggaaacggtcgaggagacccaattgcttgaaggctgaaacagggccatcgtcggcgtcagcctctggcgagcatccagttgcgcacgctgcttcgggatcacggggatgcttttcttcgttcatactgatgtacgaacttgataaacaagtaaacttgatagttactattgtagtgctatgatagaaaaatgaagacaatggttacagcagagcttttaactatatttttctagatagacggtgtatagaattgggtgaccaatcacaatgggcgagtgacatctcgtccttcacgtgctcacagtacttggtagacgccaagcctgcagttggaatttgagatttgggataacaaacttgaaggcatccgccagccgccttgacttcaagcagactgctcaaggctgaagagcaacttgccggccggtatcggaagccatcataaatcacttcatctccagctcggagacccgcgagtccgactcggcagaccggatatggtccgagtgcctcgactgagtgacatcatgcaatttatgtagaataatgcccagagtctagcttatgcacagattagaccactagtcctctgaaggcttggacgggaagggccttcttgggtcacttgacgacggaacaagccatggatgcgggagaaagtatggctggatctcggtcgatgagcttgagcttgggcttgggccgacaagggccgacaagggccggcaaatcatcggaaatatattcaggcatggaagaagacttgtaatggagcattttggcagactagtggtggctagatgtaattatgcgaatagacgcttaaacgacgcttaaatgacgcttagacaacacattggcgagttgtggagccaggtgctcgaaagttgcaaaacaattagtgagcaatgagcatagattaccatatacctaggtctggtcatgtagaaacatcttgaagatgccatggtcaggtttgcgtagtggcttgcccctggaacaatgactcggagcccttgcggcggatgatgtaaggattgtgtgatcgcgttcctgtgagaatgggataggcgagacaataatccattgtacttcgtcaccatatacctgcgaacagtaaatgggctcgaatgttgtagaagtgcgagacgaagctgtggatgtcatatggcatgtccagatgcgccggatgcggggacagtgctactgtagcattgacggacctgggcccatggggtagcctagtgccggagtttccccggagcttgcagctatggagatagagaaagcattggtgcagttgagtcgtcacgaagacaaattaagacaaatgacagaaatcctgattgtgggaagtgtctcaaggcggaaagatactgctcaatgttgccgtgagtattgtgttacagtaaaggatacaggcggtcggtacctgggacatgaaataatacgggccgcccctgattccaaatatttgcgggcacggccgccaagaccctgaatcctatagtgtgtgagacctcacacttcttcgaccaccgttctctttgcttctgccgaattcacccgggccttcatcgcgaatccgaaaaaccgatttcgaccttcctttacggtccatgttgccggcccgcttactttcctaagcctgaattcagcctaattgccgtcggccggttggctagattatttggcgtgccgatccccacgccgtccccaactcagttgactcttcgccccccgcaacggcaccgaaaacaaaatacatcaccgttctccactaggctgtccgaaccggatttgcgtgtcaataatatgttgacatgggctggagcctgtgcttataacctccttgctgcctccttttccggaccgttttctttctcagtctctcaacttgtcgagccggttgcacatcttccagcaatcatgaagctcggttggcttgaggctgcggctttgacggctgcctcagtggctagtgctcaggtacgttgattcctaggttggttttcgcgaggaggctgattaggtgaagcaggatgacctccccgtatcgcctccgtactacccttctccatggtcgaatggtgaaggcgaatgggccgaagcatacaatcgcgccgttcagatcgtctcgcaaatgactctcgatgagaaggtcaatcttacaactggtacagggtatggtcagtggccgcggaaactgttctggtgctaattggctgcaggtggatgtctgagaagtgcgttggacagacaggaagcgttcctaggtacagctgccggttttcggaactgaggtgatactgactgcagcagactcggaataaattccatttgcttacaagacggccctctgggtatccgattcagtaggttgccaataaaaacgggtatttgagggtacggtgctgactttaccagccgactacaactcagcgttccccgccggtgttaacgtcgcagcaacatgggatcgacaattggcttacatccgtggtcatgcaatgggtcaggaattcagcgacaagggcattgacgtacaactaggcccggccgcaggtcctctcggcagattccccgacggtggccgaaactgggaaggttctcacccgatcctgttctgtccggtgttctcttcgccgagactatcaagggcattcaggatgccggtgtgatcgcaaccgcgaagcactatcttctcaacgaacaagagcatttccgacaggtacctgaggcgaatggttacggctacaacatcacggagaccctgagtgagaacgttgacgacaagaccttgcacgaattgtacctgtggcccttcgcagatgccgtgcgtgctggcgtgggcgccattatgtgctcataccaacatctgaacaacacgcaagcctgccagaacagccaccttctgaacaagctcctgaaggctgaattaggctttcaggggtttgtcatgagcgactggtctgcgacgcacagcggtgtcggctctgctctggctggtatggacatgacaatgcctggcgacatcgccttcaacgatgggctctcttactatggccccaacctgacgatcagtgttctcaacggaaccgttccccaatggcgtgtcgatgacatggccgtccgagtcatggccgctttttacaaggttggccgtgaccgtttggccaccccgcccaacttcagctcctggacgagggcagaaaaggggtacgaacacgcttcgattgatggaggcgtacggcacagtcaatgagtttgttgatgtccagcaaga

SEQ ID NO: 5138 - DNA, 2861 bp, Emericella nidulans
  unsure (1)..(2861): unsure at all n locations
cctggccaaggaggatgccgagaacacagtcgccagcccattcgctctgagtgatggcatcccagtacccccgcttatcgaggataatattattggcggcctcgatggcaggccttgagaggatgaacccggatccaccgtgcgcaaagagaatatcgcggatctgcatttggttccccaggtaccagggctggttaggatcgagggtcgacagccacgacagcagcgacgggagcaggatataggtatctgcttccatgaagatataccagcgggcctcgggctggtggaagactcgcagcgtatgagagatcatcggaacgaatttccacttatccagtttccagccgggattactcttcccaaacgccgtggactcttccctgatcccgctcaggtcagtctgcgtgagcgcctggcggccctgctcctgcacgcgcatatagaggttgaaatcggggagattatgtaacgccgacgattcgttatagaggacatcatgaacggggatatcggcgacttcctcgtcgtagtcgctccagacaatatagttgggtacgcagcggagagtcgtattgcggtggatcggcagtttggtttgggactcggtgaccccggtcttgagcacgagcacgatattctccaggcccgggagaggtgggcagtcggccgggatccggccattgatagagtacgaggggcctgaattgggatcggttgaatagtggtggggtcgtccataatagtgcgtataggcgaagtagaaatggccaaggaggacggcggcgaagagcaggaggaggcggcgctgcgcccgctgggagagggggaacatttacattgattgttcgtgcgatacagttgtgaaggtgaattgagtctagatgagagaaaaacagccagtttgacagaccgacaggggagaattactattatagcggccggggggaagtatcaagatcgacggcgtcgtcatcgttggcgtcatcccacccgaaccaccatccatcgcccacgggccagtcccagtcccgaacgccgttagaacgaagtttagaaaaaaaattatagtaaattgtcaacactaccaaaaagtcaagctgctatgcggccgctactccgccgccaatacaccccggtaccgcatcttcccttcctctagcgtcttcatgcactcgttgatccctttctcattcatcggataccgcatcacgatcggctttaccccatggaaagctgcaaactgcaacatttcgcggtgcacctggcgcgccgccacgatgccgccctgcacgcgcagtcccttgacgagcatctcctgattggggattgtaaagggcttatctgagaccgtcagcgggctgatggtcgcgcggttgtcgaggacgttcaggaacagttcccattccggcagaaaactcgtcgtgacgatcagattgttaagtttgcgactggtcttgagctccttggcgtcctttgttgcgacaaattccttcgcgcccagcttcatggcttcctccttctttgagtcggtcccgctgaaaacgatcacgtagcaacccatcttcgcagcgaactggatggctagatggcctagcccgccgattcccacgatgccgacggtatctgtgggcgtgacctcggcgcccaccagggcgttgtacacggtcgatccgccgcacatcaggggcgcagccgactcgttatcgagcccgtccgggagcttgaacaggaacgcttcgcgccagaccgcatggctggcgaacgagccctgatccaggtctgcaaaaccgtacattgcgcgctcggggcagaaggtctcgaagccagacagacagtgcttgcagcgaccgcagcagtcgtgctcgtagccccagccgacccggtcgcccttcttcaggtccttgacatccggcccgacttcctcaacgtatcccacaccctcgtgcccaagcaccatgtcggcggccttgtagtggaggtcggtgccgcagacacctgagtgggagactttgacgagcaccctgtccccctcgagggcgggtttcttggtggtggattcgatgacccccttctcggatcctttgaagactttgaacgacattttgaaatgcgattgctatgctgttaatgctgttcaatgccgtgcgagttcgagctggctttgtcgagttcttatcgcatcttttcttgtgatgtcacagttccggttcatgatgacctcatgcggaccgaacccagccagttcattccggcacaaccggccctgagctgctaacggctgacaggcgtagcactccagagcgcggctagatcttttgatcgacntagtgggggttaaggagtgtgaggtcacaatccacggtcgggcaatcccacaaccacatcatcatccaggcacctcgacgacgccgacgcaaagcggtttcaagaatcgttccaagaatgcttataaaccatggtgcagtcttggcgggcagaaccgaccggtgcagatcgctcgtgccagttggacccaactggcaggtggcgggctgttgccatgtccttaaggcagtcatgaagagcatcattcatgcgcctgtaaaagtccagaacatctaagcctccgctggccagactttccttttcatttattttctttccatcctggctgtgtgccgcgtcattgccgtttcatcatagtggatacctgatcagagtttatatgaacaggctcgagaacggggacggcatttcgcatcgtagattgtgcttgtgttggctccggtggctctgggtcttgctagatgagcggaagtagtgtggtttaaatcagagccgctgggaggatggcggatttgagaatgcccaaagtgtag

SEQ ID NO: 5139 - DNA, 5265 bp, Emericella nidulans
ctgggcagcttcttgcccttggcctcaaggatctccttgcccttcctctccgcgacctttttcaagagccgctcgagagcaacacgactgacttcgtttgagaagccatcgataatgcagcttgcagtgaaatcaagaagggcttcgctatacttctcaagatgctcatacgcgatggcgcgcctgtttaaagccttgacgtactcgctatccattgcaagggccgcactggtgtcttcgacgaccttttcccattccgactgaacgttgtagcaggcggcacggttcgagtagaacaccgggtcgggcttgcagaggatagcttttccgtatagttcaatggctctaggataatctttggcgccataggccttgtttccggcggcttttaatttcgctgcgtatgctttccgggtctaaattttcattaacaagcggggccgggcaatgacatgaaacgaaacgcacttcctcatccaattgtccaacggtcgcctcgtctacttcagggatttcttctaaaggctcttcggctttcttttctgttttctctgagaaaaaaagtcagcgaatgtacgcgataaatccaagatgcacacaccgtcttggacagaggcagctttgctctttctttcctcctcagccttcttctcctttcgtcgctggctcccgctcttcttctttttcttctctgtaggcgcaggagtagtgggagagggtttaccagaccggctggagtcggagaggtagtagacgacaccggcgctggttaccacgaccgcgacgccggcaacagtatagacgagcgccttgttctcagacacccatttcgagatccggtcccatacggatgctgtggaggaagggtgaagggaagcagtatcgacaaccacgttcctcgatggttcgggcagaggtgagctgcttgacatgatgagcgaggagataacccttgtgcttcgtgtctagtatcgccttgtccttgcgtgttttctgttccccctttttgacggaatatcctaggccaatcaatcaaagtcaattacaataatttaaatagattcagcgggggacgaaccagcaggtggttggcaaaaggccgcgtttcagactggtttgaagagttgggagagatgcggccttgaaaaagattatgcgttcccggcaacgcaacagcgggttccgagctctgtgctggctggcccaatcacgctcatttaaattcgatggccaggtctgcttgctccacatccgccatggcaccagatgggaatcggagcttgaagcatcgtcatcggacctttctgacaaactagaagggttggcaatgataatggcgatatttgatgggcctggcttttcttttcttgcccacatgggttaacaaaactcctgtcagtaactcaggactctcggcttaacctggttctactgcacgtggataggtccaaaattcaaaaaaaaaaaaaaatgaatgcaagccagccgcaaggttttacaacgctgatgaacaatgtcttcacaatcttttgagatcatatccacgctacgatacgacccgtctcttccaacggtagttcgtcaacgactcggcaacactcatacttatcctgatccgctgctctctccgtactacctcctcccgtaccatcaagaccgactccgcagcgccgcacgctacttcaactgggacaaagcgtcagagttcctcgagaaagaccttacccaattcgctcaatatcttgacaccttcatacctcagaaagaacaatgctggcgtattcgaatagttgtggaccaaaacggaagctgcaaggttgaaaccagtcctgccgcacacatcgaactggagaattttcttgttcccttcataatcagcccaacgtctacaccgtggcgggtatttgtggatacggcctatacgaccccgtcggggctcactacacacaagacaacagctcgtgaaggctacgcatctgcgcgagctcgagccggaatcacgacaccgcaggataccgccgaagtgctcctcgtgaacccgcagggagagatcatggagggaagcatcacaacaccgtattttcagcggcgagggcctacgaaacgcgatgtgcctgcgtggattactcccccactgtcaagcggtggtaacgccggtacaagcagacgttacgctctaaatcaaggcttctgcaccgaggaagtcattaccacccgggatctcgttgacggagaggtatgcttgctgagtaatggggtgcgagggttcattcttggtcaaattgtgctcgaacagaaagagtaggccgcgcgatccaaaagaatatagctagagcaaatctttgacctaagttaaaggccatatattcattgcgagcctgtggtgatgtaaagtccaagtcgccgagatccaatatactccatataaaggtcttgcgttggggctcatggtatacaaaatagtactcgtatttaagattactgtgacgccttcagggtggacaaactcgaactcaacttcgaggaatccctgctaccgacctctacgcctctcatccttgcctttgaggtactgtacccttctcgactgccctcgacctctcacgaggaccaagtattataggtaatgatgtcaatgcaccccaatcgcatccaggactttgtgtggtaccatatcacgtgattcaacgtagcaccaccccgcatttacagattggggctagtgcgcaactagctgctcagtggcagaatttctgctccgagccaggcgggaaggccagagaaaaggcgattgagcagacgacacccatcatcccccagccccagatcgccacatccatcctcagcatcataccattctctatcatcgaagcagaatcaattgcgtgctgtgtacatgctacggcaactatgaagttcttcgagaacctctatacatacgaatattcctttcccgccgtctctcttgcctacttcctacgttatccaaacccgtattcgagacatgtcctgacgaccgatgtcatcgatcgctatgtcgacccggcgacacatcgtcttcatacgacccggattcatctgaagaagtcaaaagtgccgtcaggaatcctgaagctcctcccgaagggtatcggcggatccgacaattccgggcagagctatatcctagagaccacagttgtcgatgttaaggaaggctggatggagtccgagtcccgcaacatggaatggactggaatattaagtgtagtggaaaggcaagtctatcgacgccagccattggagggaagtcaagagaagcttgacggtctctcgctcgatgacaagcgaactgaacgaaccacggtgaataccactgttaccttccgctcccgcttcggacagggaaagcttctcggccgtaggaaaacagaggatctcaccggagactatgaagaagagactcccaaacggggattcttcacctcgttgtccactgcaggaatccagcggaccattgaactgattgggcttaaccgtactcgcgatgccattctaaagagcaagcaaggaatgaatgtcgttcttgagcgactgcgcagcggtggcatagtcggcgttcttgacggcatgcgccaggaccgtgaggctatagctgctgggacggagggtccttggaagcgtgtctggctcgcagggaattctgacaacgacgactaaactgcatttatttccgcccctttgagagaggtttgacattggctaaattagtgcggcattcgagcgcggagcattggcgtttgggtttcatttgattcacatggacactctcctcctattttgttttaacattcattttcttcccagacttgctttctggacactatctgtttgccaggagcatgttgctctttacgtgtttgacgagacctgtcacgaaaccatgtattatactaagagctgtatagccaaaccagttgtctcattcgtttgagcacagctactgtacaatatatcgatcacttgccacctgacaagcatatatcaagaagttacaatgtactatctcacattatccttttactataaagactgtcggattacctggatacttgattgtgccgttcgtctgcctgattagtcagcggaatggtttgtccacctggtatagttggattcgaaagtcctgatggcacttctgatttacccaaagagtctccagtacaccagctctttgacataccggcctcgttggcaggacacactgatggacgaatgtatgcatttagcatagctgattgacgctatgctcgcaagacacctgcggccattatgcggaacgtcaggaccaaagggccggggtccctttgcacttcaatatctggttgatgtcaatggctatagcatgtttcccaaggtctaccgacatccaatatggcacagcttctctacctcggacgatcccgcgaaccgatattttaccatacaccccaaaaagccaagtacggatttcgaaccggccgctcagacgaagcttttcgatttctttcgccagctagcagccgatgcgcaggaacgtgaagcagggaaactcgaagtgcccagctctgattctcgcatttctcatgacaaaagcgacctaggcgccgccgttcgagaagaaaaagtgagacctcgacgccatgaaggacagccacaaaattcatatggtatggagagcctagcgcccagacccgaacctcgcttcggtatcgatgtgaaagaggataatttgagtcttggcctggacaatatcgaacgactggcaaatacctcactagacaataacgaaattttgtctggggaacttgccgtgccgtatccgagggaaagtacgcatactagcaaagagcgaaagcgaacaaaaggcaaggtccgtgactcgccttctttttcgcgaaaagcagagatgaccatcgaacctaaatcaacacctgtgggtttcgcacggggacttacggaaaagcaagggaagaggaaactggcgcttcctaccatgatcccttcttcttttgtgcgaaaagcaaaccgacagagcagggaagcaagtcatggaagctttgagtttgtacctaaagatcaggtcatgccaaacccagctggcgaacgacctagcacccgccaattgccagatgaagcgacccgcgtaaggtgctgctgtccgatactaggttttggcaacagaccggccttcggattgctggggagcaaagagtcagcacgaagtcctggcgccttggactgaaa

SEQ ID NO: 5140 - DNA, 4983 bp, Emericella nidulans
gtctggcggaccccgtttcgtagcggtagaatcctcttttcttttctgttttttttttttttttcaagaagaatacgcgctgtcagcaaccgaccaataccgcggtatatttggtcgctccatgttgccatatcaagcatgcacccagcgtacggagatggtgtgatcaacaacttaacgacgatagacgcggcgttgacggcgtagttgctttggcttatctccatttttgaactacgtctatcaccagttctgcctgtgtactccaatggtccaggaatccgagtgctgagaaaaaaaatctagattgttatagactatgtttgctcaggcttctcaatttcagtatgctttcaagccctgatacctgaactacatgcagagaagtcacggaccgagacggaaattttgcacgaataagaggaatctgatgcgctggcaacgctgcgagataatgcgggctttctgatgggagagcccgtgctttcgaaaaaataaatgaaaatgttctcccataccgagttctagccaactggaatacgccatccctacaaacatgcgccaatcgctagtatatgaagatggaaggatttgttggtctagacgcagcaaaggtcagcaacactagcattcgccattcatcccgcaaaaccgatgacgaattcgtggactcatcacctaccataggctacgaaatagatctagactgtcatcaccggcacggagatagctcttccaataatggcgaaacgtggtgcatcggagaaacagcatcgtgacaagggtagggaagtcttcccgtcagcactgagctagagctgaattgccccgcgaaatcactgccctctggctttctgtcgatgaagcaggtcagcgcgcactcttcgaaatgcttataaatatgttgcccattctcccggttgcatctcctggagactactaagtacatttgatcattccgttcaagctatctctgctacaccttgaaatgtaggacaaacatgtcccgagtctggcacatcatcggcgccaacaccgggctcggcctttagctcacgctcaaagccctgtccgagggtgaccgtgttatctgccgtcgtacgcactctgtcgaaagtcccggatagcttgaaacggaacgactctgaaatccaccagcctgacctctcctggccccaggaagctatggacatgtatgcaaaaaaagcactcgcagcgtttggaagatcgatgttctcgttaatagtgcaggctattcgtatatgggtgcaatcgaagagtccgagtaaggaccacctgcttctcgaccttctttacccagacacttcaccccataagagcctaaggcagacgctaatgcaacctcagggacgctgcggtgaagactcagtttgatattaacgtcttcgcccagctccggcttatctgcgcagccttgcctcaccttcgcggacaaggcagtggcacaattataaacttctcttccatcggcggtctaatctccggccctagtaacgggatctactgcgccaccaagttcgcgctggagggtctaacgcaagccctcgcggccgagatcgcgccattcgggctcaaggcgctggtcgttgagccgggctatttccgcacctccttcctctcatccgtcacctctggaaccaacatcgcacctgcattggatgtctatgaggggacagctgcgcatgaggcgcggaaggctttcttcgattatgatggaaatcaacgcggcgatccgaaagagggcgtcaagaggatatgggagtatgtcgctgatgaagggctgctgaaggggaaggaaaagctgttaagattacctttaggaagtgatactggaagtgtgctgactgcagtggcgaaggagttagagaagacagcggaggcgtacgaagaggtgtggaggagtacggatttcactgaagggaagtagggggcctgtcctctaagcctccgcagttatttcgtctgtcattcttccgacttgactattctgttctttcattgataaatggggatccggagaacgctgttgtttaacgaagctgaattgtattatcagcctccgttgttgtaatgatcaccgctccatgcttatcgtagcacacgaatagagcgcgagctgcccacgcaggtgacagatcatcatgtccatagaatcaaatccctgggacgactcgcttcttgagcccgtcgaacagaccccagctcctccagctgctaaaccacaactctagagtatcataggtcaccgctacagatgcggaaatagagcccttatgcagaccaagaggatagaggtctgcggccagattttggtgaggagtacagggctgtaaaaagtattaagttcccgtttccagctgatgtacactcctcttctcataaacctatatgctggtcaacgtgctcgtcgttgatggctcccgtcctttatactgaggagacttgtttttttctccagctctctctgcacttaccgaggttagtataacttgctctgagtggctgtgaccatatggcaggtttatgtcctggcttccgggacattgatgggctttatttgttcgttgactaaccgtggagccttcaagtgactttatatcttcatcaccacatgtcatgccatttctcgacctacattcactcaaaccattctaaattacagaatggcgataaagacagagcacgaaaaactcgccttccggtcgtcctctacgttatgtccaacgttcctcgcagccatggcgcctcgtgtcgccggccgaagtcaaaaccacaaaaactcagtcctagctgactcaacatctttcaacatcctgtccggatgcggagaaagctttacattgcatcacagtatctgagcgaagcccaaacctatggatcagagaagaactctggatattgagactctccagcagtcggtagcagttatactacggcttcaaatactcattggccctcgtatctcgtccgacgtatctgcggcctggtctagctcaagatcacgtcagagttcaggcatgatagaattgcagtagtggtcattgccagtaatgataacttgactttgcgaagagagtctatctcaatccaagttaggcaatactagctggtttcgtgaaggcctttaagactgaagacaccgttgcaacccgtgaatgaagccctcaggatatattgcttgatcatcaataaacggaggacagggatatgggtatacaaggcaaaacaaagtcaggcgagctcctgctagttgaatggacatgacattgttgtgatgagattgggcccccagccttactcttcagaggaagctctggaaacaatggtagacaaccgctactaagacggctacagggactcccgctgtcgactcttcagaggtgtttgaggacggaccactataatgctcgtactaatgtcgatgttctacctaggctgcccagtgcagcaattgcgcttaaccgtgtttccttcatgtcatgacgattgtcgaatatcaatacttaaagctgtcttgaaggcggattttaagccagtcgctgctgctccttacattgtactctgagatgggtagcgcactctgaaaaaaaggttgggttgtaagcccattatataaggcagaaggccgagcggcaagattaacaaaggtcgccagagttagggctaaatgtcaaagcgcctgacggaatactagcactcttctattaagacgtcgcggactatttcctgtctctattcagccaaaaggttaccgtcagcgacaagctatcgtcttcacccatctgtggcagaccaaattcaggagcattcagaccatcgccgcattcatgtttctcaccaaccagcaagagactccgcaagccaatcttctttaagaattgttacagtcacagcgactctgtaatatggacaatcagacacaaaaggctgaatacgagtcaaatatgatccggactgcgatggcagcagtaacctatatttggagtccagagtgcggcgccatacgatcgcctagctattgctagctggtaaagaatttgcccgacagtatatgactggtgacgagtgctaaatcgacttggtctctaagtgactattcccgacctcgcgctgaactatgccgagttgaacgccacaacggtgctcctgctatttccgattcccttgccccagtaggacacgcgtgactcaccaagagagttcgtctggaggtagaaaaagagaagctgactgcagataggcagaaaaaggcagaactcgtcgatggctgtattgggagcatatatatttccttaaacgcgattgcttcctgcaaacatatatcgtcaggaagaatatatatgggttatcatacgataagccgccatcgtcgtcaatgttcgtgactgaacaaaccttacccgtactccaccgaatttgatataccatcggcttcgactcggctcaacaaagccgcaccgacgattgaggcccatgtagcaagcagaaaagcggagaccatgccccatcgccagacttggcagcggtgttctcgctccccaattgctctctcgccgccgctattttagctctacgctaaaataggcactagtttagtagttcgcacgcttctgttcagattactagctttccaccacggcattccgagccgttggtgctggaacatattctggaccaaggcgtgtgggaaaagaatagtacatgttacgcggggtttttgagttgcaattccgattatgatgctcgggatatccgaactcactacattgtactaaatagccctagccaactgagttactagtagtatcgatggcttatatgcatctcgctgtaggacaggcgagaggagcgtactgggggcccatcaagggggctaggccctggccccctttcctccatatgcgtcgcgtgctccttctccatagctgcgtagccgcatcagggtcctcaacgcatggggta

SEQ ID NO: 5141 - DNA, 4261 bp, Emericella nidulans
tcgataaccaaaaacttaagtaatccgtacgatattgacttgtatgcggctatacggattcattctcacagcccgccccgcatcttttaaaacgctttcccacaatgatatggttcctccacacattgaagggagggactcacatgtccctggtgacagtatgaatttgcctgcttctagtacggccagcgaagaagatgaattcaaagccatgtatcacgcaacttatcgtgcatcaacttttgcgctgcggaagtacctgagagagccggtagtgagcgatgatggttctaggcttgcaccgccaatcctcgaaaaaggaaaggcaatgatatgtattgatggatttttgaagctgttttgcgaggaggatcactgaactggctggaccaggtcacgagtctacgatattacgaagtatataggctatttgcatacggaggagtttagaaatgtatatctgacaggagaccaccaatctcttaaatgagcttaactaataaaaaattcaaactggaaacataagtttaaaggaatcttgacagtcacggtgtgaactcgaagtgtgggtgcttcattatatactccggaatgagattttccgaaccgaatagctgcacccgtcatccggcctccaagtcgaatcaagcatatagtcgacgacgatcgtgaacattaccggcgcattctccgtatcctgacgatatcgaactacaaataacctacgacaatcaacacctcaggatggacggctcggagaaccgcttgttccgcttctccaaaccagaatggctcaacaactcgacagtgcgtaacgcgggcgtctacacatcaggcgcacttgtaagatacccttccatgtcccgcactacatctcactgtaccgcgtgaccatttgtacatgactgacactatattgtagttctcgctgggcttttttttccttattgatgccgccgccttttcacatagctatcgtaacgcctcgactgtacacgtcaagttcgtcgactggatccctggaatctgctctgcactgggtatgcttgtcatcaactcgattgagaagtcgcggttacaggccgatagcttcagttacagtgggaacggcgttgcgtggaaggcgcgctttgttctgtttcttgggtttgcgttgcttgctggaggtttggcgggaagtgtggtatgtttatccaacggtgcaggctttcttaagcttgtttctgtgctggattcagtgccggacagactgctaatgatgttgctagacggtcatggttctcaagtacctcatcaagaattatccgctaccgacgctgtacttcggaatcgcgaatgtcattgccaatgggctggttatgttgaggtgagttgggtgttaacagctggctttacgcttttgctaactatagcagttcggttgttctttggatttctcagaacatcgaagatgactacacgtataaccttgcgctttagaaagccgttgcgactaatagtttagggctgatgagcgtatctccttattaccgcgacatgtttcctataattcttgaataatgtttgttcattgcgcttgatgcgaccaattctgtgttctaccctataggtttatttgatggacggcgtatgcggataatgatgcattatttatatttactctgtcccccatatatccggtttcaatcatcatgttgatagcgccaagtttatgccaaccccaagctcaagctgatctgttgatgtattccgtagcgcattttatatcgtcatgctgtaagcagggaaaccgctaccaaccgcgacacgagcttatatctccgctggatgtcgaataaattgcatgcgtaagtatgcttctttatggcgacatcccaaacgacggcgcaattaatactggtagtccgttcgtacacaggcccgacaatttcgaatggtttggaggtaactaagtgaagccgggaggtgacgttgcgaaaagcctttgcctgtcattatatgtgtgacaggtctgtcagaaaagaaaaaaataaggcataagaattatgctttcggctcatgcagcagaaggtggcgacgacgatacagggtgcgccctaagtttatccatgatcatatcaatggtatccatgtccgcggcatccacttttccactggcatatccgccaggaaggtgcttgactagttcattcgtgcctggctgataattgcggacggcggaggaaagggcgtaaacggccttcttgcgaactgccgggacagggtcttgcgtagacatggaaactagggtcgggatggcgttcattacgatgagcttgtcctgagccttctcattattctgcaccgctgtcccgatacaccacgccgccatgcgcctcatatcaggctcctcgtgcttcagaagctcgacgagcggcgtccagagacccaacggctccaaattattcgcgttatcgatagattcgataagctgttcgaagttgtcaaaggcgatcagcttgttctctagatcgacttcgtccgagcgcagggcttccatggcggctttcattaagtcggcttcggacggaccgccgaagagtgcgctgagcatctccggggtgatgttgctgcgaggagcttgcgaggcattattgtttgagtcggaggtctgttgagttgctgttgagttttgaattccccacttgaggaggttgttcatgttcgggtccatgatgtagttttcttgtgttattgtgtggtgtgcgcggaattgagtagatgctatacgtgagaattgaaaagtatatccagagtgaattcttccctaaataggttcagactggtgaataattgtatgaattggttgaaataatgtctgcaaggcagtgaaaagatggcgagcgaggcgaatatgaaaccaaaaaatggttctcgtaggctccagacgcttcacacttcagcgataactttccaccttgttctacgctaagcagagttcaggtgggcacgcaaggaacagtctatgcacagtgctgctgataatcatgctgaaagccagacaaacagagagaagtacactataagctgcagtgaacctaaagcccttggatatctgtgcttcctccgtccttagtggtttcaagtccgtgactttactaccccgccatgctcgagccccgcgatgctgtcatacacccagcacatgcaacctataatatcagctagacttggaattcgagctacagaactggtatctactgcgatacctagcaagcattccgggtttactactaagatgccttatagcttgaccatcttgccacaatggcctcgtacgttaaaggctcgccccaacctcgaaaaggcggtaaaatactaaaaacggtccttagaaggccttttcgacaacgatttagaagggctgagtacaaaaggagatcaaccacagatagtatcgagcgtggttatagagaactagttcagcacatgccttattccttttttttcttcccattttttttttctttcttaaaggacagatataaaaatctggaagcctggagtaggatccccttaggcattgttgaacttcaggaaaaagtgagtcgtcatcgtgcttacaagcagagagcgataataatagaacgaatgagaggacagaccctgttctttgaaaactggacacgctgggctgaaccatcattacggccttggtcgtcggtctctgccccacgaggattcatcatctcgcgaggccacctcagcgcgcaatcattctgcctgagaggcaacacttggtcgccagtataaaagaaccaattgaacaagagacacctatctcgtagcagtctttgtgtagtctgtactttattcgttttaccctctgaggaaacgcggtggcggtgaccattcgactagacgagactaagcccctttggcgcctgaacctccagcccctttccagtccttctgttcagttcgagcggctgtcgagctgctgctgactactccgcctaccgctacaacctccaccaccaccgaccaccaacaaaccctcgactctctccccttctctcctccacttctcaacatccaactccccattctcgctctgttcatcatctctcctcctcccttccttacctgtcaacctctcatttctttttctctttgttcttcgtagttcgattctaatccacccctaaacaccatggaaggtaaggtttctgccacgcaacgccttgcttccctcgcttgcttccttcccctccctccacat

SEQ ID NO: 5142 - DNA, 6229 bp, Emericella nidulans
  unsure (1)..(6229): unsure at all n locations
ttcaatctattcattccccgcgcgggctacctctcgatttaacagtggacggtattagatatccatatatgaagcagtgcagtgatttctggagttttggcggtatacctctcaacaggtcaggttgtattgggttggatgttttctttttgctttattgtctgaacagggtcaacgcgggcagattctcgaagaccttcgtttagaactccatgtttcgttttgggctttctcatgcctgcatatacacatttcctattactgcacctaggtagacctagcttgtcagagcctcgacggcaaaaaagcaatcaattacagggcagatatcatattagagcaatatgaccctttcgaaagagtgtttgcacaatttattgacctacgcaccagacacgccaagaaatttccatggctcaacttgggactaaacggctctgagtgatttgaggactagaggagaaattgttcatcaatttttcagctctacccacctctttgtgttgtagaagcaatataatgagaagaccaactgaacatttggtgtattaatgtgtttgattcctcacatcttgttagaacaatgtgcctatcatcatctctggaacactgctgatggaatatgtattgttaatttcttatgctctatttcgcgtattatgtcctcatgtaatatgcgtagtgaaccaagcaccctctcattacaatgcaacacctcgtgtggacaaataccctgagtaagattgtgcgctactatttttctcagtcatccctcgccttctcttgctccggcccatatctttccctgtgtttcccaaaattgcttgtttacatcctcctttcggcacgtcctccatctacttgttactatcttctgcacatttccgggtgtttccatatcctttgccggtcagactcaccatttcatgttcgtttcagcttaccgacgatggctcattctcatcccaaccgttgcgagatggatgtagcccgttctctcatccatttagctcatgtccccgacgggaatgagaacagaaaccaggacctggatgcaagcgcgggcgtcgacactcagttacagccactctcgcaggactctattctcaaagctgcacaaagcgagccccagcacagcgtgatcaagacggagcctactgatggtcagcacggagaacctatccatcatgcatacaacatcagctatctcagatcacctgcccagcatataactcctaattctaccccagttcagtgcccaccgcagactggggctcacgctcacgctccggtcttggcttctcctatggctggcggaggagaggctcttcaaggacatctcatccggcaacagcttctggccggtattccgccagaggacatcattaccatcgatcggcactatcaggataacccaaacactaatataaatacgccggagaatccttcgttgattcatatttccaatcaaggcgtgttcttccctcatgttccgcctgcaacctacactcctcaaacagcctacccggtcctaaacgtgaataggatgaagggagaagctccaccttcgcgatatttgactgtacctacggagactcacttcaatcacaaagcaacttttgagcgtgctccagctaccttcgtcactaacgcagcggggaacaccctgggtgcatatggagatctggaagatcatcatatagaaactacaagtttctctttgagcatgggttcatacgctcaaggtgaatacatgcccttagaatatactcagccggcgagcgccctcaatctgaacaaggcggagtatctctttggatcacactcggctatcaagaacgaacctattgcggtaactccacggcacatcctgcgaagtcaggagacaaatgcctctgatccacaatttgttggaacggcttatgttcctcatggtttccctagctcgcaatacgaaggtcattcaggtcttcgattaaaccggatgcaaaagccctcgaccagggacccacgaaggggctatggaaccatgtatgaatatgatagagctacatttggaagttaccaaagcacgggtcaagcttacactgctagtgagagtgatactggtcagcgcaaggccgatacacctaaatgtccctctactgacgtccaaaatatccaaactgtaattgagggtgagagttatggcgtcaatcttaataccttcaacatactcctcgctcttttcaagcacccagagatcgccgtccgacttacgggtgaactttgtgttcaggatctcatcaatctacagtcgacgtcgagggcgtgtcatagcttcacggtcaagtaccttccgaaaattgtgcggcttcagacactacgccggtcgcgtgtggcgtcccacatcttcccgtggcgttgttactcgaagctacggtttaggcgaattgcaataggtaatgaaatcgaccccttttccacaacctgttccgtcgactctgtcgtcgcctctaccgcttctttgcgctggttacagatggtcagatcccgcgatcaaaccgttcatataattctcgcctgtctccaaagagctggttatggtttccctttgcgctataggtttgccatcttcaaactttggttcctgatggacattcccgatacagcgcgtcgtgtatggaccgtccagaaccggaatctctggacagacctcgatctatttatggccattttcttcatagtgcgacttgacatgtacgttaagatcatgcgcaaaaatcagactggcggccagcgacgccttatcatggctcagcctagtctttatctctgtcgcgatatgctgcttggtcgtgctctgagaagcgatatagagcttctcagggccctaattcgctggaggtacaatcctcgacctagtgaagtacctgaaggtgagatttttggggtgccgtctgccgaggtgggctctttgcaatatgaagggtacggcaaaggtcgcgaacagaacaagaaactgcggcgtccagatgaggttattctacaagaggcccaaagaagacggcttgatgttcaacagatgtacgtgcggatctttatccatggccagcctcagacatttgcccaatgtgagcgtccgctcgtcccctgggatctggaagtcaggaatgcgactcaagattgtgatgatcccattggccctttcttggtgttagactaagctatgcttcgcttagggctctccatatttaggctgagactacaaaagaatggaaacggactagatcagctgtagcattttattgagataacggggaggtgactggggtcactagatctattgcaaaaataacatctaacactcggctcttttcaaggtacacagtctgatacatcactataaaggtctaatcccgcctgccctaactgatatgagcttaacagattgatgagcataattgaacctacccttacgccacctcctatctcttaacaatattcactatatatctactttatcaaacactaaacaagaatcttttcctccaggtttctccaaccaaccctcatagtcatctacggagatgagaataaatcacgtgtgtggagggcggcaatatcacgtggtacttgctcgtggatttcggattccggagacagtggaaacctcgacctgtcatcaagctcccaccacggatcctggttttcaacaacgccatcaatctggtgttatcctggctgttatggaacgaatatctcgctgtttgatgggaaagtaaattatttcttcacatgcccgaagctctttgtctgcgatgggttctcatgggttggatttgaatttgtcaaggtcacagggtgatcaatcgactcccggcccccaccgccttgcctgcaccagtgcttccatcccagcctccgtgctaccagcgtcaattatctttggtcgaccttgacatgagcacaggttctaccctcatgactcgcgtatcactacggggtccgctcctccagattcacttagttcctggatatgtgctcagctatgaggtatgtatgtcgctgggatctaactcacaggtgttcgcgccagctgctgttagcaatggctccacgcacagtgtcaagaataatgccatactccgcgtaccattgtcggggttgtcgcattgacttgacctcaaagctgctgtttgcgacccgtaagcagctagtttttttcgaatccggattccnatttctcctgacagacagtggcggtgctttttattctgtnatcaattgcccagtaaagtgcgaagggtttgatatcgccttcttgcgttgcgagagagaatcttagctttgctcctaagatttttggccattgacattgcgttctcaagccggtttctcaggtcaagccccacgggattgcgcgtgtcgctttgcgttttcttcctggcacggcacatcaatccaggcagatgccggggattcagcttatagttgtgccctaccgtctggcgctgacggtcatatgcattttgacacttttatgcagcgattatttccgttgcaacacaactacaaccaggcgccatcaccctttttttcagtgaacgctcagcttcagtccctgttgtttgttttactatgcgtagacaggcttcctttgacagaagcctcaaaagtcgtttcctctcgccgaggctcagcgggtaggccgttgttgacatagcggctattgcgaaaaatgggtcaggaagacgactgagcaggctctggaagcggcgctgagaaagccctgcaaaaccgactgcaggttctcactgaagaagccagatgggtgtggggatatacgaaatagcgggcgagatttatcaaggggcaatttagcaataaggcacggcaccgatgcgacgctaggaagtgggcagctgtttgcaatgtccctcctgtgtcagtgatcgtctgggcatgacttgtttcgcggagtttcagctgagaaaaccgaaaaggctctttctctctccgctggctaacatttgcagtgagcccaaacattcgtagtaagagccgcaccgctgcggaagtgcaggcaagtcaggcgtctggctttaaacccgccgccgaaagtaaattggctgccagttcatggcttttgtactgatgccaccaagtaccacaaagtagaagagagaggccgccaccctcacctcattaatgtataaaacaggtgcgtgccccttcccaagctttttttaagggccttcaatatctgatttattctttgctatacgtttttattgacactaccgcgatatgacctagggaaccattcatcagatccagcccggaaaaaccaccggtccgcaccaccaatccccgaaaggctcaacacaggcaactcacgcttgatgcggcaaacgaggaccgccgccaaagattcatcatttgtgctcatcagcagatctggccacttcctcgctaaccagtgtcttgcatcgtcgtgctgttcgtcggtaaaccttcttgaaccagatgcagcaggaagcgaagattacatggctgggtcccataggagtccggtgctaaaagaccagtggagaggttcttccggcgaagttggagaccagcgtggccgtgagaagcatagtaggcctcgaggctctcaccgcgatagggggagggaaagatttcgcgaccaagaccgtcaccatcatcatccgcccaacgacgaccggcttcatcgctcgtcacggtcgccgccaccgcgttccttccccggtccggataacaaacctcaacatcgtgatttttccactaacattgcttccacccgcgcttcaccagccccatcacgctcggaaatacggccgagccaaaatataaatcgacctgattctcctgaacgcatcggttatcgcgttactaattcacatatgagatccgcagaaagaaaccatcgccgagaggattctccttcagctcctccattcaaaaggcaaaggacacacagtcctccacctgacggtttccagggtcgaccgcccacacactcacgtggagcacccctagacacggtcgcgatttcgatcgggaaccttcacacagcaaagggcgaggagggcgcccgccaggccgaggcagacctagttctaggccattccctcgatggagagggagcggcngaaacacgatagcggtcttcgggatccgcaagaaacagacaaccctggtctatgactggaggacaaaccgc

SEQ ID NO: 5143 - DNA, 4757 bp, Emericella nidulans
ttgcctgtactattagcctttttctgaagagcgagccgtgggactaacctcttggacgctttgaccgctcaatatccatcactatgtctacagtctgatcgatttgcatcagacattctcccgacgacggacagacggggcgcacatcgatcgccatgctttgccaagcagcatcaaacagcttatgtccgtcaagtaagctagccaccccagccttccctttacaaggcagtagctttaggaacggcgttaagttctccgtgcagacaacctcgccaggaagggttccgtggagcaggtgcaggttgtccgaatcaacatggtgaccggtagcctcgaacgatgcaacaggccgcgtcgttctcgttgaatcgataaagttcaacgatgcacagaaaagccctgacaacgattgtgtcaatgtaatccacttcgagaaagctctagagacaacgtcagtaccaaactactgtaagggaggtttaaccacatacatctcatcatcagccgcctcaatccacgcccatagttcgacgccggtgcctccttcctttgctccgtcccaaggacgcgagccccagctttcagaatcccatcgcccagtggtaaaccggaggtggagttcacgggtgtttgcgtgctgtaaaatctgaccaagcgcgcgagggaaatatcggaaatgctgctgctggaatgacgtctgtgtcgcgttgcttctgaaattgaacgaggcgagtaaggacgagggcggaagcggttgtaggaggaggttttcgtgatagttcgatgccgcggagccaacggacaacgcggcgatagcgagcgcaaggatatagatgatagtcatcacgtcatgcttgtcgtatcaaggcttttcgaagctcgattgtctttcggtcaggggctagaagccatgtaaaaggtcgacttcggctgcgtgaagcgcgggcctttgccgaggcgattaggcggaattgatagcacgttgcgcttcggtcgcaagccagaaatcaattcagagtctgtccagaggcaagcgtttggcagggtagagttctaaatatcgcactggccgagagaggacaccaggcaaggtcctgaaggttctccgtaacgcggagctaagatagatatccccgctaagccatattgggcgtagcgtctatagtccaagcactggatgatattgattgcgccgtcagaacgagacgtttagtacttctagcctagacgtagtaaagcaatctattccagatcgcagttcaatgtttgcccctctggtttgacaaacattccggtagcctagcgcctagcccaagccaatactcgatggaccaggacccaaaatataaacctccaaagccagaacggtacctaggtcaattgaagtaagccttgtttagagatttcaagatactaaatggatattctgtgtgccctgagaaaatgcacagcccggaagagcccatgcgccatgaactcagacgaataacgcctcggttccacgtgcctttcatggctaaaccacaaaagagccagtgctccagcctcgaatgctgctccggatccgcaccatcaaacctggccagcgccagcacctgggctgtacatatacgtaagtagtctagattgtattgtgtccctgcagagaagcccagcgtaagataccaggaagttgtcgcttccaattcgtttgtcacaggcgccagtaatcactagccagcactatcaacaacctggccttggccgttgcaggaggaagatcgaatgacgggcggaatgacctttgcgtctttgaggagaacatacaggcggcgtgagatctcttcctttccggagcgaagactagaggccttcttgggcgtatgaacttgatgcagctagtcccaatcttcctgcgagaagtagtttccatataatggatcgagacagagttctaacagtggagcgccgactgtctagatatgccccggtcctcagttgttccgaagtccaaatgttgtatgtttttagatcaccagccaacattttgttcagatccaagtgtgctgctgctgcttaagtctctgactagaacctggggcgccatagagttcagtgtacgcggtacttgtctttaggcaaaagacaggccggtttctggtgcttttcagaacagtcatgtgaacctgcaggtaacttgttgaccgctggaacagatttgtgggataagttagaaagaggagaaactatacccgtatccgcgtagctggcttgattaatctgcggacatatagctgaaatgatactgttttggaaaagcaaacagctgcaagataactccacagaatagtcttagtcgtggttgaacaacaatatctctacggaaaacagttgtcggcaataaagagggaagaaggttgtctggacagtcgagcgggtgcttacacgattacctaaagggcgtaagcgccatcagcaattagcgccaatctccaatttcgccgccgtttaagtcaaccatccagcaccacctactatcacacccttcaatctcgagcttgccacgtcctcgctcctcacagtaaaatggcggccgaacagagaaagctgctcgagcagctgatgggaggtaaatactcgattcgctattcacaacactaaaacccaggttaacaaacttcttcatcgcagccgaccagctcatcggaatccctggcgcgccctcgcgcaacgcccagctctccatcaccgaccctaaagtttgccgctcgtacctcgtcggaacctgtccgcacgatctattcacaaacacaaagcaggatcttggcccctgtccgaaggtgcacagtgaaggactgaagacggaatacgagacagcttccgcggcggacaaggcgaaatgggggttcgaatatgactatatgcgcgatatgcagaagtatattgatgactgtgaccgacgaattgagtctgcccagcgacggctggagaagacgccggatgagatccggcagacgaataatctggtacgggccacggaacgcacgccttgaactgtgttagggactgaaatatgctaatgctttaactacaatagctcaaacaaatatctgaccttacgcaaaccattaacaccggccttctcgaggtctcggtccttggcgaaaccggctccgtcgcgcaagctctcaatgaattacacaagattcgcaccgcaaagcatcagaaggaaacatgtgaacgcgaactcaagaacttgcaagatacatccggcccatcaggtcaccagaaactccaagtatgcgatgtctgcggcgcgtacctgagtcgtcttgacaacgaccgtcgtctggcggatcacttcttcggaaaaatgcacatgggttattctgatatgcgcaagggatggaagaagctacatgaggagcttaagggtcgaccgccgcccatgagacaccatgatgaggacgatggtggtggttggggcggtcggtctggcggtggaaggggcccgaggtatggtggtggcgggtataagaagaggggtggacggtggtgattgtttcgtattaatgtctctatactgtggatcttatggtcactttactctgtatgtactgatctgggtttgcatagcgcaggcgttctgtttctattatgcctaggatttaaaaaacaaaatacgtgggtaatagaacctatgcgacatttactagctacttactgcataagacgaaatctccctcagttcaacgtattagctacttgctaggtggaggatatgtcttgcaggcggtaaccaaccatgtatatgaatggctttcaacctaggtgtcgaacaacatccaagaggaaaaaaaaaaaaaattcataaactataccaagtagaaatagatcccatatgattaatagaaactcaaccttaatccattttcgaccctcaaaaaaacgatttgaagcacttgtgtccatcctgttcatggatccgtccattaagtcatgaataaaaaaaaaacacgaaacaccgaggcgcatgaatactgcgaacgacagccggcgaatgagaaaaaaatagagaaacgaatagaacaggatatagaacctcagcggaagaggatataacgaaacaacgaacgtattgtacagcatatccttccctgcagatttcgctactgcgccggctgctgctgctgtggcggcggatgaccgttcccactcccagttccactcccatttgttctggtccgttgattctccaagtaattcatccattaaggtagtataaacagccgctgcctggggacgccggtcaagaatgtcgcgatcgacgttcagctgtgtcccagtgatggttggcgccttctggaggagctcctggatcgcgggggtatttgcatggcctcctaagacctgaatggcggcagggagaccggtaggctctgttggcagctgaggttgtaatgatgagttgtactgcgtggcttttggaggtggttgttgatgctggatctgcggctgtggttgtggctgggaatatggagccgttgcgtgggatgcaccggggaatgcgggtgatggtgtttgagggtattgcaataaatgccgagggccgggagttgcgaagggttgctggggtgtgccggaggtgactgttaacggacttgctgaagccgcaggttccatgcttgcgtgcagcgatgggggttgcacggatggtcggttcgactcgcctgtcttcacggcgaataaaacaaggaaaaggcgttctggggttg

SEQ ID NO: 5144 - DNA, 5439 bp, Emericella nidulans
aaggctggctcggagtcaatctggacgtagcgcctatcttcgcttcacctccgtcgcccatccctcgataccctcgcctcgactgccgggcgtcaagcccaagtcgacctcctgcattcctcgcgtatccttcatccattcatgagatgccattccgccggcattggcccgtcgttccggtagcacttctagcatcggcaggaggaaatcgctaatggccttggcttgtgccactgagaagtgatacttctcccgtagtacatcaggtaacgaccagtggcggagtcggtgaatattgcgcagctcgcctttgcgattgaatatctcttgtgaccaccgacccgagagacataaagatttagggaatggcccgagcaactcaataacttgggctatgtgatcgtcatctttgccgtaccgagtacctgattgaggatcaaacaggtagtcaccggtgattagttcaaaaacctacgcgagttagttatcgccatggaaaattggggcaaaacttaccatgcaagccatgctccagatgtcggtgctagcaccccatttggatcccaaaatgacttcgggcgaacggtattggcgtgtctgaatgtcatttgtaaagtggtggcccacccagcatgcattacccaaatccgcaatcttcacggaaataatgccgcagtcaatatcttcatcgcttgagggcttgtcaagcgaaatcccagaaacctctcgttccaacaggtcgctgtcatctgttagtgaagttccctccaaaagccgctctacgtacgcagttttttctcgttgcttttgttgctcatcctcatccttgatgccaagcaactgtcgcatggaaggggcttctgatgtgcctgtccaatcagcatagttcaattctccgagatttgaaagttctaacctggcgactcattaataacctggctaagactgctgtgggaattttgcgagctgtgtttgaattcgaaagtggtgttgagaggactaggcaatggctgactcccggtgatcaacgtcctgcgcctccgccgaccgttgcggttgtcctctttttgctccttcttcgcttcctctttgacataggtcttgacgatttgctccacgtcgccgatttcgatcagaacgttctccggtttcaaatcggtgtggataattccgcattcgcggtgcagataatctagacccaaaagcacctgtttggtaatctgcttcaccaggggcataggaattcccctgtgattccattttttgatgaggcccaaaagattttcgcccaggacttcaaataccatacaaacatgaacaccgtggggtcccttgtgctcgaaagaatccaacagactgacgacatgttttcggcctgggtgagagggattggcctggacgatgcggtttaacaatttgatctcgtcgatggcagtttcggtataatgagcagccgatcggacgactttgagcgcgacgtgtttccccgttgttgtgtcgcgagagagccagacggtcgaaaagtgaccccatcccaatttgcgcacgactacataccgcccattattgtagagttcgccgatctggaccgggtggtaaccacccttgcagtagtcttctgaatcttcctcctcggcggtagtttcgatttcttcttcggaggacgaggacccagatcgtgacggcgggacactaatcatgacatcgttagaacgtaacacgatggagagaagaacacaaagcaaagaacggcgacatacttatcgcttgtcggacctgtttgatcggccggcgtcgcggaatcgctagtgacgatgggcttcaagtcggtaccctttctcctcttcttattggtactgccgttggtggcggtagctgcgacgttggaggccatctgcttgcccttattaaggacagattggaaatcgacgccttccatagctccaggcgaagatagatgaaccgatcgcgaggagcggaggaagtataagatggtgggatgggagaatgaggggctgattgttgggctggcaagaccgcagcggagcgaggaaacttgagtagcaggcgggagtcgaggtggttggcggcggcggagcggcttgggttgtgcgaagctgaggggttcgcccgcaaccagaaagaataacaaaaacagcaacaatttttgaacaaaagactgcagagctcaaaacaaagcgaagtgtgccaggcgtcagaaaggcggaaatgctgggggaagagattgagttggaagacccaggagaggcgaatgacgcaaacgatgaatctccagattcaaagacagcgaccaggactcaaggattaagattactccgtctggagtagtagtcaacacaagttctggattccaactgacaagaagagatgcgagatcgacgatggagaatgtccgcaagcagagatgatgctcagcgcagcacccagcacaccgaagtggcaaaaccaccgcaccacttagctcatatgaaggcgatctctagcagaaaccttagcattgaaagttgagataaagttgacctgggaataagaacataatatttctgcggtcggaatatatacactcgtatccccgcatctctgcccagcgcctatctgaccaccagcggaaacctcaataaaacttcaatagtcgatgctaagagctaattggaaatcattgcatatacatagtaaccatactatacggactactcttagtacagctttgttgcccggagtgttcggatttcatcgctgcaatgcgtccgagagaacacaagcagtggtattgcagcctggcgcgtggcattacatcactagcactaggcaatggccaagtctccaaagaaccggcgtggagatagtgctattctgtgtgtggacttaagcgtctggtcccatgtaccacgtacgatgtcgggtcctcgtctgatacgtcggagacactctccgctatttctgaagtcggggttgggatacgctttgacattcatacatacataggttggcattcagcatccgcattgagaatgactgcatttgcttctcaacaggtcgtaaagaaactttggggattttccagtgcaattccgcctgtaatgactagcaatcagccccaatcgtgctcatcaattcaccctgccgaatcatcatataagaagttataagtagaacttcatgcgttgtatatctctacaaacactttattcaatcggttgagcttcatgatgacaagcacattaaacctgagatgtcaaaattgcattgtgcgctggaacaatcgtttttctagaaatataatcttgccgccgcgcattccaccctcattctaggatgctaagcgcaatgcttaaaagtaggaataattggcaatacatacaatcatcctcagacgttgcattgatgttcatagaacaatctaggcgtctgctcttcctctatggctcggtcgtccgggtatcatgggtaatggaaccgttcggacctttatactccgcaaaccccagccatagactcaaggtcaatgctgctacctaggtaattgggacctacattgacacacgacagagtaggaaacatcagagtatattctgttcgagaagaagaccgtcagcgacctgtccatgacaagtagtatgcatattggaagtgctggcatacactcataaaaccaggctccgattacagtctgacagccaaagagtggtatgcgctgagactcccctgggccggtacggcagcgaactagcttgtaattcagcgaataatatgctggtatgaactggaatgatcttcatcccttggagcgactagatcagccctcagtcggcctatatagggcaagtgatagagccagataacaggctgagatcgagccttgccctaggtgtcccgtaatcacaacagtatctcgcatgataatgcagccgggaatccaagatcaaggataaactgtcaatcaaagcgcgaccgtatgcggtgtgttggagataattaacgggtggcatctttttgtctacttctttcacatagtcactgacctatgataaagcgaagaccaatatgatatgtacaattttttcccgatagaatgcagtgttgggtagctatggtattctactattcaggaatttgtagggaggtaagtaattgactactgaagtctttctcaagctgtttatgaaggatgtcatagtgacgacaacagggccaagtcatgtgcagaaacccccttaacgtgaacaggaacgctttcatgtgagcacttctagataaattccaaggtatctattgaccagattactgtacctttacaacggacaaagccgacaaaatgcccccgaaacgcagaactagagcttcgaaaccgcaacctgaaaaacaaacctatcccttatctccagaccaggaaggggaatccccacagcgaaatgacgcggatcaaaacagttttaaatgtcctgacaacctaacggacaatccagaggagccaatggagcctgacgaattcgagtcatcagggacgttcccagagacagacgaagacatgcctgaggaaacagaacgtgcggctgttgaagatgaaggcgattcagctgatagagagactgccacggagaagaaacggggctttgctggtggttacaatgcgctaaagtcatacaatgggaaatactattctgggatggcagttgggggctcgcatacttggaattatgaccagggaatctggaaggagaccaaggaggagccggatctgtggaagatcgactataggactaataagagacgagctaggaaagctccaaagggtagcggtgcgcccgttggaacagagtaccactggcttattgttgggcatcaggtatgaatttcctttccgcaggtacttttaagcggtaaagaggcctgtgtttttttcagcttgaaaggactgtatctcatgatggtcccagtatgtcaagaaggtcgatgccaacacatatgagactgtccttgaggggtccaagtataaactggcgtacaagtcggccacttcgaattcgtggtccgtgccaactgtgaagaaacagcgagagcgggaagttgaactattagaagacgcaaagctgcgtgttcagggtctgccgcctgtttccgagaaggttaaagtcgagaaacaagagaaaggacagaaaaagctggacgcaatgttcagccaagggaatgtggcagggaagaagagaaaggccggagaataagtagctggtatggcggacatgtgaggcagtactgccttgtcatggaacagtggtttctggaaagattaagggaggcgtggttaatcagtttctttaggacaacaaccacttcgaacgacgtgtctcgcagatgttggcagcagtgagtttgacgtgggacattttcatgacggcagtatcaccaaataatgtggtc

SEQ ID NO: 5145 - DNA, 3954 bp, Emericella nidulans
catgccataccctttccgacgatacccgccgacgagaatatgatgcgagattaaacctttaacgagagatggaagatgatgatggagtacccggcggagagggcggattctggtcatcatttggattcagttcagcagaccgtgaagagagatcgaacgagcagtttggatctgtgttcgaggagatgctccgggaagagggtatggatggggcgggtgcacaaggagcagtgtcgcatttttggtcgattgttgggggcgccagtggtgccgctcttggattcattgtggcgaatgccccgggggctatagctggtgctgttgctggaaaccgcctaggggctgtccgagatgctcggggaaaaagtgtctatgaagttttcttggagctgccagcgaccgaccgtgcacggcttctgagccaactggcggctaaagtcttccagcatactatggggcagtgaggtttttttcttttcttcttatagaagcgctcaagctatacccggtggccattgacttataatatctccagatattgtgttttacttttgttaacgttatgattatccataaatgtgattcaagtttgtgtcttcttaaagtgtatttttcttcacctttcattaactaccttccttaaagagtaccattaagccatccctaaaggtcgatctatcgataaaccgacccacgctggcggctgatctagcccggaagctttcaattgaccgcctccctgcctcgaatttcggggtaccgtttgtttttgtctaggcccccactgcccctctttcaccgcaagcggtcaggagtcaggcacattattctccctgcatttgtacatttcgtcctcttcaattacctcaagtcgttattctttcttgtcgtattttgctattttgaacttcaagattatcttggattaatattattctgttgccttcacatcgccagcattatgtctactgtcgaaggtgccggggtctatcccgctctggaaaaccgtccattgaagggcacaatttgtcttttcgatgttgacaataccttgacgcctgcaagaagggtaagtgctgcgtattggactctttattctgaatctccgaatgctgataaggcgcctgaattactagcacgccacagaggagatgctccaggtgctttcgcagttgcggcaaaagtgtgccattggctccgttagtcctctgaatatcctgcactgaggattggacatctcatatcaggtcttaggttggcggttccgatttctccaagcagcaagaacaactcggttcctcgagcgtcgacgttacttccctcttcgacttttgcttcgccgagaacgggttgacagcctatcgcttaggaaagcccctcaccggtaacagcttcattgagtggattggggaggagaagtaccagaagttggtgaacttcatcctcagatacatcgcggacctggacataccaaagaagcgcggtaccttcattgagttccgaaacggaatgatcaatgtcagccctattggcagaaatgcttctgttgaggagcgaaacgaatttcaggagtaggcttccctgggatttgtgccgtaacctgtttctgacggtggccacagatacgatcgggtgcacaacatcagaggtccattcgtggaagctctgaagaaggaattccctgattacggtctgaggtaaagttgcaatgagtggcctatgttgagaattctgacgctaactaccgtcccaacagctactctattggcggtcagatctccttcgatgttttccctaccggctgggacaagacatattgtctgagacatgtcgaggccgaaaaagatatctcgggtattgactacaagacgattcacttctttggtgacaaaactttccctggtggtaacgacttcgagatctacgacgacgccaggaccatcgggcattccgttaaggatccggaagactgtttgagacaacttagggaattattccaactatgaagtgcattgcttcgaagcgtccgctgccgaaacgtttcctgatatcactcactatacattaatagaagaatataattctcgaactatgtaccgtacatatcatgtcgctacagtcccaagacctaactgctctatggctagaccatatcgagtctcataggagaagtctgttcactgacaaatattgatgcacttagcatgagattcatcacactgaacgtaaagcgtgggtcaactatagcaaactaatagactacgccagacggtaccagcttagtcatcagctgtccggaatgtgcttttagaaggatatgggacttccatcacccgacctttcgatcgctgtcttactgtgcaagctaacaataccgattctacctcccgctatacctcattctgtgagatactccgcaatggctcctcaaaagtctgttgctgagcttccacgatcggttcttccccgcctgacgtggaatgcctcgtcgacccgaacgagcctcacagcatctcattccgctcccctctctgcgggaaggaggcagtccccacaaggttggattaccttcacatggcaaacacaatcacaggtcttttcgcagtcagttgcgacgttctccacggtatctcgaagctttacttcgacttcaatcgctcaacgctttccgcactcgatatcccacaagactaagtcccagagtacacagcccgttggcgctcctatccgccataatggggtctatgttgcgacctttaagccagcccgtcgggcttttcatgcttcggcgccgaggaagcgagaccaccatttcgatacgttgaagttcgtccagcggctcaaggacgagggatttagtgaagagcaggctgtcgccatgatgagggtcctaaatgatgttatccaggagtcgatacaaaatcttacccggacaatggttctgagagaaggttagtcggccttctcgctctttggcggctgttagaacgcgccgcggaagaggtttccggtataatactgatatcctcccgaattctagataccgagagatcagcctatactcagaaagttgactttgccaaactccgctccgaattgttgaacgcagattcaactgaggcccaactcatacgctcgtcgcatgaaaagatagccgccgacctagcgaaacttaattcacgacttcgggatgagataggacgcactcaggcctccgtacgtctcgaccttaaccttgagaaaggtcggattcgggaagaagcgaacagccaagagatgcgcatcaaggagacagaaacaagaattgaacaagaagtagcaggtctaagggagcgtgtggaggccgttaagttctctacactgcagtggcttatgtatggctttctttctcgggattctagaactcgctaacaaattttcctaggggtgtctgcactggtactgctgctttgattctcggtgcctggcgtcttctgatgtaagccattgctgtcaattgagccgagtgcataggtggttgcgcaaaagagctggtcacttagtgccagttcgctgtatcatatactacgatatttgcattggtatggtgccgaggttatgtagcgctcgctttcttcttttcttttgtctcagggtacaatgatcttggaagcgaccattgctttcttctctccttttctcgaagatagatcgaagacactgtgagtctacagcgcgtgacgagtaactattctgctttatcatctatttacttccagttgtcggaacgtgtacgctatccataatcgagtagtgaaggctgaggatggggcgtgggtgcttatcttaggcttcttaaacgcattcgcaacgcacttctggcaagaaaactgcacttccaagtgtgctaagagttacgagggaaaatcggagttcagaggtatatatgcattgagggctggtgtcctgcaactc

SEQ ID NO: 5146 - DNA, 4544 bp, Emericella nidulans
agaagaatgaaaagtaaaacaagtaaaaacaaagcatatatatgttaaatgaataaagagaaattcaaccaagaaatgagacaagtatagtaaaaatagagaaataaataaatatcaaaagaaaataaaaagataaatagaagaaaagaattagtatacataaattatggtatagaaagaatgtaatatgatgaaatgaagaagagaaacagataatatataggataaataaatgtaaaatataacagatatgaaaacgacaacaaataaaacagataacaatgaacataaaaaaaagagagaaaaattatggtaaactaaaatacaagaagaaatacgaaaataaagatatttataacagtagtaatataagagaatcatagatataagttataataaataaaagagtaaacgattattacaaaaagaaaaagaactaaagccaataaataataaaaacaagaataggacacctcatatacggaaacagagaaaaggagagtactgtaccaaaagagataaacttaaatcgagtctaatataaaagacacaacgaaataacaggctaattacgaaaaggacaagatgatagaaatattagccgtccaccaaggattcacggtttccagggtgtaacactcgttggggtaccaagaagcttcatcgcaagactaactagggtctaagcaaggtagatagtaacggtgactggcaccctaaccacgtccagtggaccgttgcccgtgacggtcagatgggttaccaccaccgtacctcttgcaaccacaaggtcttccgcattggcaagggctccgacgaggccaacgcctccaccgacttcgatgtctccaagaagcagatcactccgtatgtccctctaccccttttaacctcctcaaaaccactaacagttgcagtcttggtggcttcgtccgctacggtgaggtcaagaacgacttcatcctgctcaagggttccgtccctggtgttaagaagcgtgtcatgaccctgcgcaagaccctgtacccccagaccagccgaagggctaccgagaaggtcgacctcaagtggatcgacacctcctccaagttcggtcacggtgctttccagacgcccgaggagaagcgcgctttcatgggtaccctcaagaaggacctcgttacttctgcttaaggtgtttacggagattatggcttggtgtagtacaaattattatgcggttcaataaaaaagcgaatacttcaaccactctgcctgtagtgttgcttttcttggtccattgggacttgttgaagcggcaagcgtttagactgcagttgtagactttgtagatattgatgtagactaggccggctttcagcacagttagggcggagtcggtggaaaatcctgcatttcctcctcgcaacttcacgcacttttgacaatccacaaggcggcccattttactctgtttgctagctgtaaactgttgtacatcgggtcacccagacacagagttctccattgttcggcgatatgcgcaagtggcaggacacccgcaacgcccattgcgtcattgatcacctccgtccctctttcgcttcaccacttgcaccgtcacattttcagccaaccacaacccttcgccagttttcgtctacatctttaaaccgtcagcaaatttttgctgcaaccaaaatacgagcactgccccgagacaaactcatctacgcctctacatacgtccatcaacccacatcactgttatcaaccgcccgcaccatgtcctcagacgacgcctatatgtcctttctagacaaggcaaacgcagacctcgatagtggccgcgcacaacaagcaaacacaactcagcaggcccgtacagaaaccgtagacgtcaacgtcaaagttccggccccgcttacatccgtcgacgcatactacatctccgacacggacgagccgtttgagcctgttgcactgaagtgggagggagcgcagaggggagtttggcctgatgcctgtacgtttcgcagacactataccttcagatatcatgaatgtgttgctactattggcgatgtcgatgctaaccctgtctgttttacactatctagcatccttttcgaaactcatctcagtcaacacagacctgtcggacaccattgagacattatcgccttcttcatttgatccaagaaatcaatatgcttccgcgcttagggcagtgcgtgctgctgctgtcgagaattcgaaaggggacgagtctgcggtcgaggtgaaggtttatcgggttgaggttggaacgtcacgtgttgagtattatattacggccttagatggggaggggggcttgcttgtggggttgagggcgaaggcgattgagagctagatttgagatgtaggtggtttcattctcttatgttatacgacatcatattcttgtttagttgtggtcttgtagacgggctgacggtttgacgttgttctcgaataccagacggatatgatggacattactgacattcttcaagagtttgttatagcaacgagattccgagttcgttctagttcattcttcatgctctcatatgaatgaaattttcagaaatataccgaatagtttaaagtgatagataggtttggcacttggtacactgtacaagtcaatattgcgaggttggctaatcgtgcatgaaccaggagcttctgttctatccgcacatgcagcgccaccagttcctgcagttgaattggaggcttcacctttactcctgcagggaaatgactagtttcgcaagcttacaacaaggatccaagggttcagtgtatcccaagcattcctcacctgggcttgccttgatctggagcgctgagcatacaggaggagtacgtgttctgctcctagcagtgtctggaccacctgcattaccaggatatttacttctgcatgcgcgtcagttgccacatagtcaggaaagagtgcctacaagcctcgaatcctgccacttttttgaggggcttctatcccgtcaggctttctttatcccttccttgactgactccatcaatccgccgccaggacaagcgcctcctcgctctttcattctcgcactctgtcgctcgtcgttgctccattcttgtccctattttctgtttattcttgtttctctagaatggtattctcgttcctcgctcggacaagcactgtgcgctttcagagattggattgagcggaagcgtgatttttttttctttgcagtttcgagaacaggcgcgctggtttcaatccattgcctgatcattttactgctctaatctttaggagtttgacctagttgatccgttccagaagttgcttgttgacagtgactccgacaaagtatcgcttaccaccatcaactttggacgagaacgaccgccattatcgctacctgatacagcctactgcataattgacacatggaaaatattgctggatagaagaagaggcggctttgattgcggctcgaacaaccacagatatccatcatgtccgagtattccccagaaatcccacaccgggaaacacctcatatccgcctcaattcagaacagcatgatgtcttctccgatgaggacgtcacctctcgccctctagtcccagagcatggggtagtcggacttggtgtcagtggacgtccgttaacaccacgagccgactcctctcagtcaaccggaacgctgccaacggtatattcatcactcaacgctcacgggtcaacggagttcttgataccgccgcagccacagacgtatagacagcgctcaggagatgatattacatcgcctaacctgtccgatcgctcataccggcgcgcgagctggagctcggtgggcagctattctacaaggagaggattcgcatacagcacacggtcgcgttcgcgcgcggaaagcgagggcgatgatgtcaatacccagacggtgacggagaagtacaatattatgccaacagacgggttgctgttgttcccggaggatgtggagaaagatgattacttgcataaccctgaccccagcgatagggagggggagtgcgatgtttggaataagcggggcatgattaacgtcggcgggttggtgctgcttacaattgggtttttggtgctgtttattggttatcctgtcgtgtaggtccctccgttccaattatagctggggatgtggactgacttgtggcagtacggctatgaaaggatttgaaaagacacagtcgggttgtaggtcgggggatacactatgccttgatgttggggaccggcccttgctgtctaatatacgcaggggcttgatagaccctgatacgccggaatcggcatattcgaagatgtcggcagacggcaaggagtggaagcttgtggtaagttggactcggagctgctgctcaacttcttgctaacaatgtctagttctccgacgagttcaacacccccggccgtacattcttcgacggagacgacccttattaccaagccgtagatatctggtacggcgtgacccaggacttagaggttagtcag

SEQ ID NO: 5147 - DNA, 2155 bp, Emericella nidulans
atgaggtagtctgaagaaggtttcgaagagagccaaccgtatgaccgacggcggtaaggactgtaaggtcatctgtttttgtcatgacggcatgggcaggtacatcgggaggagcggtgtcctcacggtgatcaaggaaaggatactcgttgagctggatccacgattcatagataccgcgctttccaaatatatccccgcaccatttggacaacataactgcgatcatgatggggatgacatacgtaagggcccctgtaagttcaaacataatgacgacaattgatacggtcattcttgtagcgccgccaagggctgaagccgccccgacaattgcgtagagtcccggagtcacgcaagggatatcaggctcacagttcccgaagaggaaaaaaccagggtaagagtcctgccagattttgaaagccgttcctagagcacgcccatacagagcaccgattgcgaatgatggaaggataataccagcagggatatcaagcccaaatgtgattgtcgtgaggaaaaatcctaggacagcagctacaagcaaaagagctactgtaccagctgacgctgccccagtcttgcaaagaccgaaatggtcaggagttcctgcactgcattcggcgaacagcgaatggacaagttccgagttttgagctctcatgaatatgttagggtagtttaccagagcgctgaggatagatacgaccacaacctcaattattggatgggagaaactccgcgtttttcgccatttagcaattcgcatgttcaatcggatgaggaacgctccatagagaccgcccacgataccgagaataacaaatggtatcatttcgaaacgatgccaacccctggtgtacttcacttcgtagagagcaatgttgcctgtgcgaaatggatctagcgcttgtagggtaactgtggctaccattgcgcagacaaaactttgccacattgctttgtcaggaaagtagtatgataattgctagaactctaagtcagctagacatcaacaagcacatctaaatgttcacacctctaaactgaacaggacaccgccaattggtgcgccaaaggcaacggatatgcctgcggcagctgccgcagagagtacctctcgttttctcgctataaatgttagctctctttcagtctcctcggcgtgtacgggtgaaaaccttcgttgctgtttaggctatcaaaagtcttcattatgacgctggcgcaacaacatgcgacgtggacaagtggaccttctttacctagccacatgccggatgccacggacaggcacttgtttttattggttagcttcaatcggcctcattcattggagacaacctaccaaacctaatgatttaatcgcaagggtccagggccccatgaaatgcctgataatgaagccgcctaggactgtcttgatttcaggtattccgctatgcctcgcatatattgcataattcctgaccaatgtgcatgcacaaagggcaaaaaacacctagccgctgcattagatatgtataaaaaagggggatcctcaagggggtacctacagaataaagtgtataaaagatatattctattgtataagatccagcggatgatctagcccccacagcctttccccagggagtccaatccatacatttcgaagggtctgtagtccgagcatgtcagtattgcacccataattcgaaaaggttgtggtagctcaccctcttcgtgtccccagcagcaaaagctacggttcaaataaaatttccctccccctgggccatttttgcaatatccagctttgatgtcccccagccagtcgctgacgatatcaatggatgcagcaatgataccaactgatattcccgtagcgatgagaacgaaccaaacgttactggcatcaaaaactttgcgagcgtacccaagcattcctttcccgctagccgagagtagtcgcttcctttgacgctctttcgtgtattcaaatatccaatcaatagcagtgaaatcatcgtaaccgacccgtcgccctggaccttcaacataccaatctaacaagcctccctccttctggatgttatagttcccattacgttgcgagctttcacccgctggctgcggatcaatgtcttgtggcagtccgttccttgatgct

SEQ ID NO: 5148 - DNA, 4593 bp, Emericella nidulans
acctgcaaaccaccggaagggcaatacctgcctgtttacacgtcccttgaggtgtggcagccatgccatgagatttgctgtagaatctcaagccgcctacaacaaagcataaataataatagcttcagagaacagcagcaactcccgccgccagcattggcgctgcagtaataatcgcctgcacaggcccagcaagaacgccagccgcagcagcgccaggcgtctccgtggcctcgggcttatcaaacttgtccaagcccccggtaacctcaagagcgtagtactcgactttgtctgaggcaatcgacgtgtgagtgctgtaggaactgctcgtctcgagtccatccgaactccccgagtaatacacgctaaacgtgcagctggcactctcgctatacgactggaaggagcagtcgtaatccaatgtcgctgtgacaggcggttgccattcgaacgcggtgtactcggcgctaagccggagggtagatattccctgcgtgatagtccaggggtccttgatcgagcaggattctgtttttgcgccggagagacaggaaacggcgtagaccgtttctagagcattgatagagacgacggagccggcgacggaggtgtaggatgggattgcaatgtcagagtcagactcgtctgaagagccgaacagcccgactgtcgttgtggactcggctgccgcgagcgccgccagggctagagtgaggtatgggaaaggggtacgcatcttgaagttccagagtgtctgagaagtctttgctatttgcgtctgggaatcttgagagaagaagatgagaggcactgggacgggaatggggccattcttatgattaattgtgactgattccaccctatgatactccggcttactgtttagtggcttcaaagaatgcaggccggttagaacggagattgcttgattagcctgagccaagtatgactcttctggaacgtggccaaccagttggccttgttattgatatttagtgcggctcttagcgctgcccagttcctgaccttcctcaaaggggctactaacaagcgagcccaggtcgctcagcgtttgaattttccacaaactggctgtcgattggctggtccccttggctagcgatgcactatttaatctattccagtgtctcaaggctgcacgggcagcaagacatgtgatcgaagttggcggggttaggcataacttctgtacaaaaggctccggaagtcactggaagccctcaagccttgaagggggcctggcaaatgggaagggtttctgcctcgagggcaaggctagctctccacagttcaaggtatttgtggatcaggactgaagctagaggcttaggcactcaagttagtgggccgcaagagacggcgatgcgagaacggaattgggttgaaaaccctctgtcgttgataatggccgttctattgtgcgtcttaatgtccatgtcagtccatgtcagccatcaaatactagaccttgaacccatttccacgcccgaacagtagcaatcctataagaggcttgctgtcgattcatggtaccgtcgggaatctaacctagcacgattcgcatttgatcagcctagtcaataggcaatcgcagcagatctacttaggaatgtgatataaaaggggcattgccagaccctagaacaattagagacatgagccggaaaacggaccggttgtcagtcagacctcgcgttgcaccagaaggggcacgttgtctataatggactcaatcctctagactgatttgaaggcgccacagaggaattggagggtttcggtgtcgattcctggataaagagctgttttggagtggcacaagaggccttccaataccgcgttttgatcttatctcctcactattcacgacaatagcgccagtgaagggcaccagccacttcaagcaggcgtaacgtcgtcgttacgctaggttctctgctgctactgaggatgaatgattgcctcaagtgctggagtcctgcttttattccccgtctcatgatgaagattcatttctatctcccgattcttcgagtagatccctagcgttgtgggttactagagtatcgaggcccatcaacatactacattaagatagggtggcatttaatgatacaccactcaaactagccttggttagggttatcaacaacaccgctggaatggccgttcgaaacaagctatgcgaagcaatgctttatcatcctcttggtaggatatctatccccatgttctgtgagtaatggaagctcagtcgcctcctcaactaatccattaaatctattagacatgtgaatccagatcagaataacccacctctgtagatgcctgctaagccgttcaactgcccggacagtgtgattaatgagcgctgcatcttggttgcaggagggatattgtattgagagctttcggagtatctgggcagcagtggtggtccagtctttcactttgctgccaatcgcgtgatattgtctgacttggtgactgtgagctcatgtatcattgctcctatccaaccacacagactgccagtcgcctggctatggctgtgagagatgacagaactcggtccctgtctaccatcagccaacgttctactgcttgtcaacaacccttcccggaagagctgcactcgcgcttcggcaacggcggcagcagcctctggggctataataggtgagtgggagttcacacctaataagaagtcatcacggtgacgtagggttctgggattagaatgaaaaagtgtccgagcgatgatcaacaatttgtaatcaatccgaaccatttaactattagttaaatagttgatctgggtctagtctgctatttatcaaccttatatcacatccaagattctgctctatgatccattcatctaccatgccctctactgttctcgtcaccggtgcaaacggctacatcggcaacgccgtcgcccgcgccttctcccgcgccggctggatcacatatggcctcgtgcgttccgagtccgcagtacgatccttacagctggaggagatactgcctgtgcttggccagattgacgacattgactcgcacagtgccatcttgcaccagctgccaaagacccttgatgcaattgtctcgaccacagaaaacctggacgactacatcacccaccacaagaacacaatccagctcttacgaacactctctcttgccagcggacgacacggcgtccgtccgctcgttatcgtttcctcaggatgcaaggattacggtatcggtccgcactatcatggagaccgggatctcaaaccacataccgaagagagcccgctcaacccgcctgaccccgtatccaagcgcgcgaatatgtcgctagagatcttcaagaatagcgatgctttcgctcccgttctcgtccggcccacaaatgtctacggccgctcagcaagctattaccgcggcttctttgaagtggcggtactggctaagaaacagagtctccctctgcagattcccgtctcaccagcctccatctgccatgcgctccatgttgacgactgcggcgatgcgtacgtcgcactcgccgcgcatccgcgccgggcagaaatcgagggggggatcttcaatatatctgggcgggaatatgagaccgtcaatcagatcgcgcgggcgctggtcgctgagtatgatctagccggagtagaatatgttaactctgaagatgtagggcctgtaggcaaagcatggccgccgatgctgattgatttcccgcagtggactggatcgaataagatcagagaaattacagggtggagggatatgagaccgctctttagtgacacggtcgggttgtatagacgggcatacgaagcggctgttgaaactggacatgagaatattgcgaagatggtcaaaagggagaagatgttaccgagacaacataaatgactgaggagctgggtctacggagtgggtgatttgcatgtgttcgtagtttatcttaacctaatgtcctcataatgggctagtgtagcaaatactgtgcatggctaacaaacatgattccagaggtcaaggctcaatacaacactaaacaatatcgtggacaaaagagcagtggcactacataggtattactctctgaaggtgttctgtacccttagattacttcctgctcatctcagccgtggagcgtctcagctttacctacttaccgactcaggtcagctttgtgcctgataatgcaaacttcctgtgcatgctatggagtgaacatacagcttacttgagtctcagacaacgcccactacatgacacctttaagttacccctgcctcccgtcatttccattggctactcgcccagccatgggtagtaagacttgtgagaggtggacaggagtggtagaagggttaactgtggacgaggatagagatatagtgaaggatattgggaggcatggaggttttgatggagggtgcggttctatggtcagttgcgcattcagaggaatggacggacatggtccttatgtctacagccagacatagagggtaagttggcatagactgtagagccaaggggcatcaaaca

SEQ ID NO: 5149 - DNA, 3867 bp, Emericella nidulans
atgctgcaccgcaagctcaaaacaacgtcatactcacattcgggcgcacctccaggttctctaggtattctgacattagccgcggagatggtctttctggactcaagaggctacaattatgatcatgcgttgcattggtgttaggcagcaaatcgagccgagcacacttgcggtatcggatgcagcgaccgtgtcccggaaggggcaggatattctttcgaccttcagacgatctggtctcaaaacaacgggcaaggcggactccagcttggtaccggcttggcttcagcgacctgcaattgcgatcacaaggctaacactagatttgggctaaacacaccagcccagactgcggtgaaggctacatatcaatgctcatatctgccgcaactaagatcagatagaagagacgtcagagtggtagccgccgtcgccgttgggaagggagagtcaagccgccgtttccgcaagactgatctcgcggacatactgtgcaaactgtctagttctgggcgactgtccagcgtagatggtgttgagttgttagagcagccctcagaccagctagcgtagagtgcattggaatagtaggagcaacgtaaccacagccgctgccaggatgaacgtcaaatggagtagtggagccatcaagctcatgggattatgccggtctgacttgcgataaagctttaggttgtcccctcaaatcaggcaggcttgttggattgcaacaagttgcaatgctcttcccgctgaattggtctgatggtcgcgagttagcagaattgagttggccctgacaagtgctcacatgcctttctctcttgagtcaagtcacaaccgctgacagtgcatttggaagcacaaggatattataccttcctgcagcggtatgcaagggtatatgccctcaatgtcggcacgaacatttgaaccctttctcgacttcccaataatacaaacgctacgctccggctgagcagggcgaatgatgtgatgtctagtgcggaagtggctgcacttagaggcgcatcccttcgcttctagagcgaatagaggccgccaatgctcatacccaaacaatatggaagatgtctcgaccagacaggctgaacatgtgaaccatcggcaccgtttcatcgctgcaagcgcatcaccgctgtttcaaaaaggttgccttcgactctgaaataacgacagacccagtcaaacctcattcatgttcgccctccttcactcaaatcctaatccgctagtcaggctcatccactgcatgcctctgcgccgctaatgcccctcgtctaggcgcaactcgcttcataagaggtaacctttgcattatcttcaacatgcctctgtcttgcagccttgcccatattgctggacactggcaaggtcacggattcaccagcaagaaggcccggaaccaaattcttcatgcacggtgattatcaactaggatactgcccaatcaaccagataatattagctttccgcgatgatgcttttcaatactgaattaataccagagttaatttggcggctccaagttctaaagcatatactatctcttcccctctgttggaagccagagagactagacatacctctcctttgacaccttgactacaccccatatggctataaactttttaagtctttgccaataatatataatttaagttaacaagcactccgaaagctgggccaggatacaaggtttgaggataatattagctaggcgggcctttctgggctaccgcttttgggcttcggcatccttatgtagaaggctgctaatgggaggaatgatgccgtgggcatgttggctggggtcaaatctaggtgaggtcttgggttcttgacgttatagcagtcatagggtaagacggcaagccaatcagaacatttaaacgaatattctggtgctcatattcagaatactaagcatagagaagagaattatgtacattcggagatcgattgttgaaagtcttcgcgaaatgagacctaacttgatttgatagacggtcagaaatggcagaatcattcatcgtgtacaatgaccaatcacacgatgagctctgtagtctgtgttggctctcgatcacataggactgtgacatagggaagcccggttcctctgtacattcaaacaaggtatattacaggttaaacctggtaatactacaaatactccgatctttcttcatgcttatacacacagttcactcaccatcgatatagtataaagaacttggtctggatatgaaacaaggatccttctgttcttggtaagatgacccttacagccgacttgatgacatgaatgaccaatccacatcatttacgatctaaatataacccggtttgtcaagtcgtggcatggcggttttctttggatctgaaatcctcgtaaagttgccgtgacggcgagggttgcgcgaccatatcatgtcgtacaagaagaatatatatattgcaaccgatctcaaacattgccatgctgcgcgcattgcatatcctcacgattgcaaatagtcttaccgccaactccgcaacattaactgtctacttaaatatctagttcttagctatctggtttgtttatggcgtagataaaataaggtaccatccgtcacgcccatagaacaggctgtgcagtccatggtgaaggccgtatagttcgtgaacgatcacgtgcgcgaatgccattagacaacgaagcctcaggcaccaattactcgaccccgcttctgactctcctctgcttttcctccactcacactcctcaccagggatttgaagagcacgaaacgagattgaaggaaccagacccttttttgatctgcttgaccttgagaattactcgtttcccatttaggcttgcccatctgggccaatcggttggcttgtggttgtgcgagcgaccgatagagctttggccggcatgctccaccgcagcgaatctcccgagtctcgaccatggcgcttcggtcaatcactcccggttcctggctcccaagaagtcctaggccaaaggtgcgacgctgggctcggggttggcgacccgatcggtgacttttccctccgggtggcggcaagcgctggttggaatgctcgttgccgcgagactattgaacacacttgatcgttgccagttcgacccccatacctcgtcatctcagagaacacatcaacgcatccatccagttcccctcgacgatgtaagaagacaaagctgttgacttttaatcctgcgttaagtgctgaccagtctgccagctcccctgtttcaagttgacatccccaagtctcgccgcgtttcagaagtgccacggtggagcactccatgcctcgattaggaatgatgcttcgtggctagtcgccgtgttcctgcactcgaccgctgtcagctcgctgattcgtgcattctccgtccaattcttcattgaacactcatttacggccagggattggtagatgccacagtcaatattgggcctttcaccttcaacaatgcgcgaccgttccagatcccaaacatgtgggcaggtctagtatataggcctgttgcccaggtctggcgccattctcttctcacatacttgttttctcagtattctttgtctttccttttaccatcctgccctttacattctttgagggcttgttcgtcatcgcaggtcgattctgcatttctctcctttctatctgactcgacggccttgacggttgttttccattctcttcaccctgatcttgaccgatcgaccagctttgctagtcaccttcattcattatatagcatttcacatttactgcagcactagcagcgcactattccaattcatatcacaatgtcgt

SEQ ID NO: 5150 - DNA, 4035 bp, Emericella nidulans
tctgcgagaaggtccggtatttggcgaagagcttgtgggtattgacccctacagatctccctgcagaccaatcgatatgataaaaggacctacgtctgaagattgattcactaaccttttgagaataatttctcgcattttcgaggagttttccccatggccagtgtcttttccagttgtaaaaaaaccggcggcggcgccgcagatgagtgtgataagcctgggatcgcctactgcagtggatggttatgcattgaaccatgtaccgataaagcaagtgaaataaccatgcgggtgggacactgactagggaactagtgaatcaaacctgccaggaaccgattttggtttttgctgaccatcccgacttggagtggtactttggatggcgcttcagaatatagtcgacatactgctacctgggttcaggtttcgacaagggcttgtttctagaccaggagttatcctgtttgtacttcgtacagcttgatctatcaatttgttgtttgtactttgttcgacactaaaaaaaaaaaagaaaaaaaaaaaaagaaccatgaggctaggatgtcaaaataaccaaaagccccaacatggtccgattgtcggatcagagggtaccgctagattatattatatacacccttgcccatggcactgtaaaaaggcaaactttcatgacaaaatcgtctaagcgcgtcgaccggcaggggcgcctgggtttccaagtctgcggctcctgtatagaattagcagctgataatgtcaaccgaaatgatccaaaacttacatcatcgtccggctggccatgctgatgacaatcatgaagagccagctaggaacaacgccgaagccgtaaatgacgtagcccagtggtaccagaaggccacactgagcgagccagccatctgttgggtggaaggcaccttcataggcgggcttgttctcgtaggtcttctcggcgtgtattctgtagatgctttcaggggtcacagtggttgagttcacgtagacgatatgcaggggagtagacgggcgctccccagtgacttgagcctggggaactttgaagtaccagacggatggagcgccagcagaccaggcggagcagaggagctggttagattcgcaatcgaggtagccaaggttgggcgaggttgggtcagcagcgaaaaggagaacagattgctgttagcgcgtgattagcctccactatgtccgtatgaacgtttacgctacattgcacattgcaagttagtttggcgcgctcacattaaatgcctcctcggccttgccgcaacggccaaagcaggtcttatttccaccggtgataaatactagccagtcctgggcatccgcggccggctccagcagcgattgccagttggttgcgttgaaaggtgtgacggtcttttcctgaatgacctttttgggcacttcggctaccttttcggcgacagggataacgggagtcgcagtaggtagataggactttgctttattaaaccaaccctgaacacggtctgcaagagggacctgctcctcagccacagcaagcgctgggaggagggcgagaagggggatgaagcgcatgatgctagaataggagacacgtggtaagtatgagcttcagctggctatcgatgtctgaggaaaaacaaacctgggctgaatgtaagagtagcaggcgcacttttgatgatggattgattgagatggccagagtacagacagcaggcagcttgggaacaggttaacttgagctggaggcgaccagatggaagagccacgacggatggaacgcgacagctggcctaaacccgaaatggtggtccgcgactcgcacttgcagctggggagcggggaacccaacactctagaactatagatctcggttactctcctcctagggagcttgcaaaggatggcgttcagaattgaatttcctccgaattgactctatacccaacagacattacactggctgaattgcagactgcctaacgtgaaattgctccatcgttctaacgtcgtgctgattatgtcatgtgtttatttgctttccatctcctctcaatgaccttgcacacactacatcccaggtcttttgtatcggcgacttgcgtactatcgatgcataattgagcagaagacggtcttcttgtatataagtgttaccttggacatatgcgcacacgcctctgcagcatacttgggtcgaccgtttcgctgtaagaattgctgcaaccgagcttcgtatactcatgaacctacttggtactgagcattcaatcgcattcttgaaagaacctggtgaagcgtgccggctggtcttcggatacccctggagtttgggtttcaacagtgactacaatgccaataatggatctacaggctgtagccgcctccttcctaatctgataattaatggctccttccttattcgttgcaccgcctaatatggcttctacagttcctgttatgtggtgatattcagagctggagaaattttcttagcttaccacagtggagctacggttatctgtttcctgattattgcttgatatcacttccttacatctattatgcgacgccgagagagcaattggttcccctgggaccttttgacacttgcttccactgtcgcgtggttgccgggttatgcccttggggctgtagtgaggaggggaatgagcttcgactatggttcgtttactagatttcagcggttattatacatgtgctcatgcatccgtgcttgtttctaggtgccaccctggcgaatgtttccattgctaaccacaacgttactgccacggcaaactcgtctaaccggttctcttctggagactttcccgtctgtaccgacctagaaggaccctttgtgccattctgcctcccagaggatggtgcaaatgtcctggttgatacaacctactatgtgacgtggaatgctgacttctatcctttgaatgcaacaatcacaatcgagctaagatattccgactcgcctgaagggacatcagccttcacttctgataagaccgataacagctatggatatatcccgcttcatatgagcaatgagtggcttcaaggcaagcaaaacaatacattgactctttacattattgagctcgattctaccctggaccgaagagcgagtgcccggcagggcccaacgatcacacttcgtcccaaacccgtggagcactacaaaccatctccgccaccacgtttcaacaagctagcactgtgcatcggtcttcctgtgagtctcgctgttgtgatcatcgttgtggtcactctggtcttctcgatgcggaaatccagagaaacaatcgtgaatagcgcgttctggagccgaaaaaggggatacggcatcggaaaatccaggtctcaacgtctgaaaagcgagacaaagggaagcggtgactctgacggctcgatggctcccaaaagatatgcaaatgatctcgagacaggcttgcttgaaaggcccggctcgaacaggtataaacatgattatgaacttagtggcagctctcctggcaggtatccgttcagacgggatgtggctaggttgaagagctggattgcgtgataaaactcatagccaagtgctctctgttgcttagagagcatgttatgaagagaaggaatcggatttacagttttggagccattgtctaactccaaaacggccagtggtcatggagagcctcaacacattctttaagatgcccgttactaacttgagtcatggatgtgagcagtcccattgcataggtagttcctgcagcaggattagcatgttttatctttcggggttttcccttccaggaaaagtccagtaagtctatgaagcttgtcattactcccaagtctatagtctacatacgttccgttacttcggacgccctccggtcatgactcataacaggtccggaccgattcgaggtctaacgggatgatctacaacccaaaagcatgatttacaggctcttacatatcacaagaaaccaatgccgagac

SEQ ID NO: 5151 - DNA, 2997 bp, Emericella nidulans
aactactgagaaggtaaaggttggaaagactaaaatcagaattaagacagaattgaaccggtcgtcttccagcctacgcgcaaagaaggatgatagcagcaagtccagcaaggttacagtacggccagaaactcccaagtcgacatcaaaacggtcaagccatagtaaagactctccaactcgaaccaccagccacaagtcttccagatcaaaactcgaccaggagcgcaaacgcactactgtctctccttctcgctcgccgccaactgttcgagatgcaggtctgggatctgcgaacggctccgacgcaactattgcggcccctcgtcgttcaccttctagagtcaagagtcctgagaaaccaccgtctcgcaatcaaacgcgctcttccatgtcaaatcgtccggcttccgcaaatcgcaatcgcgcgccttatgaggttgcgatggaatatggacgcccaccaaccgtcggctccacttacggcaccccgcctccgcctcctcctcccccagatgtcccagtctcaaacccacgcgttgactatctccttcataatggaggcttggattaccaggttcccaagtcgctccttctaagcacggcattcggcgatcaagcacagcttcagcctcatctagcggccagtaaggtttttgagcccttcagtcgactcctagatgactatcaaactgtcatgaataagaatggttcactcgcggtggctactgggtctcgttctgtggctcgtcgccttctcgaccgactggaggccgtttttgcccgcgatatatcatcagagtcatgccgctgcttggtgtgtgagcaagatgagttggaggatatcccatcaggcgtcagttggggtgaagtgctggagttggtttccgggcgccgggaacttcctaattggccgccattcctactcacagcagaactgggcgccgcggacctgtctggtgaagagcatattcctatgcagaaattggacattgacgttccggaagagtatcgtgaccatttccttcggcagtcccggaagaccaaactcgccgttgataagtggctgtctgagcaagtcgaacagcccacaagtgcgccggaggaggtagatgatgagacattgacctttgccatgttgacccaccttggaacagagcaacggcccatatttcgtgccctgcttgggatttcgtctacatcgcctactccacgaccagatggacagccccgagagcgacctgctgctctaatttcctcgtcctatgcgattcaacgcctgtaccgtttgccgtctcgaccccgggattccgaaactgcgatgtacatgcttaacaatcctggaatacaccatgttctagccaccctcgcggccatcagcgacgatgaatgggatatactgatatcaggtcgtttcgacggattcctgcgcagtggagccgaggactccttacccaacggaacacccaaccgctggagccacagccgatcgaacaccccattcagcgctggtggaaggatgtcacgaggtcccacacccagtccgctcgaccgcccaatgagccaaccttacggcggtccaggatcgccgggctcattcggaggcccgatagctctagacgaggagatggagattgctgcattggctgaagttgagcgagagatctacgccggtatggaagcccttgaagacgcgtttgaggccctgcattgtaaagcagaagctgtgcgtcttgctctgcgtgagcgtggcgcgggactctctatagccaaccagaatcgacgcgggacatatgttgaagcgcgcctgggtactccggcctcgcaatacccgtgggaaagcggtacggacgacgactttctggacgatacgtattcactcgcgccggatgactcggctagcaatattagctctaatcgcaggcggcgcccgaagcgacgcactgagcgccgcaccccggctcctgttgaggaggaagatgagggtgaagagggcgaagctgttgggcggcgtgacagtcgaaactctagaagacgataaatatatacattgtcgcccatttcactccgctccattctccggatcgttgttcatattgttgaatcttgcatcttctattgtgtcgatatactatcgctctcccactcgccggtccattgcttttgttttttaaacttgctttcatcatcatcagcagcagcgttacgacacgaaacttgacgacgaattgagcccatgccacgccattccatcaatgcaatgctccttctcaatgaatgaacggagacacagcacgaatgaaaaccagaaccatctaatataccagtagttagcttgtatttgtgtatgtctagcagcggggaaaccccatcaaactatattgatttgctcagtatatccatcccctaccctgcctgatgctgacagactgggagtttactgcactgcattgaccttgaggtcgtttttgatcgcgacaagaaattatttaccttaaggcttaacatcttggttcctcttttttttttagcctagcctgcctagattggggaattaaactgtaggtcgcttatcctgtgtatctgcaggcgcacaggcagtggcacggttgttgcgagatttattacctattgatagtcaagactattactacgaccgttgccttttactccaatgtaatattactgagttcgacgataggcggagaatgcgcccagatgcggagtagccgattggctttactgatcgtaatcgggggacttcctggtccagttgaaatacctcaaaagtaccaatctaggtgctataagtgattgagcattcggtggcctcaaccttacatacacccagctacatctcagagctagatcccgacacactggaatgcaaatgcagagaactaaaaggtaagacagtcagattaggatagtttgtccatttaagcctatagcacaaggagaactccgctcgccttctattgctgtggttcctgactc

SEQ ID NO: 5152 - DNA, 3415 bp, Emericella nidulans
  unsure (1)..(3415): unsure at all n locations
gccctatgtttgccgggaccacgacttgaaggctgtacgggcgtgctctacggcgcggtcgacatttttctctgtagcccagggcacctcatataagggctcgccggtggaagggttggtggagtgactgatcctcgctgagctcacgaactggcatttgctctattctatcctaatatgacataggttccagacaggtaataacactgcagtgacttcggaagaatgttaaggctacagggcttggggcccctcggatggatagcttcggtcaggctcagtggcgggcagaaagtgaatggcaacggtcattgctggtattatgatcttaggaaagactttatacgaacaaaagaatgcattgcaagatccataattttaatactgaagaatcaccgctacccatcagtcctcaagctactcctttccgcttctgcatatatacaggatgagagaacataagcataaacattcataaacatgctcaaccccaagcccggacaaatccaaatcaagagcattaacgcatcatactctctttttcagggagttcatatcccctttctgaaccgctagtggtggaaatccttcgtgttaaacggctcaaagtccgtgacaatattgctgtatgttcccttgaacttccagtcatgtgtcactgccctagttcccatagttctgcccttgatcttgatatccctcttagcgctcgatcccgacatgggaaccgtctccgagttctccaaatgtcggtcacaggttccaccagggacaatctgatcgcccgccttgtccttgaccagggtatactggttctggatcttcgcatactcagcctgcacgccagggaacccaccgggaacgttcttgtcgtagatggcacgaccgttgttttgcgcgacgttctcgacctggttagaccgcgcgtaattgtcgggaacgtttgatcgggggttgaacgcgttcagccactcctggcttngaagatagcgctccgctcccataagcgccgaggaggtccagactatgtcctgtctcgtgcagcgcaacatcgaggttctggcttgttgttccagagaagcagatattgccgttgctgttgaacgcccagttgtcacccgggatggtgaggacatggcgcacccagctacgcatcctgacgggaatccgcccgaacgtatcgaccagtgtctcgaagctatccgccgagtccttgtggcgacagaagctccatccatcttggcagtcgtcgaagaaaatatcccagacttcaaaatcggtggggttgagaccttggctttctgcgatgctcttgcagtctgcaggcatgaggccgtcttcccactttccccagtaggggccgccgttggacgggaggtttgctacattgccggcgaggagatagtcgaggttgtcagttaacgcgggcttcgagagtgtgtcggcgtggacaggggagagggtagccagagctgcggccagaaggaaggatctgcggattggcatattgatggacagtatatggagaaagcaatatctggtagagactaaatctatgggataatgactcggaggtggatctggtgatctgatctgctctgacaatagagtcaaatggcagagggcaggtggtttatattccccaggagcgagattatctccgccattttagacaatatcagatcagtccacggatcacattcagcatcaccaagcagagctactctccgatccatccgtactctaagccccagtcttcctgaagacttggaaggcctagccaggccacgcctcaataacatcccgcgtcgccaaccgatttcgcccccaagctgctggacgcctctaatcttaacccgtcccattagggttagggctgcaacctgcctccacagcgctgcgccaatccttcaggaacagcacctagggtcgaaatacggcccaatcatgcgtggccctttttgcacccactcaggctagtagctattgactagtctagggccctactctataaaggtcgttgactccgtcccatataattttagtcggggcgcatcgattgagctctgccagctgaaacaatgcaaggttacagggtagcattttgaatcaaggttgactgcaggctgatttatccctaggggcccgtccagtaggtgttattgccagaggaggagcagatctacgtcttgaggtgtattgggtcccattgacgctgcagtatccagactgcatatttccgtagcttcagtacattagcagttgaagtacagccccagtgggaatagacaattacctgagcaattgttaggcaggccgcattcggggcttagatgtaccagcacccaaagtaggcccgctgatattaaccagacatagtactcgcgggtatggtaccaccactgctactataattgggatcacttgtcctggttggtacatacggtcaggcagagaaacagggcttctcgacgtgctcaagtacgtagcttcgctgctcagaggtagatggaaacagcgttctgaagcacgtctgcaactctaccggatctatagacacccgccttgtatcagataccatgcacgggagacccaggaaagcgaataagcaaacagaaaaaatttctatccattagggttattggagccgttcccgtataaatacagatcctactcagctgtgatcaactctgagccctgtttagccgagcaagagtcatgttcctgttgaccaacgaagatgtgaagacgacacgacaagcctgctgctaagactccaacaaaacacaagaataacctggctgtagccagagcggctgaactgaaagacccgtagcttttcccattagatattgatagtgtagtttcattggccagttgctcctcagccgcttcgttcccactctctgttcccactgcccgcttctgaatcgctgcagcgtttaaactgacagggctgagctgctgggaggaaacgatctagggatcaggtaggcatgctcaggtatgctcaagcctttattaggcctctatatcctctacgacggttcgtctatacccacatcatcatatcttagcgtcaccatactgtctctgcatatacacctatcacctcatcctcctctctccaatcctgcttttaacctgttttatctcaactctcaaccactatgcactcctctacccttctacttggactggccattcttaaccggtctggcacctttgcagnccgacaagttgtgtccattttccgtccgggcaatgacgacggtaagccgtttcttgaaagaacggcaggtcggtttattttaatttctccatccgcccccaaaaggggccaccccgttactcctaaccttaggtttaaacaaaccattatttggaacgggctttttggaaaaaacctgagggg

SEQ ID NO: 5153 - DNA, 2760 bp, Emericella nidulans
agtattctgtatactgttgaagctcgcttatggcggctatcaaggctatccctttgcggccagcggcagggcaaccacccagagcccaacatccggcgtcaatccagtcatcataggtatcctcctctctaacatagtaccgatacctaccctattcgacactctctattcattccccggtttctcgcgcccccgatctcctccctcgatctgggccgtttggctgagccgcccggtcaatttccacccctctctccgccctcacttcgaggcattgtaccttggctccccaccagccacttgggaaggccgcttttctttcaatcgcgacatcaagccttgacctctacttctgtctcaccgtttactttcaagtctcttttattgtctccagtaagaactgctggtgagtcttttgaaaatttcaacgttctttctccggaaggctccgtgcttccgccctcgatatcccgtccgtgtctaaccattttgctccgccttctcctacagctcctgctgtggtcgtcgggcttaggaaccttggaggtttaggtgtctgcacctttccccgcagagagaacatatgatcccatgcctactcacgccacgcccgggccagcttctagttccacaatgtccagtcatgtgcccgccgtaaccgcccctacaccctccacagtcagcgaaaactcggcgtccaaagactctcatagctccccaatgcccgaatcaaagccggtctccgtgaatcgcaagaaacagaagcgaagagaaaaggcagctcgtttagcggcgcagcgtcaagcagcaaacggacatgcgccgagtgacacattggacgtaaacggctccagttcaacggtgctcgataacgacgtatcgcatgagcaaagcggcggcggttatgatgacaaaagcgagaaagtactgaacggacatggacacaacacccaggagctcccgcatccgtccgaacatgatccacaaggaacaactagtcgaaaatccaaaaagaaacgagggaagaagggccgtaatggatcgcaagcaagctcaacgccgatgtcgactccttcaatatcgctctccaacgctccacgcccacctttatcgtcgcatttcggttcccaatcctcctcgaagttgttgaaagaacgcagcatctggaacacttcaacgcaagaagaacgagaaaatatcaagaccttctggcttgagttaggcgaggaggagcggcgccagctcgtcaaggtggaaaaggatgcggtattgaaaaagatgaaggagcagcagaaacattcgtgcagctgtactgtatgcggcaggaaacggacagcaattgaggaggagctcgaagttctctacgacgcctattacgacgagcttgaacagtacgccaacaacacccagggatcattcgaacgaggaccggcgatactcccaccacccggactgtaccaaccgccgctgcggtctcctggccaacatacccacacacatggccaattccatccctcacgaggtcgaatccacgagcccgaagatgatgaagacttagaggaggactatgacgaggatgaagaggacgatgagccatatagcgatgaggagtacgaagatgacgaaggaagtgctgcgcgcgctgactttttcgcgtttggcaatagtctgactgtcaaaggtaagtcgcctgaaatatacttctgctaaacctgaggctgatttcgggttctgtctctacttcattaaattcagatggaattcttacagttgcagacgacctattaaaaaacgacggaaagcacttcatcgatatgatggagcaattggcggagcggcgcatgcagcgcgaggaggacacgcaatacggcatagcagcagcacaccaatctcttcacagcagtcataaccatggtccgctagatgacgaggattacgacgacgaggaggatgaggactacgatagtcaggaggaggaagaatacgaggaagacgaaatggtttgtcgcacagactgctacagtaccaagaactcgaactgatgatgttaggacgccatgacggaagaacagcgcatggaggagggccgacgcatgtttcagatatttgcagctcgaatgtttgagcagcgggtgttgacagcctatcgcgagaaagtagctgaacagcgccagcagaagcttattgaagagctccttgaagaggagaacttaaacgagcagcgcaacgccaagaaagctagggaagcccagaaacgaaaagacaagaagagactcgccaagttagcaaaggatgaagaaaaggctcgaagagaggcgcagaaggctgcagaggaagctgccgctaaagctgagcaggagaggaagctcgaggaacaacggaaaaagaaggaggagcaacggaagaagcgggaagctgaacggaaagcgcaggaagaagagcgtgctcgtaaagaagctgaaaagcacaaacgtctgcgagaggaacgagaaaggcaagaggaagctgaacggaggcagcgtgaacagaaggagcaggagaagaagcgacgagaggaggctaaacgaaaggagcgtgaggagcgagaattgagagagcaaaaagccaagcaggaacgagagcgtaaagctcaagatgagcagtcgaggagggaacgggaacgagttgcgcaggaacaagccaagcgggcgcaaaacttgcagcctgtgtctcctgtgtcccctcctccggagtctgcggcgcctgtggtttcaaagctca

SEQ ID NO: 5154 - DNA, 1200 bp, Emericella nidulans
ggtgggtattgcgtgtccattgctgggatgagcgcaagatgataaaccaggaacagggaactgaaggaagtgacgctatcatcgaacgagcccgtgcgtgcgatgagtgcccggctgtaagagtggcgaccttgtctgttctgtgggtttgccgaaccttccgaagtaccagcaacggcgcaagaaacactgggagagcaccttccatataagagtgatttgagccgaacagccgtacaagtactcagagtacgtctagactgccgtctggggagaagccccccatcatgtgagcaagtgatgcagattaccaatcttttgcataattgcgtctccgtacagcagggactcaaatccgagttcttacttccaccataaactcagactgcgaatgaccatgactgagaccactgagaatgattccagcgcactgttggccgtccatggtttggagaaccctctacctgatcgaggccatggatatccacaggaacaagctttgaacgaagtatggaccttactgccaggagtcgcctgatactaggaacgggcgagccatgattgaagtggaagtgaagtgcaaatgaagtgcaaatgaagtgcaaatggaccaggtgcatagggccagtgactccttgtacgatctcgacttcgatgtaaggtactcctgcatgtaccgcgtggcgcgctgaaggctgaatgttcgacggggattttcaccacctatcggggacgccggcttctgcggattgcgacacttgttggccagtttggctctccaaggctgggccctgtggcagagctctagaatcccagcgtttccatgtcagtagcttttggagaaagagctaccaagttcccagaggaagctcaggctgagagccccgctcagcaaatggtaacgtcaccgcgcccagccagtagtaacaagccattggaatcacttcgccggaagtggaaaacgaggaatcacagacatcatcaaggaacatggctcctgaatcctggatcgtgatgctgcgaagtaaaagcaagaacaaaggtaaaaagatacgaacccaaaaaaataaaattaaatcaaatcgtacagtaaaaaataaaaaatgaaaaataaaataaaataataaaatgtgataaaaaaggaaaagaaaagaaatgaataaatgaagaaagaaaaagatacgaaaaacgatacatcgt

SEQ ID NO: 5155 - DNA, 2513 bp, Emericella nidulans
atcaccgcacctcatcaggcataggcctggctgcggcgacgatggccctcgaggaaggagccaaagtcctaggcgtgacatctcaaagccgcctgattccctagccggcacgctaattaccagttctttcaagctgatttgtcccatccagaggctccggcgagagttgtggaggcgtgcagccgaacctacggcgataggatcgacgggctgttgaatatcgcgggagtgatggatctgaatcaaagcgccgacagcttgtcagataatgtgtgggagcgctgtatctctattaatctgacagcaccagtaaagttgatgcgtgaggtgatcccgatcatgaagcttcggggtaaagggagcatagtcaatgtggcgagcaaggcggcgttgagcggtgctgtttctggcgtcgcctatacagcgagtgagcatccgtggccttaggagctttatagatatttttatgtttactaagaagctgatttttctccgaaccatacaggtaagcacggcttggtcggggccacaaaaaatgttgcatggagatttaaacatgaaggaatccgctgtaatgcggtctgccctggaggtaagcacacataaatcaattcggcttatgccacgattcgcaaagatagcacaccagctaacacagtaatcaggagtggcggcgactgggatccgcgatagtgttgatacgactcattttgataaggaggccatgaatatgatgtcaatcattcaccaagcccatggaagtgaccaaggaaagggacttggtctagagccggaggatatcgcacattgtcttttgttcttgttgtcagaccgtagcaaaggaatcagcggtgctataatacctgttgacaacgcttggtcaaccatatagccggcagccacgacaaaagtgaagagaaatgttttcttaccctaaccccttgctcgtggtacaagctaatgtgcttccaggatcccttatttcacattagacaggaggtaatccttaagtctgctctgatagatggagtgcaacgcagacttcacgggatggattctgttacatggcctgtcgagcctgggagttcatctggcgcagtgcttaaagtggcagaatgaagggtcctgctacgctgtcgaccgaataggatccatttaccgttactacatgtctacgttgccatatctcatatccatgggcttggcgcgcatgatgatggcacggcctgtcagttgcagatcagcaaaaatagtgtttgatatcattagctgtagtttcagataacagtaccctaacctcatactttgatcgaatgttgaatcattgcaacaacttaagatcttagattaacagtcataagttagctcaactgcagacagatcaggcaaggaggccctgattgcccacgtttacaccatgtctgccaggattcgcaacagtcggaaacttgtactatgcacattttccggccagttcaagtggcgccatctgaagctggaaatgtgataatttatattcgaggatgctcccagcaagtagtatatagcgcaggtaggatgacggtctgaagccgtcatccacgtccaaattcttaattttcatgctaagactccaatgtcagctggcagtatcattttaacctcaagtaaaccagacaatacatgaaacatgggaaaggttgtcatcagtacaaatagcttcagaagactttaactggccataaatcaagaatatgagtaatgagcaataatatgatactctgtcgaacgcgtcaagtcttggtcattatgttttgcaggcacggtttgattattttctctttcaaagagagtcactgaaggggcagcgcatcaagaatggcagacgctgcacaggtaacgccgttgtagaacgtcctaattatagcggcattgtatatctctagcacatcaggcataatatcagggaccacagctcgaaacatcgttggacacgaatcgatcagttcaccgcgtccaggtcgggaagttgggatatattttgtggtagttggttctgaaacacattctgtgaacaaagataaatagagctgccgacaaagtctgtataaaggtgatagatacggtcccactggaaatatcagcagccgggagtgcaatgttaatgattactaggggctgcgatcttccaattcccaaatctatcccaggtagagcttgatagtcaattcaataagttgagctcgtcctaaacttcaatgtctcaagcaaaccggcgccaactgcggctactatgggtgtgctgtaatgaatggcatatagtaacctatttggccaacagcccaaccacatagtagggagcacgcggtaacgcatagaaccattggcagactcatgatacgagacattgttgcacttgtatctttgatgccctggaaccagatcaagagctttcagatattccgtcagtcgggggcttatcacagcaaaatcagttcttgcccgacgaagcgctcttacataataagtgagaa

SEQ ID NO: 5156 - DNA, 7660 bp, Emericella nidulans
cgtcgcgttcctgataaacctgactttaatacgtccatatcccccacgattatgcctcccatgctttgggtgtttatctaggttgatataagacaatcctttcagctctttctgatcccaatggttccacaaagctccaagcaccatgccagacacggacactcccttacaaactctccccgccctacagtctacagaatagaatcaggcattttcctgttacctcctctgtccaggcatggccatggtcctggtatgattatgcgggttaccaacaatgcctcgaatcagctgaaatcttcacaacagggtgtctggtccatctctaaagtagactgatggctatgcagtcattgagagtagagagtggccattcgagcctggatcttcgctgggctcgatttagatacactagacgtgctgagtaatttccctgaagggagtttttggccttattggtgtgggtgtctgcattactttctcaatatcctctacttactgcgcaccagctaatcagtgggagaaatacggaccttccctgggagagacccaattgtccccgtcctgaccaaaataacggccgcggccgtatacgtcttttgcatcaaaccctcaagaccattttaacaatccagcaccccgctaagcctccatcctcaaacatacaactccgtaagatgtccaagaatatgcaatatacattcccacaacccaatcctcttagtccctacaatcccagccttcaactatgacaccgacgcagtctcgtatacccaaaacctagccttcctcaacagatgtaagccgtccatgcttcgatctcgaggtaaccagggagatgcatacttctgaatttgttattaggtctgttgagcagacgagagaaattaggggcaggagccgtatattttatcatataacacgtgagaacacatctattgctcaattatacattactaaaccacacgggtatattgacggccggcggaatctgccgtaaagacttgacatacttctaccgcaacctcttcgtcttcattaagccggctgatgcaggaatggagcttctcagttgcactatcgcgtgaacggagtggccgatgagtcgattaagaccatgatctatgatatggagatcgatcacttgtgagtttccccctccatcgaaccttggccacattgctcatgatgaatagatagcttgcatcaccctaacaaggaagacgtccagaatccaatctacaatgatcgcaaatatccgcgaagccggccaccataaacatctcatctggaattacgcgaatcggctttgacagctggcgattgcgggagtactcgccctgaccactttcaggggaggtgagcacctgcaactgagcgcctgcagcattgaagttgggtgcctgtcgtcaatgctagagtgtggagaaaatgcagaataagaatatggtggcttcgaaagttgctcgcaggcgaggtgataaggtgtacctaggctccttttgaactaggtttggtttatatgcaaccgatgtgggtatctatggctcagtaggatcccacattatgcggtgagttttcggtctacctaatatagtgattataatttatatgaatctcccaagatttttctaccctaagactgtcgaatggtctagctgtcaaagtgccgtatagctacagaatgcatgcaggagactctcaaacggcgctggtgggcatggcccagtcccacagggctgaacgcgcggaaaattgcaaggccctgcgtctgcctcataaagacgactgcaatcagtaccaaggccagggctgaaactaaaagcgtctggccaggctaaaattgggaatgaaacgcgttcgctccactcaactctctgatcggtggctgtgctggggctggacgggccagacttgactttcagctcccaggcaccaacccaacttcagccctctccattaattgtcctcctctcctgccttgcttgcatgcgaatcttcagtcgcctgcagctggaaggcagaattggtgagtgcctgttcattttcctgcaggacgacattgtcggctggaagcctcttatactgccagctgcaattgtgcgatcacgagaaattcccccgcttcccctgatcctcagcacagcacgaagctaacacccgacgtttaacttctcagattgtcggcagtgatactgacattgctctatctctatcagttcagatatcctcgttgcgcttcctctcgctcgcgtttcttcctcttcttacgtgcggggttgtaccttagcctaacgtcccgaccccgctatcaccaccttcaccatcacccctcttgttgacgcccactcaccaataccgtcacaatgagttgtaagttcaacatatcttgttatctgtcgccttcttggagctctactgctcggttgcatctcctgccttcccaatgccatcgattctatatcagccttgcccgacgctttccgccccgcgtgcttccaggctctcagctggagtcagcctcgcgcaatacatcccgctttccgtgggagaatatagccgctacctcgggctgctctatctgatatttatcattattgcggtcactgcagcagtgcttcgtcacttattttcacttttttcggcggcttgtttacctctggcggactcgctaaccgaaggttgtacagttgccaatatgttcaataagctgtcggggcagcccgagagctacgagaagaagtatgcccacccatcactttgcctccttcgccaatgactaaccgttgtgtctttgcaggtcgctgtatcgatttggacgaaccctcggtgctggaacatatggtatcgtccgcgaagcagactgttcttccgggaaggttgcggtaaagattatcctgaagcgcaacgttcgggtaacgagcgcatggtctatgacgagctggatctgctgcaaaagctgaaccaccctcacattgttcacttcgtcgattggtttgagtctaaagtgtgtatctgtgcttgctttcgatgaagaggcccgagactgacggctactaggataaattctacattgtcacacaattagccactggtggcgagcttttcgatagaatttgcgagtacggcaagttcacagagaaggatgcgtcacaaaccatccgccaggtgctcgatgccgtcaactacctacatcaacgcaatatcgtccaccgaggtttgtttctcccatgattcccttttcagtcaaagggttttgaccaatgttcgtcatcagacttaaaaccagaaaaccttctttaccttacccgtgatctggactcgcaactagtcctcgccgactttggaatcgcaaagatgttggataacccagccgaagtgctgaccagcatggcggggtcattcggttatgccgctccctaggtcatgctcaagcaaggacatggcaaagctgtggacatctggtcgctcggtgtcatcacatacaccctgctatgcggatactcgcccttccgatccgagaacctggccgatctcatcgaggagtgccgctccgggcgcgttgtcttccacgagcgctactggaaggatgtctccaaagatgctaaggatttcattctcagcttgctgcaggtggatccggcgcagcggcccacgtccgaggaagccctgaagcacccctggttgaagggtgaatctgccagcgaccgcgacttgctacccgagatccgcgcgtacattgctcgctctcgcctcaagcgaggtattgagatcatcaagcttgcgaaccgcatcgaagcgctcaagatgcaagaagaagatgaagaagacattcccagtgcagttgacgtacaggcttcggaagcgtctgacaagtccggtctatcaccgttccctgctctttcaacagagaacagcaacacacaccctgcatcaaccggtaatggagaatcaggcggtactaagaagcgcagcttaagcaagattgcgcgaggtgctatcttccgtgaggtcgtcctcgccaaggtgcgcgagatgaaggaaaacgaggagcgagaaaaggtcgaacgcgaagctcgcgagcgggctcactcatgaaacctctgaatattgggcggttgattagcatttcttttccatcttctcaagagtcgagacctgaaatgtcggacacatacgtattctgtgactactgttcaagtgattcccctttactatttttgaatgacggatatttactatcgataaattgggttctgcacagatctatggtacggggcagtcccggttcttgcttttttcgaatttgcctgagctgcagtttgcatgacgactccataatcaagtccgctatttgcatcatactacctattctgccaacggtaacgtcgtatttatctcttagatatcgtgccgtatatggagtcttgaagcgaaaagaaactccaggagcggcccgatcagcagcgagtatcacagatcacgtcctgagaatagtgatgaactcatgaaacaagcaatagattgtagcctcgggcttgtccacctgggctgtatacaacgcgaatcacgtggcggcagtctctcgccgatccaatcaggcaggtgcgatctccaggtgacctgatcagcggctctgttccactcacagcctcccctccggccacggtccatttctacatatatactcttcctctttttctatatttgtccaagacccatcactgaattacgaacatctttcgcttgatacatacctgcgttgtccatatacctcctccgctgtatacacctttgcccctacccacgctcattctggatagccccgcattactgttcttctgctaaacgtcatacaattatacccgctggctacaaattcgacctccttcctccgctatacagcttcccactctatctaggaacccttcaaaggaaaacaagattcgggcttaggcgcctccttaaaggcgcaacgccaggatgtacgcgagccagcgactgagcaaggtagctacccactttcccatgccgcagatcttcgactgtgtgaagtgagacttatgccgcgctcctgccaaaagatgttctgttctgtacctatactaatatatttgttttaaggagctcatcaaggtacgaaactactaccgctttttttctgcgtcccagtttgtccgaactacgttcaaccccctccccttccaaaatgcgccttcacctgtgtccatctccatcttcatctccgaacccactgcgaacaccagcacggttacagaagactaacttacgcgctgaaataactagattagagagcagcttccgccaggaatatccctgcacaaagccgatgatctgcaaagttgggaaatggacatccaggtcctagacgacaaccctctttaccgaggcgagacatataggctcaggttcacattcagctcgaaatatcctattggtaaacctttccccttcctcgctctcttctcaggcttttgcctcgcggtctatcaccacttgtgctttccggcgcagttcactaatcggccttgctgcttccagaacctccagaagtccagttcattacagactcccaatctcagccgcaattcactcgttcctccgctccatcgtcgacagcaggtgaacaccaaccatcgaatgccgagcatcaaacatcaaccgctgccgtcaagcggcccattccaatccatccgcacatctacagcaacggcattatatgtctcgatctgctgagttcagcggggtggtcacctgttcagacggtcgagagcgtctgcatgagcatacagagtatgctaacggcgaacacacgcaatgagagaccgcctggcgatagcgaatttgtctcttacaatcggcgtcgcccgagggatatcaatttcatgtacgatgacgataatgtttagggcctgaagataaaaaaataggccttgggagtattcggttccgtaatagtttgggcattgttgcgatggtctctctgcatatattcaggcgcacaatatcatgataacatctctttgttcagtctgtttctctgctccttgttggtctcgttcgggcattgtactaaatgagcagctgggattggttggtgaagtagggtgttcatgtcccttctggttcggcaggcacttttatatgagcatacggttacagctccctttactagagatatccaatccgatattcagtcggtgttcactatacacagattgacagggaaaagcagaaggtagaggtagatagaaatgtaaatcgcgagacggacgggacaaaggaaaaaaaagttaatgataatcaacgccatagaatgagttggtacagacggtgctggatcttccacatctatcgtaatcccacgaatctttccgcttaaggtccaccagttcagtggcggacaatcaatggagttcagaccttttgattcattgtttatgggaaatttgtattttgtacagaagatagaaaaaactatccatgtatgacattaccggtcgacttctccgaaaacgagatccatggtaccttgacaaatcattaatagaaggctaggtagaggggtattagagactcaccaatgatagcgacagcgtccgcaagaagatggccacgagcaatctggtcaaaaccacccaagtgagcgaaaccaggagcgcggatcttgcaccggtatggccgctcgctaccgtcactgaccaagaaaactcccatctcacccttaggagcctcgatggcggagtaagtctcaccaggaggaacggcgtaacccttggtgtagagaaggaagtggtggataagggcctccatgttttccttcatagcagcacgaggagggggcatgatcttgtagtcctcgacgcggacggggccggcaggcatctgattcaagcactggtgaatgatgcggagggactggcgaaactcctccatgcggcagaggtagcggtcatagcagtcgccgttgacaccgacagggacatcgaactcgaccttgtcgtaggcatcgtagggctgggacttacggatatcccagggaacaccagagccgcggagcataacaccagtgaagctcatgttaagcgcatcggcggcgctgacaacaccaacgccctgggttctagccttccagatacggttgtccgtgagcagttcttcggtttcgtcgatgcggtcaccaaactgagtagcccactggtagatatcatccaggaggccaagagggagatcctgggagacaccaccgggtcggacgtaggcggcgtggagacgggcaccagatactcgctcgtaaaattcctagtcaaacaattcatcagcaagctgcaacaatgacccgtcatcggaagatatcaataccataagcttttcacgttcttcaaacccccacaggaatggcgtcaaagcaccaacgtccatagcgtgtgaaaggacagacatgaggtgattcaggattcgggtaatctctccaaacatagttcggatgtacttggcccgctcgggaatctcaatgttcagcagcttctcgacagccagcgagtaacattgctcgtttgtcatcatagacacataatccaaacgatcaaagtagggcaacgcctggaaatatgacttgtactcaatcagcttctccgta

SEQ ID NO: 5157 - DNA, 8410 bp, Emericella nidulans
ggctgggaaaccgcacgacatgaacccctggtctcttgacgcctcgatccttctgcaccatgagaatggcgctttccatcgtgcgaccattgacccatctgccggtggccttcacgcctctcctacccccgaccctaatcagttccagcgcatgttcaatggtgtacccagaaatgcgtctcctggattcgcaaaccctaaccaggtaataccgtctaaacgaccgcggccagaagatgggatttcgatgtcgccgagacaagctcctggagggctctcttcccgttcacagacaccacaagttccctatcctggttaccaaggcgccgtaaatggagctcctcaggtctcccatccagggcagtttcaacatctttaacagggcgcatccacgaatgtttcgcaatctccgataatgcaggatttagaccaacatggcgcgcaggggatgggaccattatctccaagtcccttttggccagccggggctcatgtcggaaaccaaatgtgtcccgcacaacccgaccaccccagccgggtgaatacccctcaaaataattcatttatgcctgcccaacatttctctcagggaatgggacccggcttctcgcctacccccgcaatgacatcggcgtccgtacaagcgccgatgcaggccgaatttggcggaatgcccccaggatatcaacaggcacttgccgcccaacagcaacaacaacggatgcatgccatgcaaatgcagaatcaaaaccgcgctttgaaccccggaatggctggtcggccgatagtagcaggcatgaatgccatggcaaacccgcagcagatggcggcgatcagacagatgcaacagactatggcgaaacctcccaatcccgagggcttcatgcgatccttgcagaagtttatgatgtcaagaaacttgccttttgacccaaatcccatcgtttctggtcgccccattaaccttgtgcagctatatgcggctgttatgaagcttggaggctcaaagaaggttacggctgcaaatatgtggcaggtcatagctcaacaacttcagttccctcccgtgcagtttcccatggctgttcaggagattcgagacctctatcagcgaactcttgccgcctaccaacaagctttcctaagcagtcaacaaaaacaatatcgggatcaggttcagcagcccttaataccacgacagcccagagaacctgtccgggatgcaactccagtctcctgccgtcaagcagacacctggattcgacggttcccaacagttagggcatccttcccctgctactacgtcaacaccgaacaacgctcatcaaggccctgccaacggcttcgcgacaccaacgcaagtcaagacacaaaataaacaacagcagggccaacatcgcctcagcgtctctcgtctatcccaacccccaagtactcctcatgaccttaatggtcaattatcaacacagtcgcccgctgcgtcggaaaaagggccagggtctatcgtcggtaagccggccgatgagaccgatcaatcacataaccggcctcttgggcggccgatacaggataccttcaagccaatggtaatctcggagcataagctccatggccctatcgctgtcggagagatgtaccagcttggagaagaaatcgcaaggttaaaacctaatgtaccgtcgtttgctgagcttggtgttattgacatccacgccttgaccatgggtatcaaatctggtattcatgcagagatgcgagtggcattagactcgcttgtttcactttctgctgagcccgctgtgcagatattgctcgataactgcgatgacttggttgatagcttaatagattgcgcggaggaccaagccgaactacttgcagagcatgcaccagaagtttccgatatgatgctactaccatcttacgaagaactcaaacgcggctgtcagtccgagtggacttctctggccccagttgctgagtttgggagtacggaatacgagctggatagggccgtcgataggctcatctgtattaccaccattatacgcaatttctctttcgttgagcagaatttcgacatactttcaacgcctcctgtggttgaattcttttcaacgatcatccgttaccttggcacaagaaacatgctccttcggacacatcagaacacgctggatttcatgaaagacaccctaatttacctgagtaacgttggcggtgccatcaatctaccaagtaaagaggaagcgctctgtcttctacactttcttctgtcctttgctccattcccggccccaactatgtcatcggatggtgttatgttcacggcttacaatccgtcggtacacaaatatacaccagccgctgttgatagtctggctaaacttctggcacgagatgaaccaaatcggactttcttccggactatattttctagcgacggggcttccaccgctcaacaagagcttctgacccgcgcatttggtcttgcgatttgccctgttcccaaccagcctaggaaaccttttgcaatcgcggatattcgcaaagtggttctaatgcaggggcttttagctgcagatattctggcaggatttgctgaagggtcgaccgccaaatcttggctagagtctgtggatggttttgccattcatctgcttcgcctctcatgtcttttgagcacagaacgtgtccctccaccgctccacaacgtccgtcaaacgcacgctgtgagggcgcaggctgaagaggctgaagtctacggttcaatcatcaatcggggactagcaattcttcggcgtctagctgagaaatcgaaatatgccgatacagactcagctctgcggtttccgtccggaattcttcccaagaaggaaagcttacttggcgcattgctgatgccaaacgtcgatcctggtgtcgtccggcaattgataacgtatgcacggctcgccgaatgatgaaccagatgaaccgcgtccttccttttttggtctactttctagcgatggcattgactacctcttgaaattcattaagtaacgctttcttccgtcatgtcttctatctatacatctttcagtaaacatttattcttcaaccgtttctcaattttctcttcacttggtttggcgccggtggaaatggtacttcaatgaggcgtgataatgtgtattctcctgtgttcattgctctgtactatgctcaataccctcgggcaaaaggtcttacgacgtctaaatggtacttatcagatacatatctaccgctcacctacctagaacgtctacttctgagatgtttccatgctccatcgcccgtcattctcgcgtaggaggcgcaagtaagcgcgggtaatcgcgctcagggctgtcagaggtttgttggtccgtgcacgtattgatatggcgtttctcccccacctgcatgaactatagtgggccaggtcgactttatattatcaatttaaaagaccagatgatattacgcagtgtagcacttgaacagccatgagatcattgaatatgcaatatcacatacagaatgcccaagccacgccagtaatacagaattcgcagaacgggtaggagaggaatgagaacagaaactcctgaacaacgaataaaaatgtacaaacacatcaggaggtaacgatgacaaaggcgataggaaggtatgagtgagctgcacctccagagctataggctatacctaatgagacaaataaacagagtatgcggttgcttcaactggaagtaaaaaagagcatctcgaagcttcagcaccttctacttgtcgagcgctcgcatgaatgatttggaatgagtttggctttttagaaccatgctcgcattcaaccgaatgttcaggtcgatattcgtttgctatctgaagacgagaatattgagcaggtcggaagacgacaggttgtggattagcctgaattagaacgcgatcgatagataggaattcattatcacagcttaaaaattacgctcaagcatgaacttttggatttcgggttttcgccagccctatttgaatcattgttagctgcccattctgcgaaacgttgagaacctaggaagggcaaaccttaacgatgatgtgtccatttagtcggttgattgtgatgtctgggctcttaggggcattgcgatcgggagactcgagtcccaggtacacggcaaggtcgcgcctgaaagcgtctaaatcaccttctgtcttctgaatcttggtttgctgctttgtcccgccagctttggtaacgagatagacgggtagttggttcgagggggttcgacggacgaagtagggcaggtttgtgagggacagtttggcggccgctggggaaggtgtgattgttggggtgctattctctctgagggtctgggattgacgtttcaattgggcgaggaatgtccggcgttgctgcgtgcagacggaagatctggggaagacgcgttggatctgaaaagctgcttctggaggggggagaagttagtatgaacagacaagttcttcatatccgcaatgttgagcccgccgctcggccggacaatacggacgccggtggctagcggaatagctataacgtacgagagctgatcaatctagattggaagcagttggaagacactgtgctacgtatccctgaggaagcaacgggctgcgcagcgcgctgaagatagcctgacatggccgttgactgcttgcgaacggtggaggctggtagagactgcatgagagtggtcatctgtgcaaggagtacgtggtggaggccgaaggagtttattccgcgcaaaggccacgctatatttcccctgaggaggaatggaccacggaaacaagggcgaggggagatggacgatcaaacgggactcgatgatggtctgattgacgatatcgagacagagcaggactttttgctctctgagcggagacgctcccgctagcaccaaagcggactagcgcccagaccaaccctcccgcccacattttctgaatctgaaaagccgcacactttgctattcatccaagacgaagccactgtccccttccctctttcgtcaccacttttccggtctctgccttgtcgctgttcataatggcagccaacgttcccccttccgctgaggcccttaccagcggcggcgccgccacaagaccgctgaagatatcgccaaccagtacgacttgctgcccaagttgattccctacctcgatcgccatctagtcttcccactgcttgaattcagctctgggcaggatgacgattcagagattgtccgcgcgaagtacgagcttctaaagcacacgaacatgaccgactatgtagccaacctgtggcaggaaatcaacaactctgacacgatcccggacgaattcgtgaaaaagagggaggaggtcctcgccaagcttcaacactaccagaacgagagcgagaagattaccgaactgctgcaagatgaagctgtggtgggcaatctgcgaagcgacaaggttgccaacttgaggttcctcgaagaacagcacggagtcacgattgagatggtcaacagtctttacgactacggtcgcttccagtacagctgcggcagctatggtaatgcagccgagttgctctaccagttccgtgtcctttccgccgataacgacaaggttgcctcggccacatggggtaagttagcttcagagatcctcaccaccaactgggaggccgccatggaggaagttcagaaggccaaggattctatcgagacgagactcttcaacaatcccgtgggtcagctgcacaatcgctcctggttgattcactggtcgctcttccccttcttcaaccacgaccccgcgcgcgatgtcctgaccgacctcttcttttcccccgcctacatcaacaccattcagaccagctgcccctggattctccgatacctcgctgccgccgttatcacgaaccgaaatcgtgcgcacaagaacagcagcgtataccagaagcaactgaaggacctgattcgcgtcgttcgccaggagggctacgaatactctgacccgattaccgactttgtcaaggctctctatgtcgacttcgactttgaggaggcccaaaagaagctcggtgaagccgaggaagtgctccgcggcgacttcttcctcgtttccgcggctgatgcctttgttgaggctgcccgacacctcatctctgagagctactgcaagattcaccaacggatcgatatcaagtatgtggcacaagccgtcggatattacagaccgcgagaagtgctaattaccgatttagggatctatccacccgtcttggtcttaaccaggacgagggtgagaagtggattgtcaacctgatccgcgacacccgagtcgacgccaagattgactacaaagagggcacagtgatcatgaaccaccccccgcaatccgtataccagcaggtcatcgagaagacaaagggtgccttcttccggacacaagtccttaggttcgtagcctcctgaaagtaccttctaatcatagctaattaaacccctagcgcggccgttgcgaaataaataaatcaacttcgtcgcatccgaaaccaaaagaaatcaattatccctctattcccttgttggttctgttcatgttggtagtattcccctgcaactatgcgcgggcttctttcgtcttgaatgatatgatatgatggaaaccagcagagtggcatcaggccggcgttcaggtggtcccgcttttcgacgtttcaacttatttcctattcacctatctatctacctacctttctatccatctatgtccgttttttccccgctctagctattggttgtcgaaccacaaagatacctacgaacaagaggaaaagcgagaagcaaggcagagtctcgtctctttccttgctttctttttccctgcctgtgtctccaacaatggagttgcggttcaggtacctcggtatcttgacctcactgcattataatacgtcactcacgacacccaccactatcaggtcttctatcttctaccgcaccacttgatgtattgacctgatccatgttgctacgaatgatttatagagttgatgggaataaatcggtatttgattctatggtctcctgactggtttcgtttcgtcggatcgatgtacatgctgtaggattatccaactcaggccgctagagtcagcaaccacctcacggcttgatcctcaaggatagacgcgtgaactgagatataactagcacatatgtgatcagaattcgaatcgcattcctgctctaccgacacctaataattaactgacattcttctgggttggcttgcttgttcaaggtggtcttcgtcaacaccgagacggagacggcgccaaaatcatgttgtcttggggaatgagagacggaaattggtagaaggatataaacctaagattgatacgaatagagcagaaatctagaacaggggatatctctggtaccgaaaccaaacaaaaagaaacagcggcgcaaacaaaatgcttagatatgcttcgaatgataatggctcagttccgtatctgtaaacgaaacaatggaagggtctagtatgtaggtggatgggaaaaaccaataacaccgagaaaaaatgctgggacacagggcctcactctactcccttgcacaaaggaagctctcaggccttgctagtccattgtctgagtcaggactggacagacgaaagtgcatacgtgaagtgggagaacgtggccgggaaagaccgaatcaaaccagagagtaaatgggtagactaaaaactatcccgtcaaagcaacgattgatggaaaggggacattttcatcgccgtctagagtcatattcacccggtcttctgcgtggagggcccgacgagagccgaacggggatgatctcgttgatgtagggttctgattgcgagtttgagtcgccagccatccggagggcttcttgccgttcatattcgcgcgacatgatggcgaggtcgttgatttgttcctgaacaagcaattagtattcggatacccctgacttccttagaaaaggagaagagcgacatactcttgtcagaggtacgccaacaatcaagtaaccttcgcgcccctttggtctcgtaagtatatgttgccaggccgtgtgtctccatattatatggggcgcaagaatggatcctgaggttaagtcggagctttacctggtaagtgtatggccggacggttgcagttggtcctagaaagtattggatctggcctaagacaatttgacgagagagtccatatcctggcaaccagtactgttggacctgagacatcttcactctcctcgtgccttggagcgttcttgattgggacaggtgtcttgagtatgtatgcgcgtagctaaaagag

SEQ ID NO: 5158 - DNA, 5896 bp, Emericella nidulans
tattctaatgaaatgcccaatattcattgccattgaattaaatagaactatgccaatccccagcaccagtcgagctgggacctcgtaggtcatatttgatgcgcgatccaggagctattcaaggccagtatattacgtgaacatgtatgtgacattagggctttgcttaataattatttaataagcagtccgagttaagactggataacttggcgccgctcaattaaccttattgggcgcaatctcagataagcttccatcacttcgcacaaatttatggtctcgctcgctcagcttcatcaattctaaatctcattttcaagttcaggaaatagaaaaggctgtttcgaatctctgtttatcagtgtcatcaggaaagacactcagactatccacggctgtaaatttgtgccatttttgcctattctagattatccagactatggcctccaatcagcccgacggaaatgaggaagtaggcggctctaggcctgctcaagtggacgcgaacataaacccttccacatcactcgactattggaatagtgttcctgccaatgccaatagcatgcttggaatgctgggtccctacccctggtactcgcggattgatcttcgaggctccaagtccttccttgccaaactccgacgcttggtgcccggttgcccgattgaagggaagctcaaccgaggcgtggattgtggcgcgggggtgggccgtgtcaccgaaggttccttagccatgtctgcaacgtggttgatgctgttgaaccagtgggcaaatttacgcaagttctcaatgagagcgcactcaagaaggcaggcgtcattggagacgtctacaccatgggtctagaggcctggaacccgcccccacggtattatgacttgatatggatccagttctgtataggacatttgaatgatcaacagctggaggacttgatcaagcggtgttgcgcacgtctgacggatggtacgggaatcttggttttgaaggagaacatctcgacggatcccgggaacaatgatatgtttgacgaagaggatagcagcgtgacgaggacgaacgacaagttcaggtctattttcatcaatgcagggatgcaggtcattctatctgacctgcaaactgggttcccgaagacctttaagcttctgccagtacggttttatgcgttgcagccacaaaccccccaggcttcattactccttcatccgaactggagtcctgtgggacactgtggccgatgtttgactgacggacaaggtttgtacaatagcaaagtctgggagatgtcggcatgtcagtacgtcaaagaaagccttggctaccaaagcgctgtccaagcatcgtaaatggcaagcgctatcgcacatgatgcagagacgctaacccgcatcctcatcaccttcccgctcattcgcatgcaagattgtcgccgaatctagcaggaaggaaaggggatcacatcttttaaagtatggcaagagtgtagtattgaatatatgacagaacaagttaagaaatccggccaatgtcaaattaaccctgtgggtgcggacactaatgaggtcgttcctatgggtcgcgaagtccagtttagactgtgttctcctgcgagggtatcgtatgccgctcattgcttgatttggtcattcttggtgctcgtcgtcttccatggaaggagacgaaggctaagacattcatcatcaaggctatgcagattctcgaccttttctcgaccttggcgtgtgacaggcgtccatttcaagagtgatgaagttgttgtaatgcgaggccagacaaagaagattcttgaagaaaccaacatgaacatgcagactatctggtaactattgggctcttccacacactgatactggcgtgcatagacggactagataagtcagggcaagggctcgccgttggctaatcatttggagtctggaggcacggcaagaggtagcgtataacgtgggatatgtacggtaacccttactgtctattgtgtagtgcactaggaaagcgtgggttacctatatacctaaattgaggacgtctacaaactgcccttaagccggaagcgtagccccagcgccaacgcggaactcccagatccaggacctgacgcaggcgaggcttagatatccactggcgacggtagccacgatttcaatctcgatgcatccgcctatgacgcggaatgggcgactgctcgcgtagcaacagcgatatcgggaccggcaggccagttgtagcagaatactaggtcgatatctaattaagcacagaggatacaatacgtaacattgtttctcttcacggtatatggtgcaggtatcgctgtgggtgcgaagaaacaaggtataaagtaggtagtttagctaacctggcaactgccggcagatcgttcacccaagtggcgcggcgagagtgagcggaatgaatccaactgctgcttggagcggagaaagcttgttgatgatctggaagcgctgcggaagttggaacagagtagcaaaccacatcgcgccctggcagatgcagttctatgaggaaaggcttggttagggcaaatgccctgtattagggcatgggacagaggctggccggccttacagcagcattgcaacccagaaccggttataattcaatttccgcgggcggacaggccagtcttgttctgaatagagcatgactcttttcccatacaacgatcagaactcatgtcaagtccaagatgttaggggataattgtgacgccgagcgccactggtcaatcttggtcttttttggtctttcttctccaacgctgtgactgacggggctgtgacgactagaagcatgcaaaagcatgctagagccaagattattaagtctgctatggtatgctgaacggaattattcggcgagtacaggtctgcggattggtgctatttctctccacctgcatcagccctaagcgagcgggacaggtacaaagcctcatgcaggcacagacaaatccagatgccgtctctgcagcaaccgctacggtggtagacgcgatcactcaggactctccggggactagctgtcagggtctgggatgtggatctattgcgttcgctggcgttgcagggggtcgtttcgttggtgacggttgagctgcgacattggatctcgcgcgtgtttgcctcgggtgtctcagcgcttgatattatgaaggcgctaattttggagcatttacctggggtagtggcagagaaggcttaagctgaaaaggaagagaggaactcaatatgactacctaggcaagtgggagttagtatattttgcagtcttactagagattgttgagtggttataatggctttgaataactcgttctttgggcattcacagaaccaggcggcgtttgatataacccaggtagaaccaagcagataaataaatacatgaatttccaaattttcagatccaagtgtaacgaacgaatacggccaggggtatctttcaatacagtactttaaacagaagaattgcaacgaaaccaacatagatctcgcatgtgtacgtagagccttcatcaagcctgctccaacgactctagatcctcccaccctccatccctctccaactgctcccgaaccctctcccgcaacgcctggatctgactgcccagcgcttcagcccactggccctcaacagtagcaactttatctttcaagtcattcgtgagcgatcgctcctcgtccgcctgactcagacttatctctctcatcacaacctcctcagactccccctgtctgatgcgctctgtctcagtgagtttacagtttgcgcgcataacagcagacttgacctcatgcagcaggcagaaaagattgatctgtgattcgatgtactggtagcttgatttctcggcgtgcgagactagcgtgtatagatactgcagtgggtgctggaggtacgacgggttttcatcgtactcgttagctgggatatggatctgaaacccggttaagttttcagggatggactgaacgagggttgagagggagggcgcgatgtcccaaaaagcggagagttgcagttcgacaccgcgaactacattttcctcgatgacgctctggaaagattgtagacgggcgagggcgttactttcatagcttgcccggcggtcgagggcatcgcgtgcgaagaacgccgttgtgctgcggattttctcctcatttttggattgttgatagggaaggataacgagggctttatacttctcatcgcgggctgtgattaggtcgtacatttcgcgatgaagctgctcgcgcgcctcgaagagccatttgagctgggtgagtttctcaaggagctccggtttctcgtcgccttcttcctgtgtctgatctggtgtttcgtgctgtgcgtcgtcgaagagtttgctgcggaggtcgtcgatgcacactgttgcgcggtcgatacggtccgttaggattgcctgcagtggtttgaggacggtatcctggtaggaatcgaaaagttgctttgtgagagcgcgttcacgctgattctcgtcttcgatgagggctgcttcagcctctgcggcttcggcaaaggagatgctcccgtcttggatttggctctggatgttggcgcggaattgacggcggtggtctttgatgcgtacacggtgggcggcccagaggttatcggagtctgtggcgtggcgttgccgcgtggacttgatctcggtgtggtcgcttatcgagcgaacgagagtgcgataggatactagttcgggatggctattgttgacggccgggtaatggcgggggtatgggggtggaagggtgattagtcttgaaacgtccattttttggggctctgtggatgtgctgtagctgctttggctgggggttggatattcagggagtgtttggtcctcgtgccatccgaccttctccggtggaaactcgtctgggccatactctgcgtagttgttgaattgctccaatgtatgctcggcgctcccgttactcctgagaccgagtggcaggcccatgtacttggattcccgctttgagcgttgaattctacgctcgactccttcgctacctgacccagttttggattcccaccagcgactcggtgcgcgccctctggagctctcatcgttgctgataccaaggctggcaatgggggagagacaaggcttgtagttgttccacgacgattccccacgcgtagtaggaatgtctagtttaggtcctttgagtgaccgccggttgaggggtacaggggctggttttggtggcagctggaagagtttctcatgtagctgctctgaattaaacgaaccagactcaaagaccttgctataccgctcacgtcgaatttgtgactcgctgatgataaactccgtaaacaaccggagcgcttccgcctcgtcggtagcactagcctccttctcaataaactcctgatgcctccgcgtagcattttgtataagttctgtgtcctgattgacaactgaatccaacgattgtccgctatggattgataaccgccgtggctgcagtaccggtgaactgacagcatcattaggcaagtgaagaatatgcgagactgggcggttttccctgagcccatggcttgaagatggccgcgaatctggtccagattgcaatggaggcgtgggaagggctttcggagggatcgcctgcgatgaggtcttctggaaagatgactctgcatttggcgagaatggaggcgtctgagcatatctttgcgatggcggttcaaacgggcttggttcgactcgaggagtcgagaacgcagagcgatctgaggaaaacaggcttgttgatgacgcacgcgaccgggatgtatgcatatcagatggggcactgtgat

SEQ ID NO: 5159 - DNA, 7471 bp, Emericella nidulans
  unsure (1)..(7471): unsure at all n locations
tgggcttgattgggattgataacgaggctgagagggtctgtttctgtttatgaggtgacgagagcacaaaatggggggaacggaggctcttcttatagattttcttgtacatctagagtagacaaacaacactcctttaggctccctgttcatgattccattcttgtcactcgccgctccgccatccattcgatcacaaacccggtatgctactgttagctccgcgaaatgacaccaggacaggatagacgcgacgagacatgaccctcatggtgttccttcatatgcacttgagaaattacaagggggatggtacggctgcgtcgaagcaatcagaatctaattttcctaatgaggtatcggcgcctcctcgtgtttgcggatcgccctcgtatatatccgcaacggcacgcaagagttactcagcgcatctaagccacgctcgtataagatctaaatcgggcacgcccgtgcagaatgctcgtaccttgcatcgtcgtattctggggaaatgctattatttgctaatttagctgtacctgaggatttgcgctagaatgtctacagtacccagctagccctaacttcttcatggcgctgtatcaaacaagcgctttggtccatcattggatatggacgagatgacctgacctaggttctagagcatagactcgtattcactacggagcttgacgcctgggtttggtcgtgccgtcaatgctacagatatccagttttcaacgcctgatagggcgaccttttatttttagaaacatcactttatgatcagcgctggtgccctaaatagggacggtccctatcaattacaccgacgccctgccgaggtaaaatcaaagaagtgcactcacattcatcaacgggatatttgactgttcaaaggatactataagatgcggcctgtgtgaggcaaggactcttcatgctcttgagaacgaactgatgttttcctgatttgagggtagggcagctacatagtatcacgcaaatgtttgctagcaaggcatccatatctccagcattcattgttgcagaaaaaatctgttcttgtggtatgacaggatccaaaattcgagattcgtcttctgattcttgtgtgtaagacaaattgaagtcctgaatgcatatttgtttcattgataaggttgtcatatataggtttagggttttagggatatcgaattgcaaccctatgcactgaatcagggacacagcgcgaatcgggggcttagcctccttgcaggtatcatataggtagtaagtattcattaaactgttcaactgtcggattatgattgacagtctaaactgcctgtgcctcaggtgggtctggtagactgaggctcaacctggagtacccgcctacttttcgcaaatgcaagctccctacgttatatgacgtcgttttgaggtacgcaaattataaggactcttgcatttcgcgagcaggaagatatgcaaagtatcctacttcgaatgttgaattgcagttgagcaaccactgccgtttgtaagcgcctccgacatcggacctatacctagtccccctctccaacccccgaccaggatataagaaacgttgatcctcttgaattggactattgtacataaatccgtccccaatagactcgacgactttagctttcagagccgtacctttccgtacctatctagagttggtattgcgataattataaacatcaccccgtctccacgcctagtaacaaccggggccccgtgaaccatgtccgcgacccaacaaacccaagctgagcgtaaggacaactggtcatccgaggtaataacccccatcacatatatgtctcttgagggagtaactaagtcaaggccaggcctactcagcatccgctgccttcgtcccaaaactaacccagactctgctccaatatctcgacccgcagccttccgacagcgtcttggacatcggatgcggcgatggaaaattcaccgagctcttcctaccctatgtttccaaggttcttggcgtggattcctcgccggcgatgatcgaggctgcgaggaagggctacggcagtgagaaggccgagttccaagttctggattgttgcttcttggagcagaatagcgacgttgcggatggaacatgggataaagtgtgagtcttttcctggaattgtctgctctagtttgaaaggatgtattgcaggcggctaatttgggtgtgcagtgtttccaacgcggccttgcactggatcctccggaatgaaaaaacacgcctctcgacattaaagggcatccacgcgtctctgaaaaagggaggcgcattcgtctttgaaatgggcgggcacggtaacgtcgccgagattcaggctgcaatgcagtacgcccttctccgacagggaatctccatagagaaagcccgcgaatcgtatccgtggttctttccgtctgtaccctggatgtcgagcaccctggaaagtcttgggttcaaagtagtgaagatggagagcgagtatcggccgacaaagctgactagtgacactaatggggggttggcagggtgggtgaggctcatgggggcggcatttctggacgttgtggataccgagaagagagaagaggtgatacgggaagtctgcgaggtgttgcagacggtgacaacccgcgaagaggatgggagtcagtggctagggtatgttaggcttaggggtgtcgctgttaagatctgagagactgtattagtagatgttctgcgcatacatatgataatcgtagcagctttattcattgtgataggtgctggcgctttgctcgctgctgtattaacaaagccaaagggatatcctcttcatcgtagaactcagcctcttcgtcaacgccgaaatcacgcagccgttctccttcagagttcttccaaccttcttcgccgtggtcggagtcgtcgtcgcttccggtatcagcctcggcatcagacgagccatttgagtattcctccaaccgtacatgaaacggcttgcggcgctcaatttcagtcggcgctctccgacgtcttaggtctgcctcctttcgtctattaaaagcttcaatgtcgatttgaccgcttgtaccgcttgtgtctgtaatgtcgtacatgaaactatctcgctgatccatgggtggaagagggatgcgatctggatctggcggtggccatgaaacagtaggatctatttgcataagcggagtgcattacagggcaaacatactccctaccttcgaacccgttctcctcgaactctaatcccgtgctacggtcaggcgtccttgccaacggccaaaaccagcttagcacctggagagaaagttagctgctgatgtcacagtgattagcgaatacgtacattggcacttccgcccattccagctctgatattagaccagatacctatatcatagggaaactcctgcttcgttatatgcacactgatgccccctggcccgggcaagctgccgccgagacgccgagcgcgtcgaagcagggtttcatgtcgttcgatttcccacgattcgatggtagttgtgttcgacccgagcgaccagagagtcctcagaagaagcagagagagtgcaaacagggtcaagctgttggtgacgaataggacgaatagatggccgatttgtcccatgctaggtcctagatactacggaacgttagtaagtaatcgagacacgggctatcttacttacactgggcaggtgccttgacccccaaactttggagacacgctgccagagacgagtctcgagatacgcaataccgactaccgcataaaacagaaatcgcgcgaaatgcggaaaggtaaagtgtgagacacagttggaggtccatgggcagtgatggtccattttcgggacacacctagaacacgttagtatgacaactagtctgcatacttagacaatcgtacctttcacatgtcttgcaatgatgtgctcttggtggtttataggcttcgcacctccgacaccatcgttgacgaccgctagctcgatcggccttcaaccgctcacggtccgatggcatccaccctttcggcacatgaccaggatcaactgtgcaagcgcgataatagcaaatccaaatgcatatggcaagaatgttgattcgccatacttcgtcctctttcagcggtgcgtcctcgaagtacaggaaaaagatctgcgatgtgtacgcgagaaacgcaatcaatatacaaacagctggtattgcaagcctcgagacagaaaatgatgagcacagcatcttatactttctcggccgtgctcaaggctacatatgctgacaagaatagaatcttgtgatatttgctggcgataacctcgctgctgactaatctcacgtgcttcaagaatgttgacgtgcgtggaaatactctctctctctcttttctcatattctgatcggattccataaatcaccacgagcagagtatctatatcccaaaagcataccaagactactactgtgcagttaatatgcgtatatgtctcatacatgacgagccaattttaccctcgtgacggaaatgccgattgtggctcttccacctgccactgttcgggccattggctcaacatctatcatctctgacccgtactcactggcgaaagagctgctggacaatgccctagatgcatttgcaactttagtgtctgtcgaaatttcgcaggacacggtcggccttcagggatggccagaaagtcggcgatttcaaaccaaacttctctgtcactgctgtagcggctcacggcagtatagcagcaattggaggagacgattcgactgttcagatttgcgacattgctggaacttccttaacgcccaaacatgatttcaaggcgtcgcgcgacgtggtatcggctatggcattttcgccagatggttccaaattagctattggtgactcgcgcggtcgcgtgctagtctacaaggtggcggacggcagcttggtgaatgatcgttggactgcacacacgtctcggataacctctattgcatggaacgacaacggcgctcacatcgtcagcggagcgttagataccaatattttcgtttggagcttgacaaatccaggcgactggctgcaagtgtccaatgctcacaaagagggtgttaatggcgtggcatggattgctgggggctccaaggttgcctccgctggggccgatgcggcggtcaaggtatggaaggttgaaggactgaaataatagacgcagactggtatagttatctatgagtcactttaagagtatataaacataaacctataagttgagaaggtgcgtgtttgaaagacaattattccgtggcattaggtaaacgtggttacgtcgtggttgggcgttgctgcaaacaaaggccgaagcaccgaccagtcgggctcaaatccaggaacgcgcagcttctttcagcttccttcggcaggactgatccgtagagctccagggagagaaccaccgaagatgagatgagaacatgtctgagtctgggaatttgttgagcaggttccaacgattcttccgttcccaaacggtaaagcgcaagctatacagcattattgaggtgcgcctggctgatcacataatttcgtatatagcttcagcaggcgacctttatactcccaaagaccggacagcgcttgaaaggcctggtgcaactaccgaattancaccacaattccgtcggccaccgtgacaatggacaacagcctgggcttttatcaagggagctacctccaggtgccgaaggcgttcatcgacgcgtgagagggaaactcgaggaacactggaccttactgcggcagcacgttacataacaagcctgggataggcgttctaaaatgcagcctggcttatttgcttggatctctggcaaccttcgttccaatcctcacggcgctgcttggtcaccaggatagcaagcacatggtcgcaaccataacggtatacttccacccagctcgatcgcaggggagtatgttcaaggctttggtctgtgcttgtttggccttcatctacacggcttttatctcgatcacaagtatgtgcgttgaaatgttcttccaagacacactacacttgctaccactggggcacgccattgttcttatagtgttctgcgggggcggacttggtttcatcggttggacgaagcaaaggctgaatgaccccctcgtcaacgttgcatgctctctggcttcactttcgacgattagtgtcttgacaaaagaaggtgcagtgcaagccggagatttatcgtttacgaaaatttcacacgtcttgaaaatgattatcatgggggtctctgccacaatgactgtatcattcttaatatttcccatatctgcgcggaagaaattgcggtcaaatctcaccagtgccaccgagaccatggcaacgatgttggctttgatcacagagagctttctgagcggctcagaagaagagctccaaactgcagaatttgtcaatgcagctgcgcaacataaaaaagcatacggccagctcgactctctcgtcaaagaagctaagctcgagcactatgtgagaggaactgagaaggagtataggttggaaaagaacctcgttcgctgggtacaggatataactcacaacttgggaggcttgcgcagtgctgcatcaatgcagttccagctgcttaagcagacaaagccttttggttcaccgcagccacaaagcatagggttatcccatcaaggagttgacgtttgccggtcaatcagtccatggtcaatggccgaggatcgaccttatttggaaccaattgacgaaaggccggaagacgatatatcagaacccgatgtcctgaggccaaccctaagtcgtaggcagacttctgaatctgaggctagtgcagctcttcttcctgcagatattttcgctatttttatagaccatttgggaccatccatggtgagttttaacggatacgaagacgagagacccgtactaacctttggaagagatcacttgctttcacgctaaaggagatattcaaggaaatacctttcggaccggcccccagctataaagtcactgtggacagcaggttcatcactagcttagaccgtgctcttgagctttacaaggcatctcgagaggaagcgctgaaatctatataccgggagaaagatatcttcaaggttaagaccctggaaatcgaagcagacctggaagaggtcgccgccagttgtgggcatttcagcttttcgcttttggagttcggcgaacagttaaaggagttgctcgcaatattggatgagctacagctcgagtctgaagagcgaccccatggaagatcttggaattggttgaaattctggcgtaaaaatgaccttgagcgaagaagattcgccggtaagtacctagactaaccctattgttgctttgcgagggggcttgactgacgaag

SEQ ID NO: 5160 - DNA, 6973 bp, Emericella nidulans
  unsure (1)..(6973): unsure at all n locations
tcctgcactgatgcatcaagtaccactattatttcgataatacttaccgcgaggatccttaaacatactcagtgaacaggttcaatccacgtggtctcccagccggatctaaagaaacaatccacgggctaaacacctacctgactggaaaccgcaccaccccttatgcaatagtagtcatgtattctgatgtctttggcctgtccctccccaataataaactcatcgccgatgcctacgccaaatccggcgagtggctcgactacctccctgatttcttcaagggggatcgtgtcccgctatcaatggccgagcacctcatccccgttgatgcaacgaagcagtctgttttccggaagtatacggggctgttggccagtataccttctttcttcaactggcagaataggcaccgccaggggccgacagatgccatctgtatggagttcctacgcgctttgaggagagagaggaaggggatgaagattggaatggtaggcttttgttgggttggagagtatgcaattggagccgggctggaagagaatatgatcgacattgatggtgcgcgagtaccgcttgtcgatgcgctcgtggcgcttcatccgagtcacttggctatcccggatgatgacaaaacgctggttgttcctgtatcccttgggtggagggctgaggatagtttggttgacttcaagcagatgaatatggtgaagggtgtgcatgcagataacaaggcatctggacgtgaggtcccggggattgcgcatcacgagtataagcctggccgccatggtttcgcagtacgaggcaacccggatgacccacaggaaaggaaatatctggaggactcggttacgcaggttctgacctggtttggacgatggctttgattccactatacggagtacacatacacttctgctattaccgcagctcaaaggctacgacttctttcagctgctctattgggctagattgtatattactttttatacaagtaaatcaccgcttgcggtagtatgggaaagcagaccttcatttgttcatattcctaacggtgataccgagaaattccgcctaggttaacggtccgtatatttgagttggttttgctgagcttccagaatgagtggaggcaaggttacgaaaaaggcgtatttttcttatactatattctccattaaggcgtaccatgccttgacttttgcacatgacacatcctgcttagttcctcacctcattttccgccagcagtataggccggcgagttatgccatcgcctcgcctgaggggagaattgagatggtctaagcgccgaagctattttggtcacacaatatgccacacaatttaagacgatggagatttattcggtgccggggtaaatatggagcagccgcaaatgtactccgtacatgtacttcaaagtaatacttcagctagatactaatgcgtactacaaacttctacagacgtttcccgccgcctcatgaatggctttgtgttcttcgtganctcacctcgnctagcataaggcttatcaagtatattttaggatgtacgctggagtatggctggtttcgcgtgcgcgggattttatacacgtntccgggctagccttgatcgtcattagctgtggtcaagcctgcgtgccggggcggaccagacatggcgggatgttcttttttaatgggctatcccaagcccttgcgacggaaggcaggtcggtagggttatctttagaggatggttgtcgcgcagtagctcaattggctgagcagtatgtgagttagtcaagacacggcatgccctgctagtatacgtatcgccagagaatttggaaggcagatatgacaatctgcgtcgatgagagtatgcccagttttataaagacattgccggcatcacgtccaggatggcctcgccagcccgtggcttttcgcgaaccgttcctggccacgctcgaaaaagagttttaggtctaccatagtatctcaaaattcatgattcaagcgttgattctctgtaagcatactacgtggtaatcaaaggcctgctgttacaggtctacatcttgattacctaataacccggaccgagctattttcactgtggcctcgagaaaaatcccaattatcccaagcacccattcggcatacacgcatcgtttcacccatcagcatcccaacattgattgtccggatgaatttagaaggaaaagtgatacggaaatatgaggccacgtgatctccggtcgattgaccggacatcgcctgtttctagaaggttctcaccctctgtatatatatgtttgaggggggaaacaagagagtaagaataaggcaatgaaggaatctatcgtcaacaagataggtgtcaatcgtcatatggcatccgatccttagtaggctacgttggtgtagttgatgcagtttcctcctgccctttcccctttgagcatattccacaacaaaaagtaacgcgggcgctttatgcctgtgaatcttgcaacattatcagaccctgcgggaatcaaagggtccatactcaaagcgattatcatttggttcaagattagacgccttgagtcctgttcatataaaggtaagcatcctgtagatacaatgggttttctatggccattcttatcgaacaaagaaagtagaaactattgttttgctattccctttacacctgatagataatggcgtcagccctatctcgctattaaaacccaggcaataccttatccagcaacacgacaccatcacctcgccgaaatcaccagtatttcatccaagaaacagaatcaactgtaaccaggccaactatccattatgtctacgaaaaatgaagtctactgccccttctgcaatgcccccgcagttgacaactgttacggcgagcacttgcttgacccagccaccacgcctgacagccccgagctcgctagggccctctacacatccatgtctactctcatgtcttcgagtttagcagcagaagatcccaggaacgccgatgctacctacccaggggagatcaccgagacgcagtttcgggtcgaaacggaccaagacatccaatttaacggcacaggcctctcttcctaccaggccgttagtaaagactctgagtccaataccgctgagataggagctaatattgacaattctccattgcaagcgaacataggcccacagcgcaagcgctccaagtcggatccaaacatgactgccgtggcaatcgagaagtatactgctgagctaacggatacccaggccagggcgtggcaggcgctgaaggagattgagaaggcgaaaaatatgctccggctttctcaagctcagcacgatctgtgggatgaggctattgctctggggagacagaaggtgagggtctttgagagcaaggggatgaaggggacgctcaagatcgagcttgctagggagctctcctctaggcttgaagacttcaatctgcgagtccagattggactcaagaaggggacttttaaggggtaactctctgggctctagggactattgcccatatcaggcaaagagtagctaacacctgaaaccgcgttcaaagtatactttctggtgtgtctgtatttttttggtgtaattttattatatgtacaacgcattagttattattctctgcactgagtttctactctcttttttttattattctggccgtggcttacatgtcccggtgatatcatgtgccaacctgcaaaatattaggtcatatgatcgtaataagaaaaaaccaatgtaaaatcgtctgcaatgattaaagaatggacaaaacttcgagcactctcactcgtcttaggggtagcgtgccataattttccatccatatttgaaaactcatctacagcaatatcccccctctggcttccagctctttcttgtagcatgaccaaggaaaactgtgaacgtcaatttaatcaattcacgagaactgtccaaatagtactccaccccggccgttcggcattttttctttggccacagtcgtggcaatagtaccattagaaacaggacagtctgaataaaacacattagcagtgatctgtaaaactaattatcactcgagcgatacggataatgagccgggttctgaagatatcctcgaaagaagtagagatgagtcttctgcgacactccgatggctaccagtatcaaccctgagtccactccattcatgctgcacataggtcagactcgctctcgatcagcggacttggatagagtagccctagtcgatacagagggtagcagtgactcatgacccatcagataatccacattatcctccctttcagcctcaaggcttgaaacagactttcttgttgccaaacaatgcaatactgtgcccttgtccttgtccttgttgatacaggatactgacagctgccaggcgggccgcccaattttcatgagcgcgaaaaacaaccacattctccggaatatcaagaagttcgtcccagctatcaatggatgtgtagtcgtactacgatcttatgccacagggtcatggtcatgtctgtcacaatctttcacaacgcgagacagattttcgaatcaatgcagaggatgtccaagtccgctacccatgcgccccgttcaaggacagaaatcacaccacaacaaggacattctagtcaattttgcgagacaggccagtctcgagaggaaatcggcagtccctaaaggtcagattcaatgaggtcccctcgaagttgttctcgcgcttgaagtcatacgatgcatgcaacacagctgtatactggttcaggcgactgcagatccgtggttctttggggcgcgacgagtaggttgattccagcctggctatgtttcctacgatgccgcgaactccgtgggctgtcggttgtttgaatggactgagtaggacgacggcggcaacgaatatagaattttcggggcaaagggcagggttgagcataggtccgtcgaatcatgatctactgttccggattcgaacttgcccacacaggaaaatgcctgttcatgagtcaaagccactggaactgctggaatgagcccggcatcaaagttttgcccgcgtcctgatctggagaggcttgcaaattggattgggtacccaagcgctagtaacccagagtggctggatatggcttcagtctcaggaggttcaaaataatgtgcaatctctaaatctgtttgcttctatcgtgcgacaatgggacaggcatcaagcagcttattcatgttttccataaagtgtgtgttgattgtattgaagaacataaggtatgaagaaccttgaccgactggataaatggcccaataagaggctgcactcagtgttgcaggtctcaagagcataccagagcgtactcgtgaacccgggaggtttgctcgcaggtttactggccttctgtttgctggtacttcacaggcagccttcgtaaactgattgctactcgagaagccacaaataacaaacactatttctagtataatatggaaacgactatgcaagggccagctcttgaggcttccagcaccatgtaaatatcactagtaccttatggtatctatacgcattaatgtcggcagctacaactcaagaaaatgaacagaactacccgcagagtccatatttctagcctattgagaatcaagaagctccgacgcaggcagaataccaaacataacgaagcatcatccccaacagccggactccacatataaaaatctgtcaaagtgatcgactggtctgctcaatggagtagcacctatccccgctctggagaagataatactcgcacagccgcttataatatccagcgtcggctgaacattgggcccaaccagtgattcgtgcagtcggaccccacagctgagcgccagttgacgaatccagtctggttcagataggcaaatatctcggttaacatgagccagcagttggctccgtcttcgacttcgtagcaggttacgcaggaggttgttatgctagtttgggtgagagaggggcctgaggtgattgacccacaacccctagaatagccaagggtgtgtaatgaccttctacagtccttcacaggctccgatcagtaaactacatatagacctgaagtatccttaacagacagcggtcgttaatctatctgatacatagggtttgggcttgcgccccccccggctcggtgtggggccgaggttgggagtagttctttcggggaggaaaaggaggatctgcgagcacagccaactccataatttccccgctgaaagactctgaaacttgtcaatatactgcatgaagctctgtatagccaaccctgtcatcgacttcggggtgtatctaccagggtgaccgttccgaatatacacctgagagaagctgttcgtacaaacgctcgatacaaccgacaaaatgggcattccgaccaaagcatatcttgtcgaggaagagaggggtcctttcgtcctgaaagatgtagtccttgatcaactcgagccagacgaagtcctcgttgagatgaagtacaccggtttatgccatacggtccgggctcccctgtgctgtttttttttactttaaatcgcagttccaacaacgctaacgtaaccaggatctggtcgtccaagcaggcatcctcccagtagggagtttcccggccgtactgggccacgaagggtgtggtgtaatccggcaagtcgggtcaaaagtcagcaacaaagccctgaaagaaggtgaccaagtcttcctcagtttccgtacgtgccgcgaatgtacaccatgtcttgccggacactgcggcgcatgcattcacagccaggaactcagttttctccgcacgcgtctggacataacatagccgtcgccgattatttaccggatggtacacctgtgcacgggcaaatcttggacagtcttcactagcaagcttgccatc

SEQ ID NO: 5161 - DNA, 6943 bp, Emericella nidulans
agggcaggggacaacaaagctcgtggatgtaggaatttgtcatcatctttatcaacatcagggaatgggtctaagccctggcggatcaggtagatgtcttgaactgggtaccagatctccttcccatcaaggactgcttgcatcttggtaaaccaagtctcagcattcttgtacaacaggatctccagatcagagaccttcagggataggaagctgtcacatgccatggtagaagtaaggcagtatatctagctgtcaagtattgctaggtagggtttgtaagcctagtctagtggcccgggctcataaccaatgtagtgaaatccacagttggtcagaggaagttgacatataatagagagaactaagtgatcattgtctgagggagcaagctcatggacttagttacagaacagaaagatgggagatacacgtgtcatcttatatagcccctcaatattggagtatcaactactccaactccaagcaattactccaactccaagcactaagccatattcataacatatacaaacaaaaacatacctaatgttagggctaactgttccgtatagtttgcaacatcggaccaagaagcacgcacttgaaagggaagaacagcaatcacacaagttatgtagcctcggctcagaccctgcttcagggttttccatagctggccaagaccccaggggctcagatagctcctttcgaactgccctagaccgtcttggcgccttgaaacgagcttcccagcgcctaacaaggtgccaggaacatgttttaatttccttttagttgagcctgttgtaactaccggaaagatgccgactaatccacggagttatctgccacatcacgctgcttcggaatggttggccttgcctagataagacctatttcttccctgaaaaccctcattgatgcgtacactgaatgtcgacaggctaagtgatcccaattgcggcactttcacggcgtgaccgccacatggccgccacatggccgactactagtagtaatcttcattcttctcatggacaaattagtgcaccttgagctgaaaacatttcgtaccttaacagtggggtttgatccatcgcggcttggccgattccagactgtgacctcggggaacttggtccagtacacaagcactgcttgccattcggcccccaatgcgagttacactataaagggggtcgaaaccagtcgcactgcttgtttgacgaaaagacatcccactgccatcgtgcggtgactacaggatcggaagagcacaattgccgcttcgctctgtttatcttccaagtatcacatcatgaggttgagtactctgcttgtggcgcttctgccacttgctagagcggctcctgggacaacagatgctgggtatactcacccggattgggaggcatactctgggcctgcgggtggccggttgattaccgaccctgagcgcctagcaaccctccatgaaatgcatgccgaggctatcgagatgctgaactcgcacgaagctatttcagtcgacccatcgaacatcagtgctatagagacgcattcccaccaaaagcgtatagtacatgccttggggctactgggagtgcaaatcttctcccggctcggcgctgaagcccttcagagtgtgatcggtgagctaatagagttctttaccacggacgacatcatttggaccagcagagacaactgtcgcgcatatttcagcactcagggcggcggaaatgaagaattcaggacttacgcgaaggaccatcgccaggccacagccgtggataagaaaaagtgagtgtaagatatcccattcaaatgccgatgttaacaaccagagcagtgttggatggatcaaccccgagagcaccgctccaccggtccattttttcgagggtgaccctgcgattggtctttacagcgttcagtttactgccacagacaaggtggcctggagtggtatcccaaacacggagaagtgtaaaattgaaggcctatgtaatcctcagtacatcttctaccacaagggttataggattgttctcaatacatggggtaagtgcgcccaggcagtatcaattgcgctcttgtactaatactccgcagaatcccagggccgcgtatccgcctgtcagtattctaaaggagaggactgcaagggtctctgcgcttctggtgtgaaagaccagttcacatcaggcggtgtcaaatggggcggagattgcgccatcccctgcattgatgacgtccccgaaggcttcaaaaaggtccaaaacgaggaggcaaggttcatggtcgtcggagattcgatatcgcacgggatggaagacgactggacttggaggtacagactcagccagtggagtaaattactaccctattctcctttctctcaggatatatgcagcaccgggcctaatgcgggaactatttgactagtggaacataatgggtacacgcaccattttgtcgggccatggacagggacgcgtggaatggatccaatcagtatctctcaaccccgagcgcccttgctacctgacgaggagccccgggaagactatactggcaagagccttggggactatgcaaaaggggtctcaaaaagtttccgtgataaagggcatgcttcattctggggtcgacaagtcgcacagtccaaagaaacaattaaagcgtgggtctccgagtataatcccgactatcttcttattctgctgggattcaatgaccttggctggtgggtgaacgggcctgaggcactggttggagacatggcaaacctgattaatgatgcacgaaaggcaaagtcggacatcaagcttctcgtggggaatgtcgttgatcgcacctttatcccagggcgccaggacttggtcgacgagaccgcccaatacaacaaactcctaaaagagagcatgaaagactggtatcgcgagggatcgcctatctcatacgtcgacgtcaactcaaattacaactgccgtcccggcggctgtccggacggacatgacggactgcaccccaatgctcttggagaataccatatcgcgcagtctttcgctcgagttttacagagtgatttcgggtatatgggtatcgagttccgcgttcccgagacggtggattcacggccagtgagtacgccagcgaatgtgcggtcgaattcctaccctgaaggcctatgggctgtttgggaccgtgttgaaaatgctcgcggatacgaagtccgctggagactaaagggagcgacgagttggtggtctgaaggcgccgtatacccagttacgaactgcgcctggcagccgtgggtgatcaatggccaaacatgggagttccaagttcgcaccatgggagacaacaccgttagatcggggtggtcggccctgcaatctgtcacggccaatgtcaaaaccgcaccgggaccatctaatattattgttgagcctcgcggaaatgatctcgttgtgcggtgggacgctgtcacagactacaacgtagaccgatatggggtcatgctatacgatagggacaaggaagatgaattgatggacgttaaggccgcaaagggtaccagcttggaaatcacgggtctaaactctggccaccgctacggagtatgggttgctagctatgtcggaatggttgggagcttatcacggaatggcatacaagctggcggtttgccttcagtggcaagagaagtcattatcggacgcgggacgccagcaccacccgccggactccgcgtggagaatctcgatgcaaccactgttcgtcttcaatgggacaaggtctccagtgctacgggctacagtgtccatgttcggagtataatagacaacaccgcgttccgggtagacggcaccacgacacaaacgtcatacgaggtcgcttggctattcccgggcaattggaacttcgaattctgcatttcggcttacaacggaaacttggaaagtgcaccggtctcctgtatcattccacctgtctgttgcggttatgagaaaagggacctggttgctacagagtacccgaaggccgaaaataacagcgctttcagcaactccatcagctcgttcggcggcatgagcgtggggtctctgtttacaaccttccagcaaagcattggtcttgcactggacaccgcgtcggatcatagtctggcgatacctggcgagatttagaaatcaaccaagatatgtggtacgcgtggctagtgacatggcaagttctatctcactcactcgaacgtctttgtgttctcaaatatcgcttgattgcgataaatcttcgcaaagtatatatactttctcttctatttcttttcttttccattttccattctatcgagacaagagtttacagatcattcagatatatcattggaggattatagagctctaactcacttttaatattaaaatacataacatgtgctgagtcaaaatgtgtgttccatcctccaaattcaactacttctttgagcaggggcacgacgtcaggtcttttcctggagttcatccctggtatctggatgccctcttcaaatgcagtagtgattaatctataattttctctcaattatcaacgctaccttccgtcaactacttcaaaactagactaagccttcttgtaataactacaatgtcaatgtagtcagctattcaggacgctaggaaaacatcgagtgctctatcggacagtccttctaatgtttgtatggccatcatttttttgtttgctacctgaagtagtcctagatgagatatttaggtgctcatcggcatgccaagcacatgtccttagtcaatatcaagtaaatgagcccgccattcttcctatccttaccctgtaagtgccttacattccaggattgcacatttagaccctcgctctgcactgactgttagtattatcttgtacctttgatgtataatatggtgagtttgctgttgtaatatcctgtgtgacatggaaagactacaaatgatgctcccccacgaatttagccaagtccaactccctgtactcagacgttgcactttagtatataattgaagagccaaagcattagcactaagactgtgcacagcccggaaaaggtgttgaggcaatctctgcaccaccgattggacatctcgttcggagcgcgcgttttataaatgtaccgctaagctggaaaacgtgtcgcagatcacccgaagctagagataaacaaattgattaggtgcgtcaaggattggccctatggcaatgtgatatatacccgcagagagaacacgcaaaggcccgtcatattcaacaccttcattcctatcaagccgcaacatatccaaggcaggaacattgccccaggagaacttcttggttccgaagatattcgccagtccaccgcccatgaatgccggtgtccgatgctcgaggatccatgcagattcccatgtttcttttcgcagaggcgacctgcaggagggcttatgttggctccagtgcgatttctgacattcccggctacagagtaaagatatcagcgaggacttgctctgatagtcaggaggtcacgtacagtaaccaggcgacagtctttgcaggcgtgtgtgtgtgtgtgccaattctcacatagttggtgttcccggacgtccagttcgcgcagataagctcggaacaaccatgttgcttcagcgaaaaggattctaagtccggtacgagtaggtggtgcattatagcgttttgtacggacattggtagatgtttgcttgaacaacccagcatgcatttttgcctaacatgcacttaactacagccttgcgggctttgtggttgaccagcccggcaataacaactaactattggagtggggagagaaattttgcatatcaaagtccatgtgcagctgttatcagttaggagtgaacagtgcagcctcccaacgtgggctttggctctgccttggatagcatcccgggtttcacgcgcccaatttcccttctactacaagaattcttccattcagggcccgtaaataatcttactgatgcgcctggaagctgtaatctttatccgagtggtcaactagcccggggtatctttcttacaacccaatctacctgtaacctgctgcatttgttatattgctggcgagtgcattgtttttgattactcagtcagcacgacacatgaccagagatgggcctcgggatgatgtaactataaagcagtcttgtgaattaggaagactaatgatatgggtggctttgaatatcaactgcgttgtataactaatagagtcggcgggggttgttggaggtaaatccaccacagactctataagaatctatactcccaggggcttcccgtggttttcacccttgctcggagacatgtcgtttcctttaacaactatagactgtcgccgtgaaatcagcactcggatatctcttacaggcctcttcacccccgtcccgggaaccatgccgggcagcttccagacctgcccataggcgggctcaatatcccacagagacacaattgacgcagcggccgaggtgagctctttttctgcaaatgtgcgtcccttgcacattgccgccccagcaccccacggtctcagccggccgtaccgcgcaactcgtttccccgacacttggtcagtctcgagaaatctctccgggcggaactcggcagggttatcgaaaattgaagcgttatgctgtgtgagtgagtgcgcggctgagacccaggttcccgtctttaaagtatgttggaggctgccatctgtgagggtgaccggtcgttcaacgtagcggattgatattggttcgttgaccaaccggtatgtctcgtataggcaagccttgaggagttgacaatttgctgataaacctgggaagtcgatcgaagttatttctggaaccttggcctgagaaga

SEQ ID NO: 5162 - DNA, 4518 bp, Emericella nidulans
ctcctgtttgctggctgcaccttgatctgtcttggagcaataatatccagtccatgacgggttctcgcaaactgccgcggcggaaggatcaggtgctcatattggtctttttgcacggggtggtgctgccagaatgaaactcgaaggccttccttccacagagagagcgttgtctcagtaaggctatctgagccccggccgccgtgagtgatgttgagtgcttggaaatggtgatgcgactgtccaactatgtcagaggtcggacgcagggccctaccagccatggtggtgattgtagagttggagcccgcttcaagccagatactatcgggataagctcgggcaagacgctcaatcgcgtggtagaaatacaccagcttacgcagatgatcggcgacgaacgtggacgacgggcgcgctccggtcgatggagtagaagacgaatgttcaatatgaatgacgggggagttgaacgtcaattcttcgcccagctggtttagaggctccacaatgtttccgacaaggctacagtggaatgcatttgtcacattcaaccgtttgtgccgaatgtacggatacttgctaagcagggtttcctttaccccctcaatggcagcagttgatcctcctagcgtgaaactgcgcgggccattatagcaggcaatggtggcagggtggtcggacggcgtctgctgggatgcttcttccaggagttgctggatggtactctcatccccttaggctgccatcatagcgcctctatcgcttccccattgatcgcggatcaggcgtgcccggccagctacgagcttgatggtgtcctgaacactgaggacaccggaaatactcaatgcagtgagttcgccgaaactgtgtcccacaaccgcagcgattctggtcgaaacgccacaatctaaccagcaccgcgcgcagctatactgcatcgcgaaaagcatgcattgcagcttgactgtgtcttgaaccggactggtggagaatatttccgggtaaatactctccaaccccatgtttgtcatggccatatcgcattcgtcaagataacggcgcaggagaccaacattctcgtacactaagcggttcaagccgacaaaggtagagacttgtccgccaaagcaaaggatcacagggcgctctgtagggacaaccttgctgctgccctcagctgaagctccacgtgatagcattgcctgcagctctgacatggagcgacagctgaagacaagttggcgtgcgagagtccgattgcattgccgactcaggttgaaggaaaggtcgtccagccgtacagtcggtcgtgttcgaatatactcggctaggcgcgcacaataggccgtgatctcgacttcatttgtacccgagatccagaatggctgggctaatccatccttggtcacaccttgatgcggaaatgtgtggcgctttggaagctggagaatcaccatggacgtgttggaacctgaagctccatagctgttgaccaacgctgctttctggtctgtctcccacgggcgtagcgaggtggagatgccaacttgtcagttgcagcagtgatgcgcgggctaagacgggtgtgactggcttgtggcggtatgaagccttcgttcatcatcatgagtactttgatcaatgagacgactccagctgcggcctcagtgtggccaatatgtcccttgactgatccaagaattagcggacttggccgagaagcaacgttgagggcgtcggcaatactggcgtactctgctgggtccccaacagcggttcccgtcccatgggcctcgacgagcgagatatccgctggagtcagacctgacttggaaataacctgtttgaatagaggtgccaatgaaggcttgttgggcacaaccacggcagtgcagttctggttctggtgtactgcacttgctccgatgcaacccagaatctggtcattattggcgactgcagcactcatcttcttcaacatcacacaaccgattccttctgatcgacagtatccgtctcccttctcgtcgaacggcttgcactggccggtaggactgaggaagctggcggcacctagattttggaaccagaaaggactgctcataaccgcaacaccaccagccagcgcggcagagcattctcctgacaggatactacgacacgcaagatgaatagcgactgcagaggaggagcaggcagtatctaaggtcaatgccgggcctgtccacccaagtggtgagaaactctgccggcaaggaaagcgcgcagattccctgtcgctgtataagcgtttgggtcgtagcatgagacatgctggtcgtagtcggttgtggcaatgccaacgaaaactccaacagagtcttcaggtaacttggtctcattgtggcctggctccaagaaatatccagactgttcgacagcttgatacgccgcctggagaaagagacggtgctgcgggtccatggcggcggcttcgcgaggactcattttgaaaaagctatgatcgaactggctgcggtcgcgaatcaagttggagtaccaagtccgggagcccttgtcggtacgccaaggggtgttgaaattgatatcatcttccatgatcgcttgatgttgcgacgtccccgtgcgcagcatctgagcgaattcgtccacatcgtcagcaccggctgtcttgatcgacattcccacgactgcaatcatattttcttggtcgaggctggcaaaggcatctgatgcttgatgttgactttcgatctttactgtccgttttgccaacgtgggcgggatacatctctctgagccgaagcacaccacacgcgcgggacttgaaacctctggataggcagccttgaatgtgtcataccagtcgcaatgttgaacaagcatactgcgcactgcaacttcgtgcaggctcgcattgtcgattttaggataggctagggacatggcgggcgtgggtgcaaactggagctcaggtgttcgattgcataaatcagccagggcgtcagtgtatgcttttctggactcagatgggtcgtggaaccggccctgcaaccgcacttgagcgacggtcagcccgatctctcgcagctcctgtgctaggtctgccgcggcgcggccggaactcgtgagcgtcgcgcgtgcacgatcataacgaacagagaggtaagtctctggatgccgttggccaagaatctcttgtaatctctgctgctgttcctcactcatccaagcgatcgaatatgatacagatcgtccgtttccctgcagctcttgccgtctctcctctgcatcgacaagggctccaaccaacatggctaaccgcagcgcaaccgcgccatacttcgcaagttcttgatcatttcttgaactcgcaatcgcaaatgtgcttaaaagccccgtgcagaaaccggtggctgtggttcggtcactggtgtgttggttcgtcgctaggtatcgctcgtattccgtaaggtgcgttaggacgactagtggagtgaggatcatgttggatatgctcagcccctcctcaatatcatcaatgctgtgatttaatagtcggtccaaatcctgcagtcgttcttgaggagggagcaactccctgagctctgggagtgcctcggacagggctgtccagaaccctggtaacccggcgatagtgtcctgaatccattgcccgtacctaccactgctgatgtcgccgcgaagctttattagggcccgtttgtcgaatgaaagactctgtggcccaaaggccagaagggtgtgactggaaccctgcattatgttgtgtggagggtagaattaaagagcggaaggatggcaatggcccagtcacagagggagaaaaggatatggattacgtccagctagggtcgacacctgaaatgaatactctttatacacacatgagctgcccgccgcttttctatactacacctgctacagcttcagtgtccacaaacccgattggaggcccggacttctgacagcaaaatcccgagcctgataagggtagagaaggaattatcggcttgtcggttgcattgtttgcggcaatgtctcagtaccggcaggccccttcagctgaggtcctcgtccgtccaggtatacgcggctgccgccgcaggttatgcagcgggaccgatattctagctgcaccttgaagacgtgtcttgaagccagtcccacctttgtggatcagccagcgctggcaaaagataagccagatactccgaccgatgagatctgacagtatcaatagcgctgaactggagccaagctctaacaacggtgggggcgcacgtttgggacaccgattgcgtccaattcggccaggatctggtctttcggcaattctgcggcctattgtactatccggagttattctttccgtagccagtgaccttcatgccgatccaaagccgaaaagcgtgcgggctatcgagatccagcctcaagcctcagccgtgccgatctctactgaagatactccgggtcgcccatgattgc

SEQ ID NO: 5163 - DNA, 6316 bp, Emericella nidulans
caagggaaaaaatggtaatcgcgagaaaatagcagccacggtaggggtaccgaagatacgggtcaagaagtgactgcggtattctacagatcgatttattagaaggtgtctgcccgctaagttgtcgcattggggggtgaatagctaccagcacgggcaacgacactgggtaccgccggagcgagtaagttagcataatagactgacagtacaagagtagtatagactatttggagtatgcagactgctgccggagtgatggttcgtactcacttccagaatatcggattaaatgcaatggacagcgcagcatctagaaaaaatggaggttgagtatcacgtactgaatcccagatagaagttacgtacatttaaaagaatcttgagagaagtcaacgtagtcggacaaggtcgtcatgtttgtgatttcgaggcggaagaaccgggagaattggaaacagtggagtgagaggaggtacgggcgggatagaacaaggccaggtggactggcagtggccgagggagtaaatatgatgggtgacgtcggcgggatgtgcacatcacgtggagaagagcagataccgctctgctctccgcctgtcgttctcgtcatcgtagactcaactgcccgtctttgctcggtcatagaccccagaatcgttccacgttccttatcggtcagtttgttggccatgtatcctcttgcagcttcgccttccttctcttgctggccatgagaataagggcggggctgtgcatatgatttggtgaggatgcctttgaaacatcgtgattacgctctagcaggcctcggcggattcatcgcttggggtttcgctatccactggcttccagttctccgatacttaggatatgctctggccctaggggccttccttgcgtcgagcgctatctttggtctagttcttctcacgactcgaaacttgccctcctccaagtttactcgccccaaaactctccctgtcgcattcgtctcacgtcgacactggaagaatgaggttcaaaggtacgggaagcgcgccgagtatcatgcggagtcgctctaccctgagtcattcattgtctctgaaagtctaaacgaaatcctctcgttcattacaagggactttattgcgtcctggcaccgcagtatcagctcaaaccccgctttccccaacgaggtggacaaggtgatacggacagcggttggcaacctacgcagtcgacttctggcggaggatattgtgtctctagttgtctctcgcatatttcctattttgaccactcacctcaaggagttcgacattgcggacgatctgtgcggggaaggaacttgacccgcaatgttaccgaatccgaggagttggatcttgctatcgcaaagaaatatcgtgatggccaactacatccagccgcagtgctgtcgctttcggaccagaaggcagtggagcaggagtacttacgcaaagtaactgttggtttgctgcctcaattattccctgcgaatgtccttaatagtcgcatcgtctctgtgctcattagggaaattctctcatgtgcagttcttttccctctcgtctcagtggcctcggatccggacacttggaatcagctgattgaagcctatgggcgaaccacacttcaggatcgcaaaacggtacgaaagcttcgggccgccctggatgaacatgcttctccagctcccaaggcaaagcgcggtcacccctttccgcgtctctcaccgaacgattctgaacgggcttttgagcggtttgttcgaactattcgacgctgcaataatctttcggacgcccggcgattcagagctcttatagccagccagttgaaacgagagtcaatggtggaagggcaggacccagtataccttagacgacttgaaaccggaaaaagagtgttggaccagaaggtggccaaactctcagctcccaatgatcagacgtcccatgttgcagccgcggcttcacactttcgccgcaagagctcatccgcgactcaggaagcctctttggttgacgtgatgcatgatgcttcgggtctctcgtattttatggagtttatggaccgccagcacctcatgtccctcgtccaattctggatcgtggtcgacgggttccgtaatccacttgaggatgactttggagatgagacatcccccagctcgaacacttggactaccgcggacaggaacgatatagctctgataagtgcaacatacctcgcaaaacctgaactgaaggtgacggaagaatctcgccaagtagtgaaagccttcctgagcgcaggaaagcgcgccacccccgaacagtaccgcaaagcccgtacggtgatattgtccacccagtctgcaatattggaggagctacaggaagtttattttcccaagttcaagcagtcagatctatactggaaatatcttgcgtccgatgacgtttcacatggtagcgcagccatgtcatcaccttcttctcagcaaagccttgtgggcagtcttgatgctcaggaaagacgcccgcttcccctgttgttaaaccgaacggcatctcaacctggacctaaagcgaaggtagatctgcgaagagcagctatctcgtcaaacgacgtctctggtttgggaaagctctttgacggcgaagagtcgacgaggcgatcaatggattccgagcgttcagcaccactatttgacgacgattatgacaccgatccgcttgctttgtctagccagagtcttggccaagatacgccgaatgggggtcctgagattagtgagagacgagtaattgagaatatggaggcagctttaaatgatatcattaccaatgtgcccaaaaatgggaggattgaggagctctctactagtgacattcaccagggatcaccacgaaactcaaatgaatcttctcgcgtggaaggacgtggagatgacaaactgaagcccagcatcgcctccttagggcttgtggacgggtcctcgcgccgcggagtatttgatgacgacctctttcccgagcagcaaaattatcttgaggatgaatatgaggagccagaaggtacagctggcaagtactctgcgctcgaggttcatgaagctgctccgggagatcttgggttgacggaagcaattcaggcgctcacagcagatattgagaagcttgggtcacaggaagcagtagtcgacactttgactcgaaaggcagaactcaccaacaatacggcagagctaagaattttgagaaagtccaaaatgagcattcaacgagagcttcaccgtaaagagatgcaacgtcagcaatatatgattcaggagagcgataatagtctttatggccggtcgaccgtccgaatcaagtccattgtagtgggtaaagaggaggacggccgagagtttgctatgtgtatgcttgactacctaatcgcaacctggtgaattcgtggctaacccctctagatgttattgaagtgcaaaggaacgctggggagcagatgcccgcagcgtcctgggtggttgcgcgccgatacagcgagttccacgagcttcaccaccaattacggacgcgttatccgtctgttcgtcagttagagtttcctcggaggcggatggtcatgaagctccaaaaggagtttctccagaagcgacgtttggctctcgaggcgtaccttcagcatttgctgcttctcccggaagtatgccggagtcgtgacttgcgcgcctttctctctcagcgcgcaatcatcccacgcgacgagacaccgcgggatggagaaacaaaggatctcgtgacccgtatctacaactctgttgccgatggcatggacgatttcctaggaaacttcggtgtgctggaccaactctcaatcgccggtcagaatctcatctccgcggccactaaccaacaacaacccaacactagtgcagtatcaacagactctggtctcacgactgaagatgctgtcacgaccgctgaagccgaagccgagttaaatgcctttgaagaccgcgaacttgaacccttcatcaagcccatctgcgatctcttcctggagacctttgagctcaacaagggaaacaactggcttcgcggccgcgcagtcgtcgtggtcctccatcagcttcttggcggtacaatcgaacgcaaagttcgtgaaggtgcccgctcgctatttcaggacgagcaccttctccgctacctcacgctagcgaaggacaccctctggcctggtggtgttcttcgtgagaacagagtacgcacagcttccgaacgccttaagagccgaacagaggcaagtctcgttcttgcaacccttgttcctgaactagcgggtaatgtagtcggacgcgcaaacgcccaagctgcagcaaggcgaatcttcgcaacactaaataaccagcgactaaacgcccatttaatcttcactctcctggacgaaatcgttctagtccttgttggtggtgaaaagtcactggctcgactcgactgtgagtatgctgctttttatgattaatgatgaaattatcctgcatggccatgatgacggaacagactctctttgtctgtacattagactacaagacgccaaggtgtttgtacgtccgtggtgcactacataatgtaataatgaatagcgatgacactaaaacactcttatgcttattacccttctatgatctccagtctagcttcgacggacttgatggactcgatacactttcgtccggcgggatgtctagcgtcaccaacaatgattaaatcgattcttgttgatcttttgccttgagaaagacatgtccattcgatgaagctcatgaaatctagcccaccttctaactagggtggccagccatgccccactactcatggtttgggtcataacaagttaaaagaaggtggattgagacggtaggttgcagttttctttattgaactcactgcgacttaagccagttataataactacttatcggggttcatggtcattacagcctatcttggtagcccacactcttgggcactatctactcttccgtggaatttatattggaaagattcttattctcttcattacaattggattaaaacgagtgtaagatgcctggcccttaggtcggctctgtctgcattgcgtcccagatatagcctgtggacgaccgaaaatcataatgactgtagccggagctgagattaaaaacgacaaatatcaggttacaacgagaaacacctgtactcttgacgcaaagcttctaaagtctgcaaccattggaaagctcaagaagaggcaggacaacagacgaagcattgtcagctcgtaagagtccacggaatgaccgtaaggagagacagtaccgcatgtgcgaatgttgacgattggtcacaagaccgccaatctacgcttcttccttggccttcttcttggacttcttgcctgacgactgagcaggagggccctgctttgtctggtgaacaatgagacgtgtccagcactcttccttgtcccactcgaagccagcgaggtagggcttgtccaattcgtcatcagcctgtgagcggtgcgtgttagatgcatcttctccgtagacaacacgggaagttcaaataccttcttcttgaactgcttgtagattgcgtccagcgcatccttgattgtcacgcccttgagattgcgggctgttacttccaaccctagagggaaatgaaggtcaatcttcttcaccggcgggttcactaggtgaagtttgaggatgtccttgtcctcgattgttgacggtgaagtgttcagcttcctgtaaagggtcaatgagatgaaaacgaaccatggtgaagacctaccatcccgtcttctgtgtttcgatgggcagagtaatctcaatgcgtttctcttctacatacgagtgtcagaaccatcgtatgattcttgattacattgtgttgacttaccaagctccttgatgttgtacacaccttcggcctgggacgaggtgcgtctgtgagctttcttgtctgccttctcagccttgtcggatgctttttcatccttgggggatatcgacaagccaccaatggcggaatcgaccttcttgagctcgttgtgctcagtgtgatcagtgtggtcgtcgacgagagacatgattgcaacggagctttgaggataagcagccgaaacgggatgtgatgtttttgatggagatctaaggcacaagggaagaggttagatctgtgttgaccacctgatgactgctcaggaacacaaaaagggtgacaactccagggcatgctcagtaaccatcattgaatatgtgatt

SEQ ID NO: 5164 - DNA, 4690 bp, Emericella nidulans
atatttaaatctatgttgcatcactgaggaattatgtagaactcttaatcatgatttgactccggtcgggcatagattaagttatttctagcgacgcgaaatactagctaagtattctatacagccatggcatgggtaggtatgttgcataaaaataccataccagccgtgctcgtacagtagatttatgtattgcggatgtggaactgcagatgcataggtctgcatatgaaaaataacgtcgggaaggcaaaccatgattaagtatgtatctatcgagtgctaaaaagacgacgtacgtaaacccagcgccttgcgaatgctcacataacaagacactcccgctcgagcttgcgccctcttcgttcccttgacttctcctttcccttatctttctgcttgtcagagaaccttgaccgtctagggcttttttccctggcatcagtcttatggccgtcaatggtgagtcccggggaatcattattattcatctcatcataatcatcgtcgatggcgaaggaatcactgcctaacttgtccctgctgaggcggcccgcaaaacgtgaaaatgtggcgctgatcctgttttcactgacctggcttcctgcgcggctccccggatttgaccttgtggctctagagccgcgcctagagaatgaaaatgtacccttgttttcatcgtcgtctcttggggccaactttgtcgaggccgaaggggccgagtgcaaccctaaacctgcaatggtgcctcgattgcccgtagattcctcagcagtcccaggcgcggcgttcgggtcttccccaactgtgatctaagacttgggcggccagacttgtaacccgctctgagacggttggcctgcaatctaggagagttgtttgctgtttcttgatcctgattatcgatagatcccacagaagatgtggaagttgcgctaattgggaaactggctgccgctgcgtcctcgtcgatcggcagaatctgataaaaaagtaggtatggtgattcagtcttcagggcgtgctcgatgtctacaagcgtcaccctctccttagccagatcatcaaaccgcatccagtaccttggagtatccgggttggactgttctgagccatgagaacttgagggaggcgccccaacactggtgccccggacaatcgctatgtaatgcccggaatcgacggagttgcctctatgacagactaaagcctgcaaggacaacttgaagtttacccggataggaccatcctccatgttatcatcctgtataaagtgtggtagcccaatctctgttgggatatcgacaaacgtgtcacgtctgatggctttgccgtttgcaagcatagagtaccgtttcaagcacaggcctaaaattggtctcttcgaggagaaatgagccgcgacttgagagtcattctttggagagttatctgtataccatgctatagactgcgttagcacgctgtcgacaaagtcggttgtaggaaacctcacgaatcaagctgaaaaactgccatgcaggcatcatgacctctttcctataggaaccgtggcggtgcttggtgttatcatcgccatccgagtcgggaacaaactttggttggatgatgctgctcctccgatatcgagatctgtccgccagaggagcctccgtcgtcgttatgactggaggccccgtaggcgacaatgttgttggagaggaagacgtcggtgtactgatctctattgcctcgacatgcgcactagtgcccttggaaagcgaatccgctgacttggttgacttgacggtatttcggcgctccaggtatcgtttcacttcgatcttgttattgaagtatgcctccaagcattcctccagagtcactgtcttgccgtcggtgggttcaggtatagctacctccaataacctctcattgacgaacctgtggtcatcattcacgtcttctttgcccgtatggtaaatgtccattttaagagtaaggagcggcaactctagtttctccgtgatgaacgtgaatgcctcggatgcatcttgctgatgaagatttgcagcgtcttcccatccgcattcggcaagtgcttcctgtagatgtttcgtctttaaacagaccaacaggttagtctatgtcctttgaaaggggtcaaacatgcaaagctgtcacatacaatatccgtcgttatgagctttcctgatcgtagcatgttgacccagagtctcaagagcactgacaattttccgcgaggctcatcgctaaaattcttgtatagtatgccttcaaagcagtccagccgagcaaacatggcaaaaagtagcgcatcaagataacatgtaacaccgttacgattctctgcgcccagcaatttcgtgcttggtgaatatcctttgactatcccttcaatcgagtcttcaaggagcaggaggagctcaaaagctgcatccacatcgccctgtgtgtattgcagcgcataagcgagatgttgttcgttcagtccagtaatgccaagatgtgaaactcgtcgctctaaagtcttaatctgcttcatataagcgaggctcaacgctgagaaccaagtacaacacgccgcgcgcgaagatgaacaagatagtacccaccttcttctgttgttctgtagagtcgctactcgtagtctctgatgtgaagaaaccgcgcaggacagggcgggcgacatcggacgactgtagataaacgcatgattagcatggacacggcgcatcactcccgtttaacggctatcgtacctcatctttctcgtgcttcgagtatcggttgttccgctcgcgtctagttaaaaatctgtgtatcccgctcatcttcaaggaggacttgtgggttcgatattgaatggggtgggggatatgaggtcaaggagggaacgagtcgacatgaggaaggttgtgtgctgtagaccttgaacaggccacctgattctagttgactatgtagcagagctctccttcaataataggagaatgtatcaggtgagggaatcttctggtaaattgccccagcgttggcaaagaacctccgtgcggtaggcaccagctgagctagccaagtgacatcacagaacaataagatgagggggcaaggagtttatggagaggaggcgaaagaagaaagaagggtctatggtcttatgatgatagacatagatcgatcgatctctgccccactaaaaagcaatctgctaaaagggatctcgcagctcaaagcctgttcagtgttgactgcactaatacggagtagtcctgctggcaaaccaaataaatggcggggaatcgggatgcgggccgattgtgcctggccctttaggcattagcaaaataacatatgccagatttgtcaggctagtaatttcacgtgacggctccgaaattatgctggccgccggaacattttcttacctcacgttgttgacgagttcgcggcgacaaccattactcgttaatatcaatggctgctagtgagccatcaagatacctggcaaaatcattgccgcgggctattgtccccgctgcccgccctcagggtttctgctggaggcgcaatacttctgaccaagcgtccgccaaaccgtccgctctcggtgaccttgagtcggacgggctgctgaagggcacacctccgccggtagaagctgcgaagccttttgaccccgttgcacgggcacgagcgcgaagagctcagctcccacgaagtcggtaagtttgtccctttagggacctgcaaatcgtccccgattcttgcggaagattctcatttcttcatctagctatcaattccgttcgccaaaatatgatcgcggtccgttgcatcctcacaggcctccgcccccatctgatccatcttctcgcctcttcgtgcctggccctttttctctcaaagagtagagcagacccacgagtcgaccatcgcctccgatatcatgactctttgctatgtccacaatccgccaggcttcaagcctcccccaaaggcgccccgtcttcgctcttgggatgatagctctccttaccacaaaaatcgatctctccgcggtccccgtggcggcgacgttctgcgactcctccgcaagccaataaccttcaacaacatccccaagctcgagcgaattacgatccacagttacgtgaagaatgccgcgaaggagaactccgggtggcttcacgtagcgggtatggcgctgcaagccatatcgaatgtcaaggtggagacatacaagtcaaagaccagcgttgccaaatggtacatctctcccggtagagataccgtggccgccaaggccgagctttacggagagaacatggagcacttcttcggaaagttggtcgacattgtgatgcctcgtctcaaagattggcccggtgtcaagggtaccagcggtgacagcagcggaaacattactttcggtctagagcctgagcaggtcgctttgtttcccgagattgaggtcaactacgatatgtatgactcttattctctgtcttattgctttagaaaacaattgaataactccagtactaactcgaatctttgcataggtacccacccaagatgattcctggttgccacattacacttcacacaactgcgaggactgataaggatgcccgattacttctaagtgccatgggagttccgttctatggcaagctcattgactagt

SEQ ID NO: 5165 - DNA, 9427 bp, Emericella nidulans
  unsure (1)..(9427): unsure at all n locations
ggcctggatattgtttaggcatatactcaatatgcacagtaattgacagctgatgccaatagtaatattataataattagcaatgttcaacagatactgggtactgatactggtcttactctcctacttcagcaccttgcgcaggtacttggtagactatttacaacctatgctgatatctggcctctatagatacagactgtggtgcattatcagcttgctggtattactaccctggctagtactgctaaatattacctggcactatattactgcaagctggcgcacaaatagcagcaccagccacaagtactacacaacaagcttgcccacttcgcaaggcaggtactggtagatgatcttaacattattgctcgcataaaaccccttgtagtatgctgtcacaaacacgacgaggctgtccttaataaagatgttgtgatgctagttattgtcagtattaatatactagatactcagcagctcaggcacacatactagcaccctgctagtaaggtacacagccactgccagcttctctttaaatcatgtaacctgctgaaagtacttctgcaccttgtttatactaacagtgccctaggtgataaagacttaagcaacagctagttcagtactaatctagtcaaccagccatgtcttccctgctataggctatggtgtacaagcatcctgcaggaagctccagcctgcagtgcctttagttggattattaaataggtgatcccataggatggctggctattactggcaatcaggctagcacagcaggcctgccatcagctctcacacagccacaactatgccatgcacaaaaccgcgaaactggcctatagtaaagtccatctgcttgtacagcagctgctcctggcccatctatgtcacatatcctggtaccatggtgttgtagtgcaccttcagcctatatatataccagttgagcagtactttgacagggctgtgctggccatagaccataaattactgtaccatccagtcaataccagcctgaaacaaccatgatcaaatacagccaatcatgcagccttaggatgcagatatagtctctgggcttgacagacttgacagggacgaggcctcggcgtaccctttgtcattgaacagccatgccagctcctggtctgctgccttgcccacccacaagccctgcttggcagctgctgcctatatctggataatatcctagtactgggggtcaagccacaatgccttctgcataacaagaaagcatgccaccttcagcatgtataagaggattagtagatagctatcagcattgtgccagccctgcttgctgtaactaaggacagccatcatatatactaacaggctcttatacttatatatcttggtcttctggttaagcagctcaatgcagaaatcaaggcaggctgtctccaacagggtcatcataaatgcctcaagttggttggtatccaagatcagatcagggctctggcatgatgctggcaacctacctaccttatcagatctacaggcaagctgctatagttgctgccaggtctactactattatatagtcataacatagcttagctttttttattattatggctacttagtctgcatgtaaataaggaacagcaggatctactgctatagctatatatactttacaatacttgtcttatccatatatgcctgcagtagacagtgtgggatctagttgggcactgtgctcacagctattatataaatactattcccacagtgctgtactatgtactgactatactgagccagctgcctcatagcatcctatacatgctgcattgcctggctgacaggatctccttattcatacagggtggcattgttctcattacagtcaggggcatgacaatgttgagaaggtcttggaagtacatattggcaaggtattatgcccatcaggtcatgcgcagccacgggtttatattatatagtatattgctcttggccatctggcaggccgcctgctgcttgttgtcagtcacacatgctttgatcttagcagtgatctgcttgtaatcagttgatgggggtcagggcttgttgggctcggggtcacataattagatgtgcacaaggtgcaagttcttgcgcgtggggaatacctgctgccaggcaacaatataatataactgctaaacctcttataaaccctgtactttaatatcagcagtaatatagccttggtataggtactgtatccagccatgggcctggtaccagtacttttgcatggtcttaagacagctgctaatatatagatataatagatcttgctagcactgcatactattagtatatacacggatcataggaactgggtgatcaagctaaaaagggatatagatagtagtagtatcaagatagatatcatgccaattttggaatagtctggaaaataggttagattatttaacctttagaggtgatatttcttgttataaataggttgttaaggaaaggaatttagatgggtcttcctatcgaancagtacggttcgtaccaaaaggaattgcctcaagtaccagttagaaaccagaaatgctcctcacatgttgtataagtgacgatcgcacccgcaagcaggggtccaacagtgggaccaaccagagtgcccgtgtagaaccaggctattccagttgctcgctcgaggggagggtacagatcacgaatcaccgcaggacctatcaccagaatcgctgtacccacaaatgcggtaagcattcgaaagaccataaatgcagcaatgttcgggctcagagcagtgccgatagaggcgcccaggaagatcaaagtactggcaaggcaggactgcaggagcagtgagcttctcgaactgcaagagggtgccggcacataccatccgccgtccaatcgtctggcaccaagggccccagaagcacgggctcaaggccatgaacaccagatacaacgcattgctcagcccgattatggatccagtagttttgtatgttgctgccacgttcggaatagcagagagcaccgaagtgctcgccatcggggacagcaatccggtccaagatataacaatcgtcatgaccatcttcctgcttcgcgagaacctaccaaactcatccacaggagcctcagcgccgcgctccttgtcggccccattgttcttctctggttgggctaagctcatcgggtgggtcgggtccagcttcagggctgggcgagcttgcgagaaagtggaagctgaacggtcacgcaattgcagaacgaattatgacaaaaatgatttacggaattcttaaatgctctctagtgactcacaagcgatcgggtagcaaagcgttcatgaaaatcttgaccaggccaacctcgggcaacacggaaaagaatccgcgctggaggtcccgttttcggtccgttcaaccgttcaactaaaccaatgatgttgaatacttgaataattctccaatcagctgtctcaatgctatcaaaaattgacaagtcacaggtcggcgagtattcgagatgatgcagactagaagactagaatctttgttctcgccgctcctccaccagaaccaggccctacgctgatccagagcacaaaacaccctcagaagacggtgtgaaggcagtgatcttacctgtgattgaatatttccgtcttagaatgcccatgatagacaattggatgcttttctctctcgtcccagctctccaacaatctcgtgcatttccttagatacaacagctggacatttcaaacaaagcaggtttcatgaggcgcacaaatctctgcaagaaacttgcagaggcatttcctcggattaattgaggcaattgttcgcttgccactatcttgggttactctcgttagctgacagttggtctgagaggggtggaataaatccggtttcctgctctgattgatttaaaagatgttcgaacagagctattgtgatgcgcagcacttgttcgatgacatgcggtagacgaatgttgggactgcgtctaagatgcttgggcatagacgtcaatgaatctttatcacggatctcgaggcagggcagccggattttgacaactgggcgaaaaccacctagttctcagacgccaagttcccaaacatatctcttgtatcgaaggctagctaacctcttataccgaacttgcggtatctatttcaatttttgctccgttatgtccaatggcttcatcattccgtaccacaccgccagatttggtaaatgacgagatggtgttcgtggttgtaactggcaacaaaaacaaggtggtgaatcatttgggcaaagcaagtgtgcatatcgaccacgtctgtatcgtctcgatctggcgttcatttcttgataggtggattcccgccaaagcctatcagcccttaaaatcactccatccgctgaacagacatcatttcttctcgaatttataactattaagccacacaagttagagtgcatgattgggaacgtgctccgtggctatacaaaggctagcggcatggctgaaagcttaaccaaggggttggtctcgttagtcgcatttgagagatagtatacttctctatcataaattgctttctggtaatcattggcgattgaataatgctatccagtctccggctgcgtcatgtggttaaatacggggggcctttcttggtatattaccgttagatgaaaccctagttgtctcgtacgtcttaataatgattcatgttgatgaaccgttcctgatgccagaagtgagtacgtaggttccacaggtcagacatcctacaaacccttcttgtttttggctttatctaggctacatctgggaggtacaaagatgatagcttgtatcagacgccactaacagatttacggggacggcgcgtatacaaaatcgctgttttatcaggtcatcaatacattcgatatcccaaattaccacacaatggcaggtaattcccacatcaagatatgaataacatgtaggtgactagatttctcaactgcgatgcggaccggcccgtgccgaaagtagcggtggctaaccagtccacgcatccggttcagtgaagctggactgaaaatagtcatgctagtcttcaggcgcgatactttgtcctcagtggctgtctactcataattctgctggttatactccccgctgcgccatcatagccggcgcttgaagccattttcagatagcgcccagtcacggtaggggtaacgttggagtacaggagacggattgctcaggaaatcgtgtctgggattccgatggttctcaatgtctctgagcctgagtttggatcagcggatgccattgtgattgccagatctgataagcacagcacaattgggcccttcatagtctcctgggagcagtcgttcatgctctctaaaatgagcatgccttaatataacatcactgttcgccagagaccgaatatatacttatagaaaatcacgataacactagaaactttattattggattccagaaccgagcaggcctattaccctagacgtggtggctttgggatctaccttataccaggcgtacaactagcctaaaaagaacatccaaaccgaatgacgatacggagtttcccatttatttaattcaagtctacagaccatgaaaccgtttgcgatatccaattcatgtttgttgtggcatgatgcgcatgctaccggattctttacgtggaacgcagtcatacctgctctctgtacttcaagcataagctataacaagttattgtctcagtgaaccctgggcagcctttctgccgcaaagagaagaagccgaacgctctgaaagaattatatacgcaaggatacctggttggatgacgctggcccctgttggaaatgaatactaccagcaagggcaatctctcctacgtgttatgcagcttctccttgccaccgttttctgtctttgtgtgtctgtctccaatgattgtgatctacagcgcactcggattaggcagcgagcagctcatcactgcttgacgattcgaccaacctgcagctatacatctacttcagcaaacagacatggctatctgattgaattaaccccggtttctatgtccattctctgcttcttctggattggtggcaataattacccttcacatagtacagtttgtgagaaccgtagatgcacctatatatagatatatatgtatatacaacacgattaccctcgacaactactcaaatgcaaggatgaccctctccgcagccgcgtccgacggccttcccatgatgacctccaccctcttcgtccgcaagtccataatgatattgaacaatgtcgctagatcgcttcctccaccggcagcacggtttatcgagcacgggtagttcgactcatccttgaacagcccgccgaacgatgcccagctgagcgttccttgaagcttctcaatattctcactcattgtttgaactcgcaccggcgaatcttccaaccacgccggctcgtcgataccagaatgaggaagaagcatgtggttcgagtggacaataaaccctttctgattcacggggatccgggcgaacgtagacgaggtgaactcgagtccgatcgcggtcgttgcatcgccgattagaatgtgcgcggagctagccattccaatcttctcaaggttctccacagcttgcagtgcggaggagctctcaagcgcgatgcggagtcccaaatgtactgggatccgggtcttatccaggccctttgcacggatcgcgttgaaacaaacacccacaccggtagaattcagaccaattttccctatgatcccggcctcagtgatcatcttgatggtcgggagatcttgctggataacggtgagctggattaggttaacggcttgttcggtatcccactaccactgtcagttctatgcagaccgtagaagccgtgggacgttgaacgtacatcccagttctggccctggaacgaatgctcgctattctggtaatagagacttgtgcacccatcactgaaccgcccgaagacgatttccgtccgcacgttgagcgcaatgatgtcaataaggtctgtcttcgcaccatccgcaatccctgttccagttagcgtctatctaccttgttggagactaagagcggttgtagaaacctttcagctcttcataataccgcggccaccgatgcttgatcaacccatcgaaatcccgagctagttcctgtacctgaggccagtcaagattgctatgcttcgcgaacatctttgcatagaatgctatcgcgcggcatatttcttcagacgcttgagagccatgtttatggccgatctgcgccctgtcagtagttatcgctgatcgccggttgttggcgaaagtacctcgtacggcgtgccggagcaaacgatttgcttgacggccatacttatcgaaggagcttgaaaccgactagaagtttgcgacggagaccatgcaaagcaaaattgattagtgaaaagatcacgaagattgcagagatgccccggctattcatctgcccctcattcggccgacatcaatgcggggtacggtctttaccccaatttggagattgggagattcatgctccccaaccaaacaatagcgagattcccttacagtactggactgaggctcaatgctgtccatctctccacagagtggactttgaggagctttcaaactaaaaccccggttgagccatccgcaaaacaggtcgaagaatctgatttgcgccaccctcacctctccctatttgttggtattgcaccctgggacaagaccatcagttagtgctcactgagtgactctttaatatgctagttgactctagacgggcttaccaacagctcagaaaaacaccgaccgattgcccaaaattacccgaagctattattgcgaatggtatgatagctcaagcttattccggatttgcagcgttgtttactcaagcccctctattcatgtccatatgcattggctagatagccatttcttctatgtcgaatttgattggtttcccccacacctgttttcttgccgaccctgggacttctgtcaacgcggacatagccgtcgcactcctccaatatcctgtacctggtgctgcaacgtatttgccaaatgagtgtacagtagatacttccgacagtaatgctcattgcgaaacatccgtaatgagatacagttgatgggcatttttagcaccctcagcctacgtaaatcgtcctttctccaaatccaactgccatgacagccttaaccatgctctaagcgcgacccatattcgggagattaactatctccgataaccccactggattagacctatatccgatttggccagatgttatagctaagcttcttaaaatatcacggctgagcttgaggatccatagattatgagcctattagggctgtatactggccctcctgatcaggatcaacacatcggtctcttttccttgacggctgattgggcacctataattgcctcacggtaatcttgtctatttgatattagtacaaggaaactagagctgcttatggttcctaaaatactacggctgactatcagttcaaaaaacgcactgtctgactattaaggactctagcctcaaatataaggccttgcccctcacaaggaaaaaataaagtgcgtttacaatcaatctagttccctataccgcattccgtggctatttttaacatgtctgtctccaaatgttgtatttccggcttcacctggtctggcacaccgacgggccgcaccggcaaggttgctaacaacgacgtctacatcgccggcgatggcacggacgtcgcaatcctcttcatcgccggcctcttcggctggacattccccaatgtccggctcctcgccgaccacttcgcacgtgaaatcggcgctaccatcttcgttcctgactacttcggcggcgaagtgctggacttcgacctcctcgcggccgaaaaatttgaccaggtcgacctcaaggggtttattgctcgcaatggccgcgagcagcgtgagggcgagatattcgagactgcacgcgcactcaagcgggacctgggcttcaagaaggtgggcgcagtaggatactgctatggcggatgggcgtcgttacgactcggtgcgaagtaacatgcggaacagggaaagcccttgatcgattgcatttcgatcgggcatccttcattgctgacgaagaaagatatcgatgaggtttctgtgcctgtacaggttctggcgccggaaatcgaccctatgtactcggccgaaaccaagagctatacgtttgagacactgcagcggctcaataaaccgtttgactaccggcatttccctggtgttgcccatgcctgcattcagtccccagcat

SEQ ID NO: 5166 - DNA, 8691 bp, Emericella nidulans
ggaagaggacgggaaggaaggatgctgaggacggggaggagacagcgaaggagcggatgtcggaccttttatcgttctcggatattgcgaatgctcggtcgatacacggtctactggtttcgttccaatcgaatgccttgcgtcttatcgctgcagagaagcgaccggctacggtgcagaagctcgtgccttcgttgcagctgacggacgagagcagtccagcgaatgtgataatggcatcaattgactcgggggcgctcaccaaggataaagccgcggttcagcttcaactgttatcgagtaccgttttgtctctatccgcatctggtgccagcactggcaaggagcggttaaggccaagtatagtactcagtctacagcttctagccttagagattcgatgcatgtcctggaagctctcagggcatgcctgcgaggataacaaggagatgtgggacccactggccagatatatcggagcttttgcgcaggcgactaaaagtatcgagaaagccgaattcgcagtgatctacaagaacattgtccggctacagtctgctttttcaaagacgcagaactgtgcaacgcgatctacggataatttatcagtggcccgaattgctactattctgggacaactcgctcaagacgccgggtgttttgatgaagccttacagctctttacggaatctctcaacccactctcgagtagccaatgcctggggatggctactgttcggtgcaagattgcggcactccatttccaagcctttaaatcatccgtgaaactaccgggcgatgtctcagatgccgtttctcaagcgacagccgccctcagtatatcgctaaagggcagttctcacgatctggatgaattgctggttcaggcggctaagctgaagaagctcgccatgggctggtttggagatctaatatctaagggccagggttcacaatgcgagaacgtcgtctttccgcgcatatgcgaattcctcagcagctttgtccgcttcttgcgtcggtatattgggcggcgacctgaaaatgacgaattgaacgaccgagagatattccagaaacgaatcgatgcggcgcaaaatattgtacttgcggcagtagactcaaccatagcgatcggcaagttatcagtcatgtcacaacgcccggcatgggaagagacagtttctactctgctcgattgccagcgcctcctcgcgacaattgagccttttgacgaggtcgacgtagctaccgccgattctattgaccaggccttagtgaagttgtcaaatctcttttggtcacggtatctgaaagaaaaagaggctggcaaaaatgctcgcgaacttctgccactgctcaagcaatctgcctacttgctctctggatgctccccttctcagcgggcgactggtttcgctccacttaagtatgagcggcttgcgcatacgtatattgagggcaacatggtctctgaggccgaggttgcctttcgtcaatccatcactgaccatattgctgccggggccctggacaaaattgcctcaagcacggacggatgctttcctcaccagatgaaccaagatccgaagagaagcggattcacgcttgggcgcgtgctttctgcttatttgaaggtgaaattacggaacaagaggtccgcggtgaatgagatctttgatgatgagacgctgccatctgtgcagcgcggccatgtcctggagtggcagcttggtatcctaactgagatacacggcacttcaaacaatgataacgtcttccgatcagttttcgcagaggttgcgactaggctttttaaagtgtatccagccgagcagcatcctgttcgacgactacgtgttctgctttctggattacggtttgctctggaacaaccgggattcttggattcgtccttgctgcagcgatttgcggatgagggaaggaaaggactggacgatgatgactaccaggatgacgacgatatcaagtcgttggctgtctacctgaagaactccgttcgtctcacactcggccttcaacagggtagcctaggaccagaagaactggagttgatcgtctcaacgtggacctcaatcttacggttctgtcatgatctgaagtcacttgtggcgtgcgtcggcaatgtggaatacttccttcttcaaatgaaagctgttgtcgactatacggaaatccatggtctatggaagttccagttatctactctcgaattggtcttgcgtgttactgagctgcacggagctggcacattctctgaagctataatagttctgtcccggctagttcttcagtattgccgaatgggattctgtatcaaggcgcattccctgttgagtcgggcggacggctatatcgcgaaccatgaagtgtcttgtctggcgcggttatcgtacgaacttgcccgcgttggattccttcttgagacgggcgacaaccagaaagcggcgactgttctttcgacagcgaggatgatatatgagaagcatcaggcaacagaggatttggatgcctgctcggtgttgacgaagatttcatgggagcgactagttgctgatgcagcgttcatgagctcgcgcctgtcatttgctcaaggctcaatcaaagatgctttgtacttcgctaagctgtcagtcaggttgaactgcagaatctgggccaaggtcgagaagcttgctcagaagaaacaagagaaggccgttgtcggggacagttcggaactcgagattgttgtcgagggaatggcgaagcttgaggtttcgcaaacatcttccacttattcccaaggtgccccgttctggccccatattggatcacatcacagctcgttactacatctcgcgaacttatctgcacaccatggcttattccaggatgccatatactatggggagcaagcgttgaagattaacaagtcactgaatgctaacgtgcgcttaattgcttcacaagcgcatcttggctctcactggatccttggcggacatatctctgagggtcagcaactccttgcctctgccaaggcactatccgataaactagggagcagcattgagcttgtttcattacgactgagcctggctgctcttcatagggtggagggagattaccgcaacgaatatcgcacccttcgggaggccgagaaactcctgggtgggttgtttgagagccaggcggattcagcagacattcctgacttagaggagaagatggacaaattacgagttcgaccgaagagtagatcaaccaggcaacccgcaacaactgcaaccagaagaacccgcagtgcaacgacatccgcccgaagcacacctaaaccgccacagagcgtcgaagccacgaatgcttcaaatacgctacttcagatgaagagcgagattcttctgcaacaggctgcgtctttacgtgcacaacgggagtttgaagcagcctcgaccttgctgagcgacgctagaaagtttgctgtgacgagaaatagcagaatatcggtgcatcttggagaaagtgagcacctgctcgcggatgccattcgaaactttgccaaccatgcggtatactgcgttcttccggagtcaaccatctcattgccgtctttggaacctaaggccgcatcggagagctccagcaaatccgcgacacgcaaaacgagggcacctacccggggaacgcgtaccaaggctcaagcggcaacagaagacttttctgtcatgccatctaaggccggtgaccgtctgaacggcatcttcgacactgctacccagctagggtctactctggatagccactctgcctcacgactcatgagccgcatctcaatgctgtctcatgtcactgcgtcgccgaaccacattttgtggccgcactctcctgcgaacatgaacgaggttggtcgcattggtgcgtttgcgagagaacgtgccgctatacgtatagacaagcggctcgctgattattgtgatccgctgttgtggccacgttccgaactggagtcagaaggcgtgagtcctgatttcaccaaagagtatgtcgacatacttcctgacaattggaatgttttgtctctgtccttgagcgcagatcgggccgagtttgttgtctcgcgtttgcaccgaggctgctctccattcctcctgcggcttccgcttagacgcggaaactcggaagatgaggaggagcaatttacattcgaggatggaagagatgagatgaaggaacttatccgcctggctaatgagagtgctcacgctgcaaagttgcaagttgaccgccagatgaagaaggaatggtggaaaaatcgcgaagcgcttgaccgcagaatggagaaccggctgcagaacatcgagaacgtttggtttggaggattcagagggatcttctcccccatcccgctttgtgaaaagtcgctcgcacggtttgcgagcgcttttgagaatattctagaaaatcatctcccctcaagacgaaaggggagtcgggcacaggggccaaagttaacgctgcatcctaatgttttagaattgtttgttggagtaaagggcttggatgaccaagaagatccggaggacacgttgatggaccttctctactttgttgttgatattctgcaatttcagggtgagcgcaatgcgtacgatgaggtcgactttgatatgatggtcgttgagacgctcgatgccgtccgggcatatcatgaggcggccaaagaccaggccacgcagcgaccgaacaatactgtgctcgttttggacaagtctttacatttgtttccgtgggaatctctaccgtgtctacaaggactgcctgtctgccgagttccatccctggagtgtctccgtgatcgagttttgcacttgcgctccgggaaacagagcgctctcagtatcgatcgacgcaacggcacgtacattctcaaccctacgggcgacctaaagacaactcaggagactttcgagaaagatctatccagtcttaaaggctggacaggcatggtcaatcggcagcctacagaagacgaattcaaagatagccttcagtccaagagtctcttcctttactttggccacggaagcggcgcacagtacatccgcggccgaaccgtcaaacggctcgaccgatgcgctgtggcatttctcatgggctgcagcagtggcactcttaccgaagccggcgaatacgagccctacggaacgccgatgaactacctgcaggcgggatctccggcgttggtggctacgctatgggacgttacggacaaggacattgaccggttcgcgaaggcgacctttgagcattgggggctgataggaaatggacaccgtgggaatgaggggattggagaggctggagtggctctggatgcggcggtttcgcagtcgcgaggggcatgcgtgttgaagtacttgaatggcgcggcgccggtggtttatggcgttccaggagttttcctacactagttttggaagtgcattattgattgggcatgcattaatagaggagttgtcgttatctatcattaatatcacgatataatatcttcatctgtataacacaaatatagagtagggacggattgcccaaatcggacaatggatgcggggagcggggagaggctgccatgccaagcctgcccctcattcccctcatcacttctcttcaacttccagggacttgaccaacttcactcctcccgcttctcgtgccatcaatcccatccgtcttttcagggcaagcacacaatgtctgtcacaaccaaagccacaattgcctcctttggcggcaagcttctcaagctcagccatgccgccaaatccacaaattgcgagatggccttcaacctgtacctcccaccacaggcatacaagacacccagccagaagctgccgttgctgatttacctgtccggtttgacctgcacgggagacaattgctctgagaagggctttttccagcacggcgcctccaagaagggcattgccgtgctgtacccagacacgagccctcgtacgtctctcccggcaaaagacaaggtgaaaattacttactgacgatcgagaaaggcggactcaatatccccggtgaaaacgacacctgggactttggcaccggcgcgggcttctacgtcaacgccaccaaagagccctacaacaaagggtacaacatgtacacctacattacagaggaactgcccgccactgtcttcgaggccttcccgcagatcgactcttcccgtgtcagtattacgggccacagcatgggcgggcacggggcgctgacgctcttcttgcgcaatccgggcaagtataagagtgtctctgcgtttgcgccgatctcaaacccgatcaattgcgcgtgggggcagaaggcgtttggtggatatctcggagaagagaataaggagaagtggaaggagcatgacgcaactgagttggtgaagggatgggcagggaagaatgtggatatcctgattgatgtggtgagttcctccagcattttgctttcgatataaggtgctttctggaggtgagctgatcgtaattgccagggaaccggcgacaacttctacaaacaaggccagctccttcccgagaacctggaaaaggctgccaaggaggctggcgtgacgggcatcaatgtccggtaccagccggactatgaccacagttattacaccatggcgacgttttcggatgatcatgtggagcatgcggccaagtatctctttgcctagtgggtttcccccctctgtggttctgggcaggatgattgaactctggtggcatgttcggttctgattttgccagcggtcggcaggcgaatctttgagctgttatatatagatggatggcaatggagaaccgtacaacctcaaatgacttgagcaagaccattatcctgtctaagcctcgcttgacactcctcgcactctgtctgatctacccacaatgcacccgaggacttcagtgaatgtatcaatctttagtgtcacctgtcctggtccttagcaaacttcaagctagtggttacacctggcctcttatcccagtcccacccccgctgtcgtatatgcaaacaacatcacttggccgaagccatccccagctccagaaccgcaacctctcaaccgtgattcttgtacccgcgtggctttcttttaccaagatcgggctggatcacgagtcccctgcaaggctcaattgattcccaattttgtcactgttcttcggcctccatccccaattgttaggcactctacctgattccctaagtgccttgcaccaggctaggaagttacctagatctaccactgtatcaggcattgaggcaaagacacaagacgtaaatttgagaggcaaagcacaacaaggtgagaattcatcttgcttgaccgatcatacacagaggacttttgtccgctgttgtagtcgatcatcctcccttttgctcataacttcgtagattaatgatggtctcatgtgcatcaagattgtcttgaacaccatcctgtctgggtattttagctcggggtgttttgaagtgcactggctggtgcataatctccgcccctgcttgtcatcccagtgtggctgcttcgtcgtcctaatggcactgcctcaacatgggattttctgcgtattgagcaaacccaatggttgactgtcacacggcccctggatttcataaggatctgatccgccccaatgtgactgctggcagccgtgcgttggtccactccgcagcccaaattgaagcagtttaatatacgaagatcatacctctgtaaagcacatttgaggtgatattgtgcggtgaggttgcaattctcaccatttcaacagacctcctgtgaacctcgctgacgaaaacatacaaatacaaacaaatttttataataatgtacaagacttcaaggtcgccaactgaaaaagccttccataatacagccaactgaactattacgggttggatattgcatctgttatgaacgagtttttggctatacagacccggcgagcgatgtcgctctgatgtagggttcaagctaatgggagatgttgtcctgtgccagactaaacaaactgctgcatacgagccaggtgtatgctcctcgttgcgatcatcttaaggctttggggttaagtttctctcgttgagcggcccaatgcggccagccatgggaagcgtccgacttttcaaaggcctgggaatccttggagacgaaaagaacgcgtttcagttcctgcagctcctgctcggattgatcacgagcatgcctacaacagtgaatctagccccagagaatgaaaacagaaatcgatacgaatcaatctcagcggtgccataccgcaggctcaggcggagaagctacaatcaagcttgaagtgaagagatataccagcaagagctgccagggatctgacctgagattgtagatagattcagcgcagggctcgtcgattccatgacatcactattgcagacgaggcaaggacactgaataatcatgcagcgagataccgtcaggtcaccactatccagcagcgtcaataaaccgtatcgaagtaagtggttgcgcggtaggggtgggccatctacatcgggaatcacaggattccgtgctcgtgagcaggttcacgaacaatgcttctactcgacttgatcatcgttccacac

SEQ ID NO: 5167 - DNA, 4016 bp, Emericella nidulans
agacccattcggttcagatggttccgaaggaggatttgaccaagatactgagtatgcagtgatgtgatttaaaacatgtatggttgcgctaatacgtctatagccaacctaaacgaacactggacgatcgcgagcttgactcggctgacgatgaggatcgctatgaccgggtcggtgatcgcatggactatgaggatggggtagaaggagactttcaggaaacagtgaatatcatggacttgagcttggcccgggctccagagcccaaatcctccaacggtgaggtccgtactcgcgcttcctggctttcgatattctgtactcaactcgtctttcgcaggtgtacacgatgccggttccgaactttctttcattagaaacagaggagttcaacccagagacatacgttgcgccgccatactctactgcagcgacatctctctgctggcgctatgacccgaatgatgagaatgttgtccaatccaacgcacgtataatacgctgggaggatggatctttaacgcttcaacttgcatcggcacccaaagaacaatataaaaaagacacgaaacctcttgttcctcttgacaagtcgggagactacgacacgaagttggattctcatgtatatttaggagcagcgtccgagacatcaggagtgttcagactgacttctcacctaactcatggactcactgtatatcccacgactatggaaacagatgacgcggttcagcgactgcaggaatccctagctgcagctgcccgcggcggcaagaagacggcggatggatcagcacccgtcatagaagtgaaggaagacccggagcttgccaagcggcaggcagagctcgcggaacgcgagaagttaaaagcggcacgtcgccgtgagcagcttgcagatagggagttggaccgtggccgcagatacggcatgtctcaccgcaccgggggtgccggacttacagtgggggggctggaagatgatgacggcctcctcgcgacaaggcctcgtgcaaagaagtcacgccgccctaaccgtagaggcgagattttcactgatgatgaggaagactatgaccgccgtggccggacacgggaagatgaatatgatgaagacgacggcttcctcgtcggcagcgacgaagagcctgagatcgtggatgatgacggtgaagaagacgttttggaagatgatgacctggacgcagaaggagaagatgatcttccccctccaaggcccagggaaaagcgagcttcccctgacgcaagacctgcggtagggtctcccccggctaggaaaaagaaccgctatgttgtggatgatgatgacgaggagtaatcaacagctcgctcgcctcctacgtatgttcctaataccttcataataccacttttttgacgatgattgccattgtaaccatctgggagtaataacggcggatttgtggttaatggttttgttgaacagctggaaacagcaataaaacattgaaagagaaactctgttgaaatcgtaagattgtatacaaaaaatacatgtctttctcggaaccagagcgctgggctttactggacgcaggtgtagtcttggtcatcaaggtagcatatattcgtaattaagcgctttctaaattattgacaaaaatgcacatatatcgcttggaaatttcaatcaagtgcccacaacaccaacgcctaaactaaattcatatataaggtcgtatcagggcgaaatgctactgtcgggactcaatgatggtacactctcagggtactcatccgattgaaagccaaatttcgctatcacatttctcgcactctttgccactctaatgcaaagcagatcttgctcgtcgcgattgaggcagttctgatcagacgggatgttcagacgttgatccggcggcaacgggtgagaatcaggagattcatgccatcggcgctggcgcgcttccatctcctcgaccaagtcgagcacacttggcgcctgttgagcgcaaggagtttgagcgtctatatccatcggcccgcgtataacgctgaagcgcaccaactgccggaggtagtcgttccaagctcctctcaggtccggagatctgttcattttcgcggcatacgccgggggagcgacctgattccccaactcgcaagcctctgctctagagacccgtagccacgagtcagcaatgacattgagaagagtgcctgtgaacatgacattctgtaaacccgtgtcgaatctatttggacatgactggcagcgaataacggactgagcggttttggcggatatatatagagagcagattgtgtgttgggatatagggaagggtttgagggatgaaagatggctaagacaaaggtaaagatatgagagacatgagcattcttgatcaggtgatgaatctgttgacggcattataggaggggtaagccctggcggcattatgaaaggtttaggcgctgctgcagagacgctggagaaatctggccagggagtggttgttgctgggatcgaactcatgctttcattaggcgctagctgccatgtatggcggtgatcttcatcagtcgatagtcggtagggaaagctatatggtgataggtgagttgatgaaagtatctgcggctcctctgacacatccgcgattgctgctccaaaatcaggcacatgggctatttgggaattggcccaagggtcattgtcggggatgttaagtagcgatatgtcgtcattgtcctcccgtaaccgtttctttggtggtcgccccatttgcttctgcactgagtaatggcagctgagggactgcttgatgcaacggctgcatcctgagatttcaccggagcatttgagttttcgcttccctttacaagtatgagagttagccgtattaagaaaggaaatacgccatggtaaggataaacccactgcactcatcgcacgccgcatgtcgctttacaggctgtgaagcggcggtaggagtatcttggagcattgagccgcttgtggaggtggggtgtgattgactcttgctgcagcccacagtgcgcagctcccggtggcctggagtgagttccacaaggaccatcttgacactgttcgcttgatcagtgatctccccacgtatgcattcgacctcaagaccttttggcattcatacaaaacccctgctgcggctgtgagcgccgcgtcggccacaccatccactaccgggctctcgaggctggcatctaccacacttcatgcagttgagaagttgcagcgagaggaggggaagattttggggacatttacagtagacctctccgatcccaagctggccaaggccatctgtggccatgtcgtcgatgagtcggccatctgcccagccagtatcttcatcgacatggcctacaccgcggcagtttttctagagcaggagaacggcgctggtgctgcactgaacacctacgagctgagcagtttagagatgcacagcccgctggtgctccgcgaggatatagaagtcctgccgcaggtctgggtcgaggcggtcctcgacatcaagtccaatgccgtgtctgtgcacttcaagggccaaacctcgaaaggagcagttgggtacggctcggcgacgatgcgtctaggccagcccgattcggccgttcgaagggactggtctcgcatccagtcgctggtaagggcgcgcgtgcagaccctcaaccgctccgtccggcctcgcgaagtccatgccatggacacggcgctcttctacaaggtcttctcagagatcgttgactactcggcgccatatcacgcagtccaagaagcagtgatagccgctgatttccacgacgctgctgtcactctccaactgacgcccaccgctgacctgggtaccttcaccagcagccccttcgccgtggatgctttggtccatgttgccggcttcctgctcaacgcagacgtccgccgaccgaagaatgaagtccacattgccaaccacattggctcgttgcggatcgtgggcgat

SEQ ID NO: 5168 - DNA, 503 bp, Emericella nidulans
ctcatttccactatcagtgggttcgccctgacaagggtactgcgctggcgagctggctttaacgaacagttgaggtcttagacgaacgacagttctatctagactatggtagacaatatagtagcaaggatcaaaaagagtaaaaccgggccctgtgtcaacgccagctcctgaacatacatatcggcagaatacatgcactgtattcatacacgcgacctgacaagcgcagcgccgtaaggcttctagctacggatcacgtgatgagtctaacgaggtagccagcggcaggactgacacttaattcccaagatcgtgtatgacgcatgtcacatgccagcggcggtcgaggcactcactcgggagcagagctcgagcgaaagcacagacagagtctcattgaggacatagtggaggcacagtgtcagcacatacaagtgggcctagagtgtatcagtacatgcaggccctgcatacacaagaacctcagggtcagcgacaga

SEQ ID NO: 5169 - DNA, 3838 bp, Emericella nidulans
tcttctgtgagcttcaaatcaacatagtcacctgacccaaatttcaacgaggaattgagagacaccaggttgaagtggttctcggcccttccactctcggcattgacacgggacaagaaatccttgataatcctgatcgcatgcgggatatcttctttatccgcactcccctccgcagtgtttttgccgacctgttctagcagtagaggataccgagccagacgtgtagttggtttagtcaggtaaccgttcagctccagtttccgggactctttcagccgttcagtctcttccacaaactttgcgaaagctggattcgaagacttctccttctcaaattcgtatctgccgtagagctgatttgcgccatatttaatgaacggatcgaaacgcggcacatgttgcaagaagatgtcaccgaccgtcttcacaatatgactttccttttgccttgcattgagagcctcagagagtgcgccattgactttgagaacatctaagcagttgccaaatacagtccgtatgaacttctcccgtctgtgctcgggaatgggggagttgctggcagaacgtagtggcctcatccagaaatcacgcagatattctaagtccttcacaaagtctcgctccgtgtacatgatctcgaagatgatctcctgtcgcttcttctctttatcatcgacactgtctgacacctctttggggaccatgttaatccataatttctggttgtcgccgccatcatcgtcgccgtgcaggctgctctttgaggctgaagttcggagtaccggaagcgggttcatattcagcctggcttgttgctcgagtcgtctggggcaggcgatagaatagcacaggctatcgcggttacaggttggagaataacattcggttagaagagtgaaaacaccattgacctcggaactaggcgcttcctcccccaatgttttccttaaattgatagagttcgccgggggcgtctcggaggcggtgatcataagtgacgtcgtggaagagtttctgcgcgtccaaagcgcgtccaagaaggagagcaaggtttcgatcagtcgtcttgatgatactgcagataacatccaccgcatctgcgcccgagaaagcgttttggtacgaaaggccgttcttctgtttctcgcccagcgggatttgctctcgaaatgcatcagcaacccgcgagagaagagctgggtttactgcaagcagtttgctgcggcgcgagttgttcgacacaagggtcgttgtcgtctgagcactaggtctgtgagttaggttgctttgcatgctcattgtacgatcaggtgcaacagttgatgccatggagaaggtcctagggttgggcattggaccgttactaggcgggcggacccttccattcatgtagtcggagtagtcgtcatgttgcgctattggcggttgaacaggccctgatggctggcgcctattggggatcactcgtccagaccctgttcttgtcgtatgcatcggctcgcgatccatagagtatgaagtcagggacatggcgcgctcatttccgtgtcgttcgggcaccacacgtccttgcggtgtcattggagttgctggattatacggctgattgcgagaagcgatcgctgatgtatggttgaagctgttcggctggggcggttggattggtggccctcccagtcttgccatcgatcttgacctgtaggggtccgaattcagggcaggatgaggaatcgctcgattgtaccccttggcatcttgatagggaggacccggaactggtctggaatctagacgctgcggttgaggataagcatagcgcccagggtaaggtcgaggaggcccctgaggagattgcgaagtcatagtagctgaaccggggtatgcctggtaatatccgtttgactggctcggggggtatccgttctgcatcgggcgctgtggcgggagaggacctctctgcatttgtgggcgcggaacctgcgatgacatcgtgtgagcccgctcttgggagaactggggcgtttgggatgtcatggtctgcgagcgcccaggctgccgtgctccgccaaaaatttctgaaaaggcagcatcacgctggacagaggacggatgaccatgaggccggtagttccggccttgctggcccccaatatcggccattgtgaaatatcacctcgccgcgcttttgagcttatccctcttgattcgatcgccgtagagaacacaaaagacggcaaaaaggagacgagttggatccgaaatcgcaaacagaatcgaggacggggggtatcgagtctggtcgtaaatagcgcacagctatgtttcgggttgtcgttcgattcgtggggacggcggtatgggggaagaggggggtcaacagacagtgctccacagcaattaagtgatagtcgatcaaaaggcaaccaagggtaaatggtaatagaaataagaaagacaagaacgaagatctgggaaggaaaatgtgagatacgaatagtccttcagtgataattcatgcctcgatatgtaaatggcgacaccgcgtggtaaagtctaacgtgaatcaagtagcagccttgagcgcaatggcagaccagtgcctatgccgttcataacctcagcatccttccctcagcatggattggccggtcgagagatcaagtctggacaacgagcaccagacaaagacgtcaagcaaaggaaacgaggtggccgtcgagggaatcaccggtagtcgtggatgggaatgccgtgcgtgaagatcagaggatcctagctttccagccgagtcagaagctgcccagatatagtccaagattcttctctatatctgtttcgagattcgctatcgacatggaagccgtggatactacaaagcgcctgtccagcttgcgccagttgatgcgagagcataaagttgatgtatatagtatggcattgaatagcctttacacacgtttcaactcttatctaactttgactgcagttgtaccctcggaagatagtcaccagtcagaatacattgcaccctgcgacggccgccgaggtagctcattcccccttcgagcgcacaccacgcctcctatcgataccggacatacatagcttacccatatacagagttcatttcgggattttctggttctgctggaaccgctattatctcactaaatgaagctgcgctttccaccgatggcagatattttaatcaagcggcgaagcagcttgacaacaactggacactgttgaagcgcggagttgagggtgtcccgacttcacaagaatggtatgcacttggcgatctttacatttcgcgttgctggaaacttatccgcctccaggataacgcagcaggccgagggtggtaaagtagtgggtgttgatcccgctttgattacagggggtgagtacgcagtcctgaaattgtctattcaccctactgattactcctagcggccgcccgcagtctatctgatgcccttcagaagagcggtgcttcattaattggtgtctctcagaacctcgtcgatttggtctggggcaacgatcggcccgctccgccccgggaaaaagtcagggttcatccagaaaagtatgcagggaagagctttcaagaaaaggttagcgacctacggaaggaattagagaacaaaaaggcggctggtttcgtcatctgtgtgttacttcgttccctaaagtgtgcccgtgctaacgacaattgcagccatgcttgacgaaatcgcttggcttctgaaccttagaggaagcgagtgagtttatgtgcctctgctattgaacaatcagtctgatcgttagacacatggttcatcaa

SEQ ID NO: 5170 - DNA, 2887 bp, Emericella nidulans
ctgcgacgctttctactgaagatggtaatattctgcctaagggaacggtttatataccttgcctggccatcgccaaggagtgtgcaagtctgagtgctgtgaaaatgacgcatccggcccccaaagtgatattcgacttctcattgcaagctgttcaggcattcagcatggcttctcaatgaaccgtgcttgatattcggtccgtcagcactaggtatgcgagccttcgtcactgcgttgcattatactcagataataatccccgagcaggctagtcgcagacactgagacaggccactagtcggcccgatagcgggtggatcagctggatcaacgggctgtgtctacgggggcaggattagcgtggccagaagagctccaatctaaagatttggccagctcagactccgagaaagaaagggaagataccgactacggaccagcgcggagtacctggtagacagtgaactcttgttggacgccctctagccgagttactgcggcatgttcattaggtgtttcagactagcatgtacaagcgggctgaaagcaagcttctgcctggatgtcaacagggaactccaacagttgagtgggattacaacgaactggagtgtaccaacacaccaataaaagcattctcagcgcctatgctggttcccagttcctccaaccaagcggtctgggctcgtcggggatcgtcacacagccatgtcagcctcattcctcgcccccatatgagtgccactaatgcgcaggccgatcacggcgcgagcttgtcggggaatcgatcggcagtgaccaaccggttcttggccccttgtaggtgacgtagtcggacagcctttcatctcttctccgcacatgaacagcttcctcttcctaactctgttttccctcacacagcacagttccacgacagacattgcaatctagaattacaccacaatgagcctcattccaatcatctgcacccacgaggtgtcgcccattgtacgcagccatcttttgttttcttcaaaccccagcccgtattagctaacagttacagcttctctcaaccatcctttcaatagcgtacaaggcctcgtccaagatcaattcgcctccaaccctcctccttctcacgacagcggacggcgacgatcttcgaaaatacaaaaaagaatctgtcaccaagccgccgattgatacttttcaatccccatttcttggttgggatgtaaacaaggtcgcgcagtttatacaggaaaatgcgtcgaaaactgtggtagatcgaactgtatttcttgtcgcagacgatcaaacaactgcagacgaaggcacccttcttcttgttcacaacgttgaagactcactggagacaatccgggtttccgccgagtttgtcaacagccaggcggtctcagtcgctgttgcaactacggatattggggagctacggagcctggctgatggtgacggggtgtacagagggggtaggcaagggccgtcgccgaagaagggtggccaggcgccaaggaaacagttgtagataggaactataatgctttgccagctgcaaccgttaactcgtactctgtctgtttgtatatagagaatgtaatgtagcctaggattattatcagatataacatccctcggtggggaacttgtagccctgagtgtatgtatctaacagaggcccctgattgcgaatagccggcacaagtacacaatagcatgatcaaaccctacaaatataccgaatgtatgactgcatgagcgactggtgcatttgtgaataaataatactgcaaatcgctcgaatttgtattgcaacaatagcaatatatgttcagtttcgtaaccgcgagttatcataccgaaacatacatgctgccatgtctcgaatacacctttacccttgctctaatcctaccggtgaaatcggcggtcttattgacgaagtctcaacgtcattatccgtgctcattgccggcgaacacagcgtgtcacacacgcgagtccgtatcttcccatccctatcttcccgcctatcaatggatcagcaccaagacggagaagctttcgagcttccatcaaggataaatgtcgaacatattgagggaggggtgtgggaaaaaaagataaacttaccttcgatgctgctggtttagatatatagtactgtactatgtattgtatcctcatccgaaaatgagggcagcgaaaggcattcactcgatacggctgaaggctcgctggtaactaggagcaatgccatcattcgcgagctgtagggttaaaaaacaggactctctttgctacacgtgatttatagcgggacatacaatggtgagagtgagaggaagggtttagagatcatttgcgctgattaacagactgtgttgggcaaggtacgagttccagctcctatattcaattatataccactaatctgcagcaggtagctcagaatagttttctggcccggcaatgggaaagaatgatgggtttttacaggtaaacggtactccccaattaaccattctccgaggcaatagacggcaggcgctattaggtaagaaaacataagaaactacatatccaccccatgcagtaccaaaaaagtcacaatatctacaaccaaccaacccattatcttcacccttataatcaaaccctactcaaccagcttctctaacacaagaaaaagttaacgcttaataactgttttttagtactgcagggggcagacatgtaacttattatattctaagcattctcttaagcatgctactctgagtttatcagataaggagaatactctttaattcatccggttctgccctccttattagaataataaatcaatgcaggttaactcatcccggtacataattat

SEQ ID NO: 5171 - DNA, 1752 bp, Emericella nidulans
tcaaccgtcggcagctcgtctgcggctacccacgtatttgccatatttgactagccggtggtgttagatggtttagatggagcgcaggggaggtggatgacggtgatgacgaaatgcggggactacagatggttgggaaagatatagataaatgcccgaatctaggttgaaatgactaatactggccattggtcgcctaacggggaatattatgcggatttgcaagtagaatatggggtaaacttttcatatcgtttgctttctcgtcctcttcctcttcctgctaagatgcattcagcgaatgaatgtccagaaatatacaaatcagtattagaataagcccttagtgactcaaaatcacctgacaacgatacgtattatatagatcatgtcgttggttaagatggtgtcgaccgtatgtgacagctagccatatatgggaccttcctatttggatatcggaactgcaagctccggctcgccgatgcttatgcagagacttcagttatttccaggttcaaaagttatgtctcttccaactgccgtattaggctaggttgcttattatttcttatgtatttaaaccgacctatagagctagattggaagaagcagaccttcatttctttatattatttgacggctgatgctggtaattacgtctaatccgacgctctatatatagccccttaatattggagtatcaactactccatctccaagcaattactccaactccaagcgctaagccatattcataacagtaatataggtagatatactagccccctcgaagacctggccagggcagcgccgggtgcttcttctgctcatttccaacatatattgtccatagttgctgcctcaaacctgtatctagctagttcctaggcagttctgtttaggtagcacgtccagatgccccctgggaggccgcagatcacgtgggccccgtgatccgccgagtgacgttaaataataaaaccaaaccaaaccaaaccaaaccaaaccatagaccaatggatcagaggtttcggacccttcaacaagcttcagctacaattcataggcagaagtcaagccccagctcagccttgcccaataatagtcaaagctttgttacacgtcagcctgtccaatatgttacttacccctgattgatcgtagatataccatcaacttcccatcctgcaccaaaccaaagattcttaaaaatttgtttccacgccagtcactgtacttcgctgagcatattcaagacactcgtggtagactcgtgttcctcaatgtctcaaagtgtgcgggacaatcaatgggcggaatacaagaacgaaatcacctccctatatcggaagtatgctctgcatgatgttatgcaacaattgagtgagaaacatgggttccacggaaggtacatgaccacacgtgtgctatatatccaagtccaagtaactgatacctttcagcaaaaacgattacgttaagaggctgagattgtggggagttaagaagaatgtcaagaagaaccacgcggcaggtacctggaactacattgaccagcaactcaagaaacgttccttggcagggaaaaaaagcaatgtttctgtcaatggaaagcattactcgaatagaagagcccaaaaagagattttgcggaatgtgacacagagagatatcttcaagcgggcatgtgagtctcttcctcgatcctagtattctatagtgtcacctaaatcgtatgtgtagtataca

SEQ ID NO: 5172 - DNA, 6158 bp, Emericella nidulans
tggcccatcgcgcatgatctcccaataccggcccatgagcatcgggtcaaaccgtgtcggtttggtgtgactccgaggccaatggtagcccagtgacgaagagcaccacagatttcgtagtaggaaccgtaagggtgtgtaaaacttttgagatactagagaggctgaaataaaaaggatgaggatctcgaaaagaagggtctgttcggggaatgatgtgtgtagggtctccggatggggctggggtgccttcgtcagagctagtcggtaactggctcgtctcgtcttccgaggacaattccaagctcagatcttcttcgagcgcagtggtcaacatcccttccactctgtctaatgtttgatatacgtctctgtcgacttgcgggaggagatcgagaatcttctggatgaagtgtgggttgtgcagaggtccagcccacattgggccagataaatgagttttcatcccgcaatgctcacacttttggtttgcggttggagcctgtgcaagtccataatggtagaacgggtttcctttcttatcgagcttctgcttggtttgagtcaaaggctgggtagtccatgctccacaacccgagtcgcaattgtacacaagcattgtgttgcccgacataaacttcgcctgtgcgggggaccgatggatacggacaaatagtcgagcataaaaatcgatcgatagagagagaagaggctcaattgcgaggccgtattttccggcagctatcgcaacgctgttcaagattagccgcagaccaccctcgtgagagtgcattcctttcatcgggacgccgccgtatagagcaaacgacttttctggatacccatttgatgcccacacgcctgcgtcagtgcaagtaatgcaaagaagaccctcatccttgatcccttgcacagcagcatctataaatggggcagcgctaccgtagggatccagatcaatgacgtcgaatttgccaaagtcgtctttcttttgagatttagtagccggtttgattcggctgtacatataaatgcgcgcatcgccagtgttaggttgaatgagattaccaagaccgttgtacgcaatattgagtttcatcgattgaatcgcagagcttgacagatcgttcgcaacaacacgggtgacaaaggggatctcggacgcatagcgtagagcacgtagaccagatgcggataaagcatcaagaatcgtaaacgggggaggagaatccgcttggggatgagcatccggcgttttgtgacccggctctgttgtatctttgacctcgctatccggcctgctgacctgctctttaccgtctccatttccttcttcttcccgcttcctcttcctgttcctcccaaccgcactctcctgagccctacgtttccgcttctcatgcgcctgcttattcgtcgcgattacatgctctccataaatgcgaatggcaagaaccgtcaagtcacggttgaactgctgaattggattatagaagacagtctggtcctcgtcttcaggcttaagatccctccttgtcgcttgcgtggctgcagtttcggcaggtggctttaatatgtatgctcgtccttcctttattacccggtactctttgccgccgtattgcactaattgaccggcagaatcggtgttttctgaagcctctggtttcgaagccatggtgtatgaatagcggaaggcgcgctggtcaaaattgacttggtagcgaaggttgttggcgttcacggactgcgcagctactcgaaaatacctcgatttaagagcaaaagaagtggttaaggtacggtatagctgccagatttgcttcatgaagctgaaggcgcagctctattggaccggtgaaaaagtcaagagcttgcgctgcccattgaactcgcagtgattgttgtatgagtcttcgcaaacccgatgctctcgcaaatagaaaaaaaaacccggagatcggcgcacggacctgccaagacatctcactccaaagggcggtagtgtatatagctacagaccacagtaggaagtaacaatgcaacgacaagcccttgcatgaacaagaactatataacagccttcacactggaacttcagaaaaatgcactaggatgcgcaacgagattcagcattagcattacgatttttaagtttgttattagaacctcaggttcgcctacagccagtttccaatgataggcacctggctatatatctcattccagcgtttcgcctcccatcccaaaccctctccaccgtttccaacaatccacagtgcgccagcaagccagatgcaggctcccagtgtagcgatcttgttaaaattccaccacattttctttcgtctcctgatatgctgatcgctttccgtgtgtccaagatcaccttctaatacgccctttctgctacctcgagttttccgagcagtggtgatcctccagcccatcaacgacgccaaacccccgagaatatggtaaaccccgacaaagacaaaaatatggtagtatgtgacccaaaaaacacggctccgtgctattccgtgggcgacaaagcccaaactgatgcttgagcttcctccatcaaccatcaccggcacgacacgattgacaaggacatgagtagcaagcagcggggcaaacacataccctaagcgtgcttgtaagctcattcggggccagaaactgagcgcatatctttggtctcgtgtctcggcgccatagagacgcgcacgacgtgaagagcgaatattgcggagagcaatcccggatgcaatatgtgttaggataggaatagtcaagatgaaattttcaagcgagggagattgatagatcggccttgtgagaagaaggtagttatcgctttcgggaacagaccgagtcgctatgggaatgagcgaggtgtttgtgaaatgtagcgcagcgaagaagataggagggtatgtcgagtacctctggagtgcagacactgtaacattctatcagtcagtcaagcgacgctcttgagcatcaattttgacgggttgatcctacaccatgaatcccagttctgaccgcgcagacctaatgaccatccgagattctgacgccccgacggaggttcatatttgcttgtgtagtcttcagaagatatatccgggaaagtctcatccaccggggatgggtccaattcctgcatagacactatagattttgtatcgatgtcatcttgcgtcggtagattcgttgccctgggggaggccatttgagcggctaaaaaatggaagatatgctacttagacagtatgttaggatgaaatcattgcaatttttgataatgacaagacgacggttatatctgtatcagggaagtattgggatatgggtctatggttggaggacgagactcgccaaatccaggtttggagctgtggagatctggttctcgattccttctactgtcgctgagttcgcccgccccaacctttcaggaccccgttgatcatcatcacatcccattcaacattattggtcctccaggcaccatccttcctcaagataataggcgggatgcttttgcatcgcaacatacacaaaccgctcctactgcaggctctatgtgaacacttatagctgctgatatcccggggtcacagttccttctccaggcggtaatcgaagcgggcagaaccaatatccaccacggcgtcatattaattctctacaacatagctcggacatcgcctggtcgagagatgcagaagtcattactgctctaactccatgcaccgtcctgactcgtcatccaacagccctacgacataaattgcatgttaacggctagaaaatggggccggtaagtgttttcccttgaattcgtccaaaaccagctttttgacttctgactgcacagcgaggctttacaaatcctgctcctaaggtacggcaaactaatgattggggatcttgcgttcgttgactgatccacaattccatatcagaccgaatcggcacggtcagctttaagctctttcacttgtacgctatgcaacaagtcttattcccgtcacccagagtatgaagcgcacattggatcttatgaccaccaacaccgcaaacgtcttcaagatctcaaacagctatcgcgagacccaaatgcagcagaaaaggctagacgggcggagaaaaaggccgacgcagaagctgggttgagagtactcgacactgcgaagaccggctccgcctcgggcacaggaagcagtggaggtttcaagaagggaggcttcaaaagttcattcaccactgttaaaggtccagctgcccccgccgctccgacgaggaagaatgtgctagaagatgacgatgaaggaaccaacggaccagctgccgcaaggggcgatgatcacgctcgttccatgggccctaagatcatacaagaacaaggtgaaagtgacacagatgaggagtacgtgactgatactgcaggcggaggatactatgatccgcggaaaccaacagattgcttccccggctgtgtcggcctagctcagagctaagtcttcctagggctttctagacgcttgtgtggtttataattagaccttggctcagtgagaatatatgaaatatatagccgtcgaaggttcgattccttttcttcctaataactagaagtctataaagattcaataccataaaaatttatctgctttattctagcattaaataattaaaggtttggtgtcgttatacgatatgttaaatactgttatcttgctggatctcaagaatccgaattgaattcggcgtcaactaagatgcattttttccgctggtctgtctgcgcttggcgtcaaaatgagagctcatattcacggtaaaaataagcaatatctggtgtaacatgctcgggattttggtctaaatgatgctcaaagtaatagtacaaaaatcatgaacctgttcaagctggaaagtaactgcaacaacgacaaaaataggcgtaaatatttagttacgccgtgaaagtctcacccgctccactcaactgctcagaaccagaaaatttacaatcggagaagcttggcagcctggccaacaatggtgtcctcttggggaaagctcatagtctccaatcccacagcgtaaggagtgggtacctcagcaccagtaacacgaacggcaggagctgtcaggtagtcgaacccgtattccatggacagagcgagaatttcggaggaaacaccgaacatagggaaaccagactcgacgcacatcaggcggccggtcttcttcagagactgaatgatcgtctcaacgtcaagaggcttgacggaacggaggttaataacctcagcttcgacaccatatttctgtttcagttcagcagcagcgttgagggactgtccaacgcagcgagagagagagacgattgtcaggtccttgccgggacgctcgatcttggccttgccaatagggaggacgaatcgtccttctgtgcagcctcagacatggggaaggcctggccgtatagaagtctggacacgattagttgtgatacgcttcgatggagtgattttgaggtgattcacatactcgttctcaaggacagcgacggggtttgggtcacgaatagctgccttcatgagacccttagcgtcctcagcgctccagggagccacgaccttcaaaccaggaatactgccgtaccaagcggagtaatcctgagagtgctgtgcagcaacaccagcagcaaaaccgttgggaccacggaaggtgatgttgcaaggctgaatgccgccggacatgtagtgcgtcttggctgcagagttgatatttgatcgatagcctgcattgcgaagttgaaagtcatgaattcacactggttaagacgcccttgttagcaatgtcctgcgggcttcttctgagcctgcgcctgcatcgaaggatgacttacaattgggtgtaatccagcgagagcagctccgaccgccagaccgcaaaagccagcttccgtgataggtgtatcgataacgcgcttggggccgaagcggtccagaagacctcgagtgactttgtatctgttcattgagaagaaaaaatatcagaatgcgctgacagatacaaaggtcaaaagctgcgaagctgaagacatacgctccgttgtactgtgcaacctc

SEQ ID NO: 5173 - DNA, 7911 bp, Emericella nidulans
tttagatgagtacagatatgatgctgttgagcagttgttgaaccgtcaagacacgcacttatagccatggaccccgctctgccaacctgtcatgcaatgctcggcatgcgattaaccgactcgctggccgaaccctgactataatgtgtccattatatgaacattgggatatctaaaggcgattcatatccgttttagaccatacagcacacaataccccccgcaatgactgtgcactatgttcacgaaggcccagagcctcaagagtcacggtatagcatcccgcaacatacaacatggatggaccctaacaaccgtcgcctgcgggtgattaccattggagctggcttttctggaattttgatggcgtatcaaatccagaagcaatgcgcaaatatcgaacatgtggtgtacgagaagaatcatgatattggaggtatgcctcctcccactcccatatgtggatgagtctaattacgcgcaggcacttggctcacaaatcgttaccctaatgcaggctgtgatgttcccagtcatgcgtatacgtaacggtcagcacctgtatgtattcctgtctgttgatatacatagagtccatctgacttggcttgcaagtaccccgattggcctcgttacttctcctacgcgtcggatatctgggagtatctagacaaagtttgtgcagccttcaaattacgacagtacatgcagttccgaacagaggtcatcaaagcctgctggaacgaagaggaagggcagtggaaggtacgtctccggcgacagcggccaggacaggaaccggaagagttcgacgaccattgccatatactgctgaatgcatgtggggtcttgagtaatccaaaggtgcgcgactaggctgggttctttggtccatatctgattgctgcagtggccagatacgcctggactccacgatcgcttcaagggccgcgttattcacacggcagcttggcctgacgactatggcgaggtgcagtggaacagcgatcgcgtcgccgtaattggctctggtgcttcttccatccaggccgtggctgggatacaacctcatgtcggtcatctcgatatctttgtgcggacgggtgtgtggtttggagtccttgcaggaaacaccggcgcgccaaccaaaatctacagcgaggccgagcgcgcgcaattcaggtccaatccttcagcactagtcgagcatacaaagagtatcgaggcagaagtaaacggcatgtggggggccttctaccgggattctatggcgcagaagggcgcatcggccttctttcgacagcgtatggcgagcattatcaaagatgatagactggccaagggcttcacgccgacttttggtttcggatgccgtcgcatcacaccaggagacccgtatatgcacgccattcagcaggcgaacgtcgatgtacatttcactgccgtagccagctgcactgaagatggcatcgttggcgctgatgggattgagcgattggtcgacaccatcgtctgtgcgtcaggattcgacaatacatatcgtccgcaatttcccatcatcggccgacggggcgtcgatctgcgagataaatggaagacaaatcccgaagcatacctgggtctggccgtgccagatatgcccaactacatcaccttcattgggccctcgtggccgattcaaaacggtagtgtgatggcgccgctgcattcggtatctgaatatgcgattcagttcctcaaaaagatgcagaacgagaatatccgggcctgggcgcctcgccagcagattacggaccgcttcaacgagcatgtacaggagtgggtgaagcacacagtttggagtgatcaatgtcgcagctgtacgttagcacttgtgaatgcagcaccattcttttttttttctttcttctttctcctacttaagctttcttagaatatactgatcaaacaccagggtacaagaaccacgagaccggccgagtaaacgccatctggcccggctcctctctgcactaccaagctgtcattgagcggccgcgatacgaggactttgagatttcctacgcggatgctaatccatgggcacatctggggatgggatggacgatgctcgatagagcgggcggaaagcaagcggacgtgtcgccacatctgtgcttagagaacattgacccagtttggtaagtttctgtttgattttctgcgacctgcctaactgtacaataggttcaaatctattggtggtgatgtcgatatactgagaaagcaactcgagaaaggacatacccttccaaacaatgcttctcacgcggaggcgtaaccactgcggtggtatatatcttatccaatcaaagcctcattctgcactttgagttgttttccaaggcggcgatctgtggtagagatagagacaatattatcctcaatggtatggattgtccctggagagagcaggcgtggaagcccccttgttgtgttgccgtgaactccgtagagaactggggtagaagaaataaaaagataaaaagcctattcttgattttgggcctgtgggttaacagatcatatgtgcttgtataacagccaggctctatgtactctacatacgttctgttctagctcaggttggaccgcttatagtgcggttgatagaaatatatatctgtttctcgccaggggacctagaggcccaagtatctctatttccatcaccccgccgaaggagcaatcattgttgccagcggctactaaggccatttctctcatagatctatagccgagcttagaaagaaagctcccagttccagatgatcaagatgtcccaccttgatctacctgctgtcatttagtaagctacgatgacacgtacccaatacaggacctcgaagcattgcgtcgtttgccgttgctgatcgtgaactgcactttttgtagaactcagacaacgttcatcgctatttactggaccatgaaaatcaaacaaaaaataactaatccatatacgtctgaaataccgagactatcgtttgtaagtggggaattaatcgtgctgtgccaggacactgtctgaccaaactaggagaacttgggcttctcaatgagttcctgcgtctcttggccaagcctgttccggcgcgttactgctcctgtccgttataaaatggttcaggctcggtatgcaatgaaggcattggtttgctgtggtagtaagtagtacgcggaacctgcatccgcgactgttgactgtattatgacggtatatacctttctagatacgctctgtcatggcatttttcgttgttatgttatatttcaacaggtatatttaggactatatggtttgactagagcatctataaccgcaagccagttttatcggtgcgatccaggcaggtcgagaatgggatctgatcaaagtgctgagagatgcttgcccgaaaacgtctcttacaggatacccaagatttggcgttgcattagtctaactatgcttgtcctattaataccttctcatattatcggtatccttacctggttaacaggctgatgagatgccaggtacaataccattttctaaacattaacagtgacatgaccaatcacttagctagtttcatctatttgccgacggtttcgcattctgggcataggccagaaaaaggcaacagcaggaagacattaaaagagatccttaaagtatcaaaagtcatgctaggcgcgctgtattatatttaatacggtcatggacaacgtaaatgcctcgctggcagaggcagacaccaaaccattgcaacataagattgcagagatatataattatatctatgtaactttccagcaatcctaatcattacctacacttgtgtcctagtctctgcgctagacttgctgaaagaaactctattggctgcccttgtttctcaaggatgcatagtattcgtcgtcaaatgtcaaggttgtgtagtccctttcccagagctcttttataagtttcttcatctcgtgaggcagagctgcggtgagctcaatttgtgccatgcttgcaggcctcccattgtatgggacgccaacaaggtaatcagtacatggattgtggctgacgttcgtggtcgggtcaatgctagtatagtcaaacatacaatgacggggtacgacgcggaactttgatccatgaaactggcggcatccacgtgttggaatcttcgactcaagatcgcggagatatttagggttgtggctctgtcgtgcatccatcatcgagttttcatcggggtctgcgtctagtaagtcccaggtctccgggaaattggcaagaatgcaagctcttgcaattgcaggcttcatggacggcacgcgacggaagagctccttgcaggttgaaggatgtgggactgatgtataccaaatgcagtatgggagatgttttgtttctggtgtgatccgcgagaggtcattattcatgatgaaacgagcattgattgctagattggcacaatatgagaagcggctatcttcctggagggaccaccatttatcaaacatagtattgtggtatattccccgcacaacacagtctagctcgctgacgaccggatgaggtcgacgcaggcgtgaatagcggtcaacatcaccataataggcagccataagaatcaacacatctttattgagagtgggcaagtcggccggaagtggcatatagagaagatggctcacatcatcctttggaagcctttggtggctcagaggtgaactcatcaatacggtcgtcttctgtgatatcaaagtgacttgtcctccgaccaccatcgtacaaaagatcgtccaagtcaggaggagccttaaacttggtcttgatatccaggtatgctcttaccgcagtatcaccattaaggcatcccttgataggctggctgaagacagtcagtgtatattcattcatggcattagaacgaatgtcagccttcatgatcgtatcattaatctcccattgctgattctctcgtgcttcttcagcaatatgaaactgaggaaggaggtcaagttcatggaaaaggccaacatatccagccacagcgcaggctcgtccaatcaggtatttcacttgaggatatcgaccggccagagcgcggtatgttacctcggtggcggtttcagggtaccaaatacagtatggaaattcgtcaggatcgcttatatcagggattttgttgctcataatatcgcgggcattcaacgcccgggtaagaatgggtaacaacccacgaagctcaatagcaaagccaggatagtagcggatgccgcggacaacacagagctgaatgatctactcgccgagagctttaggaatgcgctggcctctaaaggctagacgacaatcctcttcgttgtagttttcattgtctaagtaacctttgtaggaatccatagtggtaagaaaagtgaggataatctaagtagcaaagaaagaaggaaaaaagagcgaggggtatggaagccttaaataagtatcttagcgcaatttctgccctaacttggtttgttcattgtattcacttggcactattaatggcaaaccaggtggctacaaatatgtaagcatgttcttaccctctttcaaagcctccctcgaaacatcgctccttctgccttcatctgcagagataccagaggtagactccgacatagaaacgggaacgggagcgttggcagaaagagacggcgctttcattgcggaatcctacagcttctacgcggtgatcctaaaggacattggtgtttggactagcattgtgaacactatggtccaaggcgcggtttgagcaggattcaatacaactttacctgtttacctcctagataccttcaattggggcccatcatcagtgggatcaattttccttgctctccaggtccctatcgtctttctctccccattcttggttgggtccgagatcgtttcggggttcgatacctgacgacagcaggctgggttctcttttgccccttactgtgctgcttgggtgttcctggaagagtgatatcctcggctagtgacagccgtagaaccgagaaagtctcctttattgcatgcatatatggcattggattggtcatgcctttcgtttaaggggcaggcgctttacagatacggagtaagttaaatgtcttttgcatgaagaggccgacggaaggctaataccacgtcgccaccgtgatcagacatcgtagcggatttggaaaaggaaactcccaatatctttggccctgatggcgaacgcgctaggtgtttcgcaattacatccatctcgtttaatactggcctcacgctggccaattctgaccgcatggctgcttggcggcattgggtattgctacatgaatattgctcttgataggtgatgacatcgatcctatttcattatgcgtgtgttgatgtctttctctaggtgcgatctgtctggcagtggccatttgcacatttcttctctgctgatctgaatagaaacagttttcccttttcttacgagggatcgagatataatatttatcacaagcgtaaatctagagaatctaatctatatgtatatcactaatgttatggcctacaaaacccaccccaaacacttcccaatacgtctcttacttcgacaacgtagagtactcgatttcgaaaaactggtaaatgccatttggttcacgacaggttcatgggttcaacttcatagaggacatatgaccgacaagtgctgcttaaaataaccccgcagctagctgtaaacaaaaatacaagacctcagaaaaatccaagattggactgttgacgatcacaataaatctcacgaggcagaccttgcctggctgttaaaaaacagtcccaaaagcgatctatattggtcgtgacgcatcgtgccccgttcctccagaaaacatccagtgcccagcgcaaatagcccttggggctctgcctttggaactgaaatcctcccgcggttaccgaagttgagtggtgttaaaatttgggtttttggacacacgcactataccacggagttcaaaatcagggcatacgagttgtggcaaatcaaagatgatatgtgctttcgtggtcgaaggagtcgaaagacggatttaacgttgggaaaatcatctatgtatgatccagggatacaatggtttgttagaatttcagtagcatccacgctgtgagcacccttgttagattggtagacgtaatcgctgcgtgcaatcatgtaggcttgtgtgctcacacccagtacccggtttcaaggattctcgggctccttatggaactacttcatagggccatgtccccagaaactgatttgcaggagctggaaacaagcagggtttaactctggagagcgtaaaagcgagcttacgcctactgcctgtgactgttctatttgggtaggttcggttctgaccatattgagcgcagcatcaccgaaggatcaattaatggcgccctcccttcatatggaaccctgctacgagatatttgccgactgatacaaatctatcgaccaggaaagttgctggtcgtctgggatctgtcatacaatgctcaacgcagcacgcaaagaactcttttgatgcgttcttcccgcatctgtaatcaactacaccacgaattgcggtgctgacgctgatttctgtacctaggccatactcggcatccccatgaacctcctggtagcgctttcttagtgctgcggaatccgttactggaccctttggctatcaacgacaacgccggatccgaaaactttgctccgcgatgcttttttcttgctgctttcttatcatagctaattcgtcagtggtgttgtaacgtccttttggagttttgatgagagacttttcggcagacttgagtatttaaggaca

SEQ ID NO: 5174 - DNA, 3433 bp, Emericella nidulans
cagtatgagtatgagcatgagcatgggcacaggcatagggatgggcatgtacgcgcctgacattggtctcgatctccacggccaattctttagctctggtgggcctaggtctcgagtttggcaatttgggcgggcaaatgcatgcttggatgccgcagggccagtggtctctttgatctgctctggaattcctcttctctctttcataattaatgcttgcgtcttagggtgattgtcattagggtggagttgggagtcagttcgtttttatccgctatacgtggaatatctcccctcatattatggttgagtggagcatagctacggtatttgagttgcagaaatagacacaaggtgaattggtgggctatacaggtgttcgatacccccctcctctatacatgtacatatattttgaataagataatataacaccgcttagcgcttatgataacagtgagctaaatgacaaggtatcaaacctgtctttccgttagattgatgaaaggaagaaatagagggatttacataggtagaagggtataagtatgagattgaagttcgggtgaagggagtaggaaagattcggttgctcccactttctgaagttgggaggcaaacgataaaaggtatattctagattattctccgcctctctattctcgaagctggacacagacctatccattaggttgctaaagaatctaattgggtaaaacgtagaacactagtaaattgagggtctccagaacgtaaggtctttgctacgtaggtcagacagagatgggcagctgtcaaattgttactaatttaactgatccacatgagctaatcattatgtatgccatagcatcacttcgacaggttgagaaggtaataggtaattggtaattaaaaagctagatacattttggcttcagtggccaattaatgctcgagaatgcgaagactgccctgtacaacacagttttccagtacagaacctgggggaatgtcgatcgtgctgccttctgtagctacaatgattaccgtacctttcagggtcacgttgcggcccagattgacggctccagtgatggtgagatggtccagctccacgatacggggaatgctgggaatgcgcttctggaagtcagaaaccttcttgaagtctgagccgagcttgatgacggggacaccgccaaatcggttagggtccatgacgagctgaccgtgctcgaggcggtagaggtcggacttgaccagcagcaagtcggagcaagtcttgacgggaaggaagcggcgacggggaacgttgacaccgtgggcgttcttgaagtgacggatggcggcaccaacagcagtctcaagctggtagatggcctggtcggcctcacccttcttgtctgcagggatggacttctcgttggcaataatctccatttcgagctcgttctcctcgacaacacgcttaatggcgcgaaggttcatccagatgttattagtgttgaagtacttgaacttcttgatggacttgaactcgttgacgtgctccttgggcacctgggcgatttcaaggagacggaccttgccctcatagtcgatgatagtaccacccttgacatcggccttggtcttgtcggtcaattccatgatatattcagccttggtgtcgatcatgtgctgcaggatgcgggtatcaacaacagcgcccaggttgtcggcgttggacaggaaaatatattcgacgccgcgctccaagagcttgtcgagggtgccggagttgtacagtgattcaaagacgtcaccgtgaccaggggggtaccagtcctgcagaggagcatcgaaggacttgggcgcaggcagaagcgagtccttgatgattctggggtaccgagactggttgaaggtaatgatgtcgacgttgtggccctggtacttcttgatgatggattgtgtgtcctggtcggtgttgaacgagttcatcaagacaaaggggacgttgacattgtaagtgcggttcaagtgctcgatctgacggacggacagatccaggaaggacatgccctcacggacctcgatgacggacttgggaccgacgcaacccatggaggtaccgagaccaccgttgagcttgacgacagcgagcttgttaaggaactcgacagacgattccttgccaatgtcgtcatagttgacgacctgtgagggctggggaggggcgatacggtcccaattgacgacgttacccttggccttatcattaaggaatctgcggaaaagagcaaagaagttgtccatctcggcctcgaatcgtttgcgctcgttaggatcggggacagtctcagcgagagcgttcagggcattacgcatctgggaggcggcaacactggtggaagcattttcgaatgcctaaaacgtcagcccaagccccaaatccaatgctgcagtaaatgaaggtagcaaagtcaaaaaggacagaaattgacagcaaatcaacgcgtcagacctgtgtaccgagagagcacaattgaagcgcagtttgcgacattacgtcctgcgaacagatagcgtagccagaagcgtcactgtaaatacgagcagggtcttcatggaacgcccacagcgagaccagcaaaaggccagaaacgccaattatgcggtctatttaggacgggcatccttcctggaaaccacaaccggggctcgtttgtgatttcccggcctaccgctggaactgattttgactgaaccgggaggggcaggacagacgtcatagcgggaggcgccttccaagcgccacgaaaaccagagaaagagtcgacgcaaagacagagaacagaacttaccatatgagattgagtcttgccatggtgcttgccgaaccccgtgtttgaggacagatgagtaggcagatcttttgtagccattgtgtgtgtttttgatgtgttgtatgcggagaagactgaagcagatatttagtctactgataagaaacagcagttagtgtcaaaggacagatgaaagtgaccgagaccagcaataaataagactctggctggttcttgagtcgactgagccgggcagtggcaggctgccttgatccacgttgccacaacacagacggtgttattgctggtgtcgatcgcgggcaaggagggatgacggcaacagtgcgacacaagcacaagcacaggtctcaagcagacaacgggcatgaaagaacaaggacacacttacgatccaatggcaaatggacagggatgtagaggcgaaacgaaggggacagagaattacaagagaagagaagatggacaggagcttggaagatagatgtggaagatgggtggttttattgagagaccgggctatgacgaaaacatccatcccccttccccactcagcaggaggggagctctgtgaccgtattttacatagattcccctataaatag

SEQ ID NO: 5175 - DNA, 6735 bp, Emericella nidulans
aaagactatatctggcagcatctgcgtaaatttcatggatgtacacaatatccggtgccaaaccttgaagcctagcgatcggcgcaaaccgatattcagagccgctgtggtttctgtgcagcatctttacctagctgaatcgacgcgcgctgaccatctagcgatccatttcaaagatggctgtcggatgtcgcagtgtgcgggcgactggggatttgaattctcggttcttgcgaaccttagaaacgctgttttgccgatggagcgtagcctgttgagtatggcatcgacctgattcaccttactagggttgtacaaatttcatgtcaagccttgaatgtcgacctgtgtaatacaaagataacggaacaaaacctgcatggttacgagcccgtcttatgttggatgacgttcaggcagactatcggttatttatgttgaccaattggaccgttttgtagccttgtgtagccctgcgtctttggtggcgataaggttggcttggccggtgattggtggtcgtaaagtcagctggatgcggattttgcgctaagcaggctttagatttctcattcagcgctagtccctttatggtctcttggcctgtattgtcatcggcttgtattgtgtaacatgacattacatgatatgagtacatagatggtagcttcaacaattgttgtcaagctaaagcagtttgagcatcaagaattaatagtatgtcagctaggatatcagagtcctagagagctgaatcattatgattaatcatggtgaataagtgaaaatgagtcgactgtgtccgatcgtttatgttgtgccaatgccaagtggcgccgcgctagtgaaaggatgggcgcacggccctagcctcctttcttcgctcaaacagccagactcacacaacccaacccgccccatctctttcatcccgttctacccgctgactccccgtctgctcaccaccaccgcttctgccatcaccacatccatcactatccataatatcatcaaaaaaccatctataacatcgtcaaaatggacctcggaagctgttgttagagacttgatgactatctctcgttcgtgtctccatatatcgccgtatcgatccacactactggtttcgtcacaccaccctcatcaccaaccccatcaccgtccccatcaccatccccgtctacagcatgaccgccactctcgaacgcagtctctctcgcacctccagtgtctctatgccactctcgcctatgatctcattccgccatgaagctacaactcctatctccgaatcatccctttctcacatccacgagcggctctccgccattgaatcccgtctcctcgagctaagatctaccgctctgactaaggatggatacgtcgaccgacgcaatcgggaagatgagcatatccgtcgagaattcgaagcccaccgatccatcagcaacagaatcgacctgaatgttgttgcattgagagcggacgttggccagttgaagtcaggaatattacagctaaagtcaagcctcggacaagctgggaatgaaaccgtcttccttcgcagcgatgtggatcgactgtcgaagaatgtcgaccagatccaggttgatttagaacatatgcagactgacgtctgtgggtgtcgtgtggagattagtaaattgcagtctgccatcagccagcttcgcacagaacttatcacattgcagcatgagacgtcgcggcatttgaactccttcctcgaacgcttttcccttatcgaagcgcgcatgaagcactccgaacgtgtccggtttaactcgctggctcatactacccacgcacctatcacacctgttcctattgttgaggaagatgggtccttgcgttggccggattattttcccaggactgtgtggaggttctggtgtttgaaaaaacgcagtcggcgtaagtcacataagtgaatacccccccaaacccttctaacacactctagacaaccgtttggcacaactcgccgaattttaccagctgggtggatatgaatattggggccgcatgcatcagacagatgggatgttcagtgatagcgactctagcgattccagcgactgcccttcaaacctcacccgcgctgaagcggttcgcatgttcccggaagctgcccatcaagctctcgccgcaaccctgggtctcgtgtactataaaatccgcaacgaggtgggagaccaccctttatctcccattcagcgcccaccgaagcgacatcaggaagaggtggcctccgtctcgtcaagttccaagcagaagcctgtcaagatggctcgccgtccgacgaacctctctcctaccgcccttcacaaactcatcactggaggtccatcgctggaatccaaatccctgacatctgaagaatctgccaaactcggttggaacgctaacgcgaccgagatttcggatgatacgatgagcaaactccggggcattgtttcagaagaagtcgggactattctccgcgcattagaacgtggtcgactgaagatcgtacctagcagatctgagcgcatggagatgagccccacaggttctcgctctagttctcgcaatgacaaggctcctgctgtcaaggatgtggaacccactgttccggacacagttcccactgagattatctccctttccttgagaaaggacgtgcaaaaggcagaagtggggattgaacctaccattcctgatactgcttctgagactaccagcgtgtcgacttgagctatacagctattctgctgctgtaagattttataccacaaccgctcctaggactacgtgggtatatctagcaggcctggccattctgtccgacgatcatggaagaacctttgttcgttgatgtgaaggatgcatgaggtcgaatatatcgcatttgagccttaagtcaggccgtggttaccaggatcgacctttctggcggagatggagaatcgtctccagccctggtcattgtctagcttgctaaagtgcgtacaatgatgaggaaccgaaaagcgtgaagattccacctgctttggtaccctcagctgccagggctctgtgcccttctggattgctggaaatcgaagacgaacagaatggttcactatggtcatctccgtgatcaacatacatcggtgcccgcctctatgagtgttaccttgtggatccgttaaggactgcatcgtgatgtttcgaggatcatgtgctaaacagctagtgtgctaatcatgtatccatgctgtgcgttgtttttgtctcatgtgagagtcgactttgcggtttcgtctaggaccacatcgccttgacactttgatttctgaaggccacgcttgcttttgaccatctctgatgaaggctgcagctggctagaccctttgttgaatttcgatgacggtgactcgctcctatttctctcagtcgcacatcgcagtcaatcgcgttaagtgttgctggacggttttagacctgccttatgaacaagcattaataaggcgtctttgttgcacttgatcttgtttagataccctttgggctgcatcattaggagttttatgatatcgtttggtttgggatatgagatttgtttttgaattttgcgtgcgtggcgtacattggcgtactgaattacttgactactcatccattagctattgaatggctgttgttaaccatacctagtatcccagtcgattcgatcaggcgattgagtttgtctactgcactccggaccgtgtcgtgtcgcgtcgtgacgaagcattcgctcgcctcctcgcacttgactagaccggagttcgtataagaccttcgcgggttttagattctcgtgtatgagtttggccagccatggtagtaaccagcgttcttgctcgaccaatcgcgctacttagtcttacagttcgtccggattccatacttcgtacactggatctgtttaataacattttagacccactcaacttaggtaacgcgtgccccaatccatcccatcatgcacatatcgtacatgtcgaagtatatcacagcaagattatctacaggtattcgtgtccagatcaaacgtcacgaatcatgacgggatcacaccgctagctggaacccaataaatccttctccaaaacctccagtatttttccttcgtcgacgttcgggatattcactgcacccacgccaaagagcgcctctgtatcttccaactgttctccgtcatttgcggcagtcactgcggatgcagttccagctgccgcttcgtcaggatgagctcgtagatattccgcctctagaatgaaccgttgtttcaggttggactttccaagaggtccaggccctgactcagtgacgcaggaggtatcagggacaggcatgagcggattctgcagaacgtaaatggtagggaactccagtacgacacggtcttgtagagcggaggtgagggtcattccaggggatagaggagcgagaaccggacgttttgttgtggtgcgggggcggtggatgtagaagaaaaccgatctgtaaggtaaggggggctctgttgatggcgatggtaattctgatgtcggttgtgttgtgtcgtcttgagccggtgtagggtggttgtttgaagaaaggacgtgtggctgagcggtctccggcatagattcagaaaacgacatgtctgatttaggcggctggtgtgtttgcgattgcgattgtgagggctctgcatttttgtcgggctcgacgttcttggtctcctgcgtagattccttcgccggttcctgcgcggacgcgagcttgggctctgatttaaatgtagactcctcagtgcggacctgtctctcctccctcgtcagcgggaatgcgcgatcatatgcctctgcaacagtcgcggtctctgcgcaattcatccttttcgtcccgttgtccgtcacccactcgattgtccattgcagacatttctgcctataccgcaataacagttaacaaagtccgacgtaggaagatacgtgaataatgtgaacactcactttgtatgccaccttgagccattcatcttcgcccgactcatccccttcggagccttgataaccctcacccctgcctcagccgctcgcttcagaaatcccgcttcgcccttcgccaaccccctctcaaaaccatgaccaataccattcccggctccagggcccgcgcgctttctcttcctcccatccatagcatcagcttgccccagctcatcctcatccaaccccacaattcccggctccctaactccctgtctcccatcaaccactacgcccctgttctccgcatcgcgcgttgctcgctctagccgtcgctcgatactcgtaatgaaattaaagtctcgatcaaaggcggattccgtggcgagctcgttgcgtcgtaggtacgcggctgggtcgcgtactccggagcactgcgaccagagcttgtggcggcgcgtgcaaggaagcgagcaggttcgagttgagcatcggggacagcggtatttggggggttgaatatgactgttttgcagagaagatgttagtttattgagcctgagtgtgtaggttgatttgccatgttggaagggacggaccagatcgcgcagagattcgtaaggagggagtcttcctcagacatcttatgtattagttaagaatataagacgtatatatgcagatgattaaaatttagtttgagtatcccagtaataaagcaaacgagcaagaagctgagatgttgtttaactccaacctggacaaagctggagaacgaaaaaagcgactcttatcgatagcaactgtgtttgccttgatgccttacagcgctctgtgatatctgccttctgcctcaggctgcaagatgttgtcatagctgcccagattcttccaatctccaaccatcgtgggctgagcaattcggtcttagagttgagaccgatgattacaaatcaaagagagacgaaatggatcgcgacatcgtgcgacttatgtttcaatcggccattatgtgattactcacattgctccggccggtggatgaagccattataaagcagacgaccccgcagctcctggcagcttcccacagtcattcttgctcttcataccctcatcccatatttagtattataataaaacctcctaggtaatcacaatggccacaagaccttttgccgtcatcgctggcgttggcccagggacagtaagtccataccttccataaatctctttccaaactaacagcctcacagggcgcaagcattgcccgcaagtttgcccaagcatactctgtcgttgtgctggcccgcaacccatccaactaccacggggtcgtggacgagatcaactcctccggaggccaagcactgggcatcagcgccgacgtatcggacagtgccagcgtgcagagcgcattcgagaagatctcacagcagtataaggacacgcctctggcagcagcagtgttcaactctggcgggggatttgttcggaagccgttcttggagttgacggaggaggagtttgcgggtgggttcaaaagtcaagggtgcgccttcccttatccaatatattattcgtcttgtctgaaggattgagagctttactgatgacaagcacagaattggcgcattcaacttcgcgaaagcgacccttcccctcctccagaaggctacaggtctccagcacccgccaactttaatctttaccggcgcaaccgcttccgtaaaag

SEQ ID NO: 5176 - DNA, 3884 bp, Emericella nidulans
atctgctgaaagcttgtttctgtcatcgtcgagacatacctaaatcaccaatattgctcataaatctaccgtctactaccatagatagctggcttggggtgaaatacacctacaaagtcaataaagggcaacacagcagcttctactgtattgcattcttaaatctgtgattcagggactaacctacgaattctttcggataacatagaaatcgaggagctcgtttcgctttataattaaacaaaactttctcaatattagtaacatgtttgtccccggttcttttctgatagacagtagaggtggaaaacaatgagagttgaccgggtttcatacctatttccgccttgaggttcacagatccaagaccggtgctaagcagacggtgtcagtaactgtttatctgttggagcgtttggaaagttgtgctattaacccatgccactcctatctttggggggtcgcaccggagcccaaaattagacgacgcatgtagagtcctgtggaggagcagttacttgcagattaggatcgtggttagactcaaggctagtacttaatggggtttgtttgccgcgtccgggccgcagtccaaaagagagaccaggacattgggaacattctgcgaacgtcctcgccctcgtaactgtggtactactttatggcaagggactgcctggtgcgattgcagtccgaatagtaaaccttaagagacagctcccgctccttatactcatatcgatcacgaaacagccgcgtgagagagcagactttcttggctgttgatggatatctgaatccttccttgtgcatcatctagtagttactgtcaccactttcattgtaaactcctggctatgtaaataagtgcatacacatttctgttgattgttaatgcgaggggtaattctctctcgtactaggagtccgtagatcctaggtctgattctatatccatgatgaagcaacctagaaaattgccggcccatgcctctacatggcggcactccttcaacaaattagaagtaagttgtcctttcacctatgttaagccagctaaagcagtattaatgtaccttgaagccaacgaggctcagcgtaaagacatggagcatacccttcttcagtacaaacttcggcagttcagattgctcaactgcagtggcgtggattcgaggtccgaacactttagctcactaccagtaaaacctagtaagactgcttggcgattaatgccgtcgatgagatcctaagggtccgctggggctgtcttgaagaagcccggagctcctcaaccagaaaagcatccaagtacctgctccagcaaattaaggactctattcattcctgagacgaattagaaatacggcattatacattgttctaaattaccacccctttgagcacagttcattgaaggccgctctgaacaagtgcgtggaggtgatagtaagacgtttggtcccgggaggcaaccagagcgactgcctggcgcacaggaagattacctcttgtcttggtgcccagggccaccgctgagtcctcaaacctatgtcgccgatctcttttcaggatgagcccttggcgccgtggttacaggtcagctaagacacgctgatgaagctgacatctacttccagaggttataaatacggctctgaaagccacttgatatgctgggattcatgcccgttcaggcttcatggtcatgctccgttgggaggcataatagtagagattcagatagaataggtcaggcttggtagttcacttagattgtagctacaacctgggaccttgcaaagcacaaagccggtctatatcgcaccgtaatatatggtttatgtgcccgcgaacgaaactcctcatcctatagattctcatggatatattcttagtttcaaatgttaagaacttgaggttggcggctctttgatcgctgaagcgcggctcagatatatatcggaaaccgagatacaaactgcaaacacaggaggacgaaactacggccttgatcgaatgggtaggatatgcaattgatgaagaggtcaaccctgactgtagtcactttgtttttgaggattaattacctgttagcactgtgcctatctgggggacgagcataaggagcataaaagcgcataaagcgcacaggacgcggtgaccaaatattgtaacttagatcacatgattaagcctctgcgtctatcgacagagtactttactgtatttatggagacaccgaacttggatggagttgtgtccccagtctgacgattcagtctcttttctggatcaaaattacaggccgttactgttgaaaaagaccaccagtgttttcgcaagataacggacactcccagaaagccgtataattaccacgccaatccgcgtaaagcccacgcccttacggagcagctcctatcgcccggacaataaccgaggcaagcatgcgattatccgcgagtaccgcgaccgcgagtcaagctatatgacagtcctaacattccctggctcaaataatgccatggattaaggagatctacacaatctgcggctgcagttggagacgtaagaagagaacgataagaagtttcgctattgcaggggttggccagcagcagcaacaaagccgggcgcgagcactcgggaaaagccgccggaaccagggacgcaggagctgtatccctgtcaagctggctgctcaggatccccttgatcaggtgactaagcaaactatgaagtcacgcgcattcgtcatattgacaagagacgagagagcagacctgagcggttgctgcgtcaattatacgcatcagaacgctcagctctgttttttttattaaataaactgagagcacagcgacaggtaaataaagtgttctctgagtaggacaaggacaaaataaagggagaaaaagtaaaccttgtctcctgcagccggaaaatcaagcgatcgcgatgcaggacagggggatttaggcaaaatgtacgctaagctattttgtgaagagatcgggattgaagagaccagctacattcagcccgggttcgtccagcacattttttactgcgttggtgagagaggatccaggcaagatatataatcaggccttcgcccctcgaaagaatggtggtgttctctcctcttgtccgtctgccagaggagcagctctgtttgttcctcgggtggactccggcccagaacgggagtttccaatccgagaatcggtgagacggcgaaggatccagagtacggtaatttacctgactcctgggtttaccgtgttactttcaagccacgtcttcccccagagcgcatgattgcaggcctgaaacttgaaattgacaggaattccttccaaccgaacagtcaccctcggccaactctcaccttggtctgggagccttgtttgtgaccaagtccggtgctgcagctgtggagccgcattcccgattcgggccggattggtcaagatttgcgtccgaggtgccgtctatcattctagcttgcggtcctgggcttgtgactggtcgcgagctgccactaagtggggcagtaccattttatcggacccatccagctatgggacccactcgcaaatttttacatcattttctttttgctcagtaacggccaccttttgtaaagcgtaaccagcaaacaaattgcaattggcccgtagcaaggtagtcagggcttatcgtgatggaggagaaggctatatcagcctcaaaaatatgttgccagctggcggaagcccggaaggtaagtggattcttcgccgtggctggagcaaccggtggattccagcgtctccgacttggactgagcaattcagcgtcacggattcacgatagacagctcagaccgctccacggct

SEQ ID NO: 5177 - DNA, 4391 bp, Emericella nidulans
gaaaaggaagaaatggggagagatgaagaagtagagtatctaataaaaagagacctcttttctgagagggagagtcaagaagcataacctgggtattggaagaccgaagaagccggatacaacaaaatcagtataaaaagccaggccttcccagaagcaaatgggtccttgcccggggttaatacccaccttgtttaaaggggtattcttgtggtgaacacaacgtcaaaaccgaaaatgggtctgggaaacagaaaatcttccaattcccgaatggccgaccacggcccttagggggccccaatcggcttgaacggaaaaaagctccgtttaaaagatctctcgctccttccatttcatgcacccagccttaagtcgggtcaatttcctggctccccatcgcaaaaactcccgcatggtacttgtgaagtgtcttcaggctccctccattgatcgaaagagaccggaatcagaagccggtccagtgcattccgaatctgtggcgcctgcacagaaaaatccattgacgccttaaggtaagctttgcgggcctcatgaagttgaaatgcatcctctctgagagccgaaggctccttggacttagattgagacgagtatcttgcttgcaaggtgtcgtactgtttctgtgtctggtcaaggatacgccggttctcctttatagcgttagccgctattgatgacgagaatagaaatagcattcaccttgaagctccgcaagtcctcttgaatgaagatcctgatgggttctgagacaatgttctctatttttcgtgctgcaaagaccagaccattccacatgtccttcgaactctcaccacatctccgcattgacgacagcgtatagtcatgatccagaatagcctccgagaccattagaggattcgtagagtaggagagaaatgcgccaactatcccctccaatgccgcgagctccgtggcgagacgggatgcggccttcgcgtaaccatcgagccatcgttcggtgtattcgatctgatcagagaagtgaagagtggtggcacggaaggtgggcgagtcgagggcagcctcttttaaccccacgggactattcaccaaatagcgttagaaatgactcacatgcggccaagatacgaagtagtgcaaaagcaatgctggtggtctttaggtgacttacaccacactgacaagcttcccgacctggggtaagggtgtctgcggctgggtcgacatctagtgcatgtcaccagccatacacttgatgcggtaacagaaaatacggcagaaagtcaacaaaggactatgagcttagagaatcttaggcatgtataatttataaagatcatagagaaatagggaaaggagcaatatggcgctggggtaaagacgccgcctgctcttcgagctattagcattaaacgcgggtcccagtttcgttgccattggctctacgtcagcctggtcagctcttttctaactgcccggctctcaggcagcgacagtggaccctgagggcggtggggggtcaccgattttttctgccggcaactgccttaactttttcctctctgcagaaaacaaaacactatcagcacaaataatcatggagccgccagctaagaggtcgcggaaactgctagaagatgattcgtccagtgactctgagaatgagtccgggggcgtttctctcggcgattccggagctggattcaagataaacgaagaatatgcacgccgctttgaacacaacaagagaagagaggagctgcaacaacgtacgtacagatattttaccatgtgctcctgaatgcttccgcatactaatgactatacagttgaggccaaactaggaaagtccgaggacgaagaggaagaatcctcagacgatgaagaagaagacgacgatgcagaactggctacagaggctgtggatgccgagattatggagaccatcaaggcaattcgatcaaaagacccgcgggtatacgaccaaaacgcgaaattctatcattctctcgaggaagatggcgcgggacctcagaaacgagaagaaaaacagaaaccaatgaccctcagagactaccaccgagagaacttactgaacggtgccaatgtcgctgaggatgaatccggtgcacctaagacgtatgcgcaagaacaagatgaattgaagagcgcgattgtcaaagagatgcacgccgccgccgatgcagaagagtctggatccggcgaggaagatgaaggatttcttgtccggaaatcagcacctgaacaagcctcaaagcaccaggccgctcctgagctagatgttgagaatgcggataaagaccccgaaacattcctcttcaacttcatgtcatccagagcttggctacagcgcggcaattcccttcagccatttgagtccgatgacgaggaagaagatgagcgggcagaggcctgggaagaggcgtacaacttccgcttcgaggatcccggcaagctcaacaacaagctaattacccacgctcgtgatacaaccaacaagcagtctgtccgcagagaggaaaagagcgcccggaagaagctcagagaggccgctcgggctaagaaagaggaggagaagaagcaacgtgaaatggaaaagaaccgacttcgcaagctgaaaatggcggagtacaggagaaggtcgacaagatcaaagaggtcgcgggtcttcgcgcgtctgagctcaccgatgaggactgggtcaaattcctggatgccgcctgggatgacaaaaactgggaggaagagatgcagaaacggttcggtgacaattactacgcagagaatgatgctggcagcgaggatgaaggggatggtaagaagaaaataccgaagaagcccacatgggatgacgacattgacatcaacgacctggtacccgactttgagaacgatgaaaagcctgcagttgagttgtccgacgttgagatggaagatgttgaagaaagtggaaccaagaagagcaaggctcaggaaaagcgagatcagaaacgcgaggcgcgcaaggacaagcttcgtattgaagaagcggtggaccgcaacctggaccttgacatttcactcctccccggcgcaacaaagagaagtgacggtggcttccgctaccgtgaaacatctcctcagtcgttcggcctgtccgccctagacattctgatggctgatgacgcgcagctcaatcagttcgctggattgaaaaaatatgcggccttccgtgaagaggagaagaaacaacgggatcgaaagagactgggcaaaaaagctcggttgaggcaatggcggaaggatacatttggcagtgaagaaggtccgagggagttcgtttttggcaacgagaagccttctgcgcccgagcaggacgatactgcagagaaggtcgatattcgagaaggggagcctcggaggaagaagagaaagaggtcaaagaagcattgaggtagattttatctagtttgatatccccagccgtttgtacttatggaattttaaagtacatctagtctactcaattcttacaattcacttggctgtttacagtgatcgctagagctgggaaatgccaatgtccgtctgctctatgcagcttccgtattgaatgtttgtagtacgctcagggcccccatgttttgtgggtctatccgccattcccgaatgcgatggtgtcaaaaacttgagggggtccgggcacagcggcatttcagggaacaaataaaaagaaagatgagatttagacaattccggttctaaagtcttcaaattctattgagcaagttcaggcatgttcaggaagcctctgactgaggctcgagctcttggatagcagtacccataggtggattaacatataaaaaggacattaaacaggatagtcaaatgaatatactccacatttatgagcacaataatccggagcagataggcctgggaaatttagtacacgtattcagttgacagcacttatctttatctacgccgcaggtatattattgaagaaaagcaagactccgaggtcacgcataaggcacatgatcatcagcggtctgcaattcttgcctcgcgcttcgttatcatggctcggtgcaatggagaccgtaactgaggggttttccgctcatgctttgccgccgtctagaggcgaaaattcttcacatatcttgccgtccgccgtcaatgcgatcgcaggcctaggtttggttgccatcggatactcgggagagaggaacaggttctccgtttggaggctctacggatatttctggcccgatggggctgatcccagtgtttacagtttcttgttattagcattataagcatagtgtatagtggttgtgttttttatttctatggattttttttttttttttttt

SEQ ID NO: 5178 - DNA, 3699 bp, Emericella nidulans
caaacgtcgaatctcaaacagcttgcaagccacctgacgcccgacgattggcattctccgcgagttccccggtataatgacccgacaccgcggagacagatgtgccagcgagttcgataagcagggatcaggtcacaattgatgcgcatctagattcatgggaaccgggtcaaactcggcttccagtacatacgcagtggtgtcgtaccttgcttcctgcttcctcagggaacggactccatagtggtacggtcgactagcccacaattttcgcatctcgggattcaagactatcggagtcgggattaagtcaaatgatcctcgcttggctcaagctttctagaattggtgagccttcaatttaatctcaaaagccgtgccaagcacgcgatcgccgggacccgtcgctaacacgagccatgaacccttcggcagatatggctttctgacagcctacatcgagattccagatttttagcagagatccgcgcgaaccggatcccagctcgcaaacccccttcgtatcaggaaagacggctcaagccatagaaaaaacgtgcgactgcaggacgccgggagcggagccaggccatgcgggtgcatcatgcataatgcagcctgcagcctcaggatggggaaaaagaaaccgtctttcgaatttggagtcgggcatcgatgagaggctgattctattagttaacaggaactggtgagacgaagaaaaagcaatgctgcagcctataagacgagctcttttcagggcgatctgttctagattcccatctagcaccgctgaatctgatgcagcattacgtatggctccatgttctgaggaaggatgaagaaagttattgttttgactggtcactggggatatgattagttgaaaatccctggaaacatcaggcaaagagaagacctgtggagtcccagatggctattattatgcctccccgccttaaacgcccaaaagtctacagtgcagtacactgcttgccccatactcactagaaggatcgccctttcagctaatataacgaccaaggaactaaccaaagtctgcaattttaagcgaacaagcataccccctaacctgggctgtccttagtgcatcgtgagacagttcagcctcagctcctggtaccctatgccatagtgtatatgacgtacatccagagtctgccaatgccaagagaacaaggaaaaaggaattggacgtttcccaatcgtgatttctgtgcagcattatatggctgacacctcatatacatcactgttaatcgtcaccaggtaactcgcagctgacctcttaccaagtcaagctcgaggcctgaactactgtatcccaggtactccgtacgcggagccccttcatcaaaccgaccggtatataaatatattgatccaatcagcgtcagcccctgtgataaaccaagattaacagtaacagcgggccatgtggagtagagtcaagaagtaaacaagcaagcataaaagagtcaaaataaattaggcgcgaaacccgaggtagatccgttgccccggcctagttggctatattcctcccatccgagtcaaaggttacgagaaagcttacggagaaaggttatggagaaaacgctccaagtagccaaagcttctggtatttgcagggcagattcttttttctgccgctttcatgattgcgttcgatccatccaatgtacgtgcataaactactaaagtcattcgtaccctgtacccgaaaagcggatatgaaagccgtcccagagaggagggggtacctacattagcttctaagtccaagtgcaacagcactagtgctagaagctacaagaaaacgcagagggtatccaccggcatctgcatgtgccattcgtaacaagctaccttgaggcagagggaagtaaattagaacctgaccgagcggacgcatactgatgcggggcatggtttggggaggagagtgacaaacaggccattgcccgatcggcactctatagccagtttaacttatgagaggtattataccctcggaatatttgcatgtgcaggtattgcggtgggcgcttttcactttcaccacagcggcgggtggctcctctggaaggatcaccgcatggggagtatttacatgattggtgcgaagtagatggtagtgatattgatttctgtactaggcggtatgctatggcagctccaaagatccctgttctgcctctggctgggtctcatgaccccaaacccacgtgcgcgttttaggtatgcataatagagggcaggtaggtcactggcgactgcttgttccccgccacatcagctgagggttgactcaaggtaaggcaaggcgggcaggtagtaatggggttgaatggatcgttttcgtccctatgtatgtacggatggctctaaagagctgtgttgtttcgcaattcgtggttccgacctgcagtctctgttcgattccctctccacactctcactcccacttcaaatgataaaaaaaaaaaaaccgaataaattggaagaaagtatatgaagacagacagaagatatttatccgctgaagcggaagcgcgtggcctccagccgtcctagcccttctctcggggccacgttccgacggcggtacgagttggtaaagtctatcgtgctgttaaccacataaaaagccaaacagatcccgagtttgcttaccttgaaggagagcgcggatctttcgtgtctctcccgactgaaccttgtcagaaatgcccttaagtagtcgttccgcctcgcccgccttcattgtcccggcaggcagcatttgcagcgtcgattgcacccagctacctgcttctgggggcattaactcaaacagggacatcagcaaacttgatgcatccgggaagcattcgcctgggaatgtgaacatcattccagtgaggatgcgctgaacaagaactggtccttgcgacgcaataagctgtttcacggcctcttggacttcgggtgggtttgagtaagcctttccatccggtgccgtaaaactagacacggcaggcttatcaaaggcaaagctaaagagatcgtggtagtaatgcagcaccgccataagagggtctatttgctgtaaagtaagggagctgagcgcggccgagaagatcggcactgagagagacgaactgatgcactccttggggtagaatcgaacagcatcggaagaaagacggaagaaatcctcaatcactgtttatgtgttagtcagattcgaggagaaagacggatacagcataccgtcgggaagattctctgggggcaggtcgttcaatgtacgcaggaaagctgttgcttgctgctcgtaaaattgaaatactgctcggctggtggcagggtcaacgaattcggctccttcggagaactctcgtacgacagcatcggtagcccataggaaacatccttcgcgcgagacctcgaatccacttgcgagactctgggcgagcgtaggtagcagcggactcatggcagttctgtaactgatgatcatgtttctccagcagcgacatacacgctccaagataggcgtcgatcatgtgaagttcgttactagcgtcgtcgtgatgggtaaaacttcgccacagtacatccccgccggcgagtgatccctcgtggcccaaaaaaaagtttcacaaccattatcaagatagtgtccaacagcaa

SEQ ID NO: 5179 - DNA, 4605 bp, Emericella nidulans
cattgcgctgtgacggtattgtggatgttaatgacaccgccgcctttacgggttgagccgacaagaccgatgaagcggccgcagggggagagcttgaagcgttccatagatttctgttcctcgcggcggtcggcagagccgttaaccttgtcaactttgccggaattgaggttccagatgtggtaatagcgacggcgaccggacgcgtagatctgatgtccgtccggggagaaggccgaggtgctgatgggcgtttggcgaatgtgagagatgtaggagtgggtgagggcttggggcgtcgggggagacatggtggatgagagtgttgatgctgggcctgaggagaggatcaatggataatgagggtggaaggtgagtgagggtgacagcagactatggattgcgggcgcacattagttatgcatgaggtagaagaagtcttctctgaagtactcaccggtggtccttcccaatatcctttaatcgttgatactaatgacttcctttcgcagcttcggacgaccgcccgttgcgctctcagtctcaatcttcgtgaaatcaataccctgcaaaacgttcgccaacgcgtgcgcggatatctccccctcttcatctgtatccatctcatcctcatagttggaatcatcttcgttctcgtccgcttgcttgttcgaattaggtttcgcccaatcaggcgtcggatgtagctgcagatattgccggcgaagtcgcctgatgtactccttcccactaataatatcttccgactcagtgacacgcagtttcctcagtctgttgttcccagccaaagaaatggtaatgcgctcgtcgtcgctatcgtgccacagtgcgggaagactatcttcgtcctcgtccttatcttcgacttcagcgggtgtagcggaggactctagctccgtagataccggaccagcgccagaatcaaggaagaaaagctttaacatcgttagcatggggggtcttccatttagtgggcacaccaatacacacatctgcatcgtccatctcatccaaatcctcgtctctcaggccttcctccgcttcatctgcgctctcatcggacacagtcgtaagtgccaacggattgatatcttgtccggtcttcaatgcgtcctgaaagccatcgccatcaccaaagagtaggctttctagcctcttctcagtctcgtctttctcaagaacttgctcctcgggagcattcttctttttttgcccttcattaggcattgtgccgtctgatattaaagcgagtttgtggtatgtccaatcagagacccgccgagaacaacaacagagcaaaatcaaatggtttatggcattaacggaacagggttcatacaaaataatttttctttcaacacggcagattatggcggtgtatacggcggtaatcctaccatcagagtatgccaagccgggtgacctagcaggttagcggaaaaatggcaaaaaaagatcaaaaacatacaacagctgggattcacatgtggtcacccaccatactactaaccagccggcgtgtggcttaagtacggctgagcggacgggaagccctgttttccacaccctatggtcgtatgtgactgttatcacaaggcaaccaacctatcaacaactagcaattctggagccaggcaggttaagaaccctgttaattatttatatcataatgtgacagttgctggcacttcgagaaatatgttttcgtatacgcagtgatataagtaaactagaccggcaaccctaacataattgcgagccgtcatctccaaacgccaacgcagaacgttataaaacaaatcattacatatctttcggttgcacattgatttctgtagacaaagtcgtgtcatcgttttcgcgtgcgctactggaggttggcgttgatgcagagtccagagaacccaccggatctcttttagcagcattcagatggtccagagcttccttaaactgcacggggctatgtaacgttctttcgtcacttcctagcgacccatcacggtcaaatgtatcatcatcctccaatccggccagcaatgcatgccggtcgtcggcgtcgttgtcgcttgcggtatcggcactctcgaggtcgtgagacacggagagtggcttctttatgaaaatatcgataatataatactgaatagcattcattatgacggggaagatgagcatcacgaagatgatctggatggcggtgttgccttcagtccatcgcaaagcccagtcgcctaccttaacgataagcggcaccatctggatgaggaagaagacacaaattttcattcccagaagacccagaaagtagatcatggattgcttaaaccaccagctgacacgggggggatcgtcataattcccagattcgatcgattccggaggatttgcgaggggggtgtatttcgccaagcggttcaagacatggagtataacgatcaagatagggatacctagggtggtctgatggtcaaatgttagcagtcgctctctgaatgattagtatctgagggtagaagaaactcacatcgatgccaagatttagcaagtaaaacgagcatgggtttggcttgtatttgcttgtgatctcaaactgtccggcagagaacatggacatcaaaaggttaaagagatgtagcatagatgaaccgaaaacttgcttcgaggcatcgaacgcccagaccttcaccgggcgttgagggcgttctcttcatcgcttgtagacaagcgacaataacgcgagcattcccagggcggctgcacgacgagcgaaaacggcccaagtagcccgcattctccattgtcttcgtcatgtcccgaagaactggaactcgttggggagtacgatgcggccggtgttgacaaagatggtgatggtgttgtaatgacgccggtcggagagaccagagcatttaccccgatgtcgagggcggatacgaggatcgccgcagaaaacaacgggatggatgcataagccatagtgatcaagtccacccaagccctttagagcgatggttgaggtgcagtgggcgatatcgtgattcaagatggcggcagtcgtgtagcgtcttcaacttggtacgctggcagcgcataggtctaggaacaacgcaaggggcacaagtttgtatcgcgtgttcaaagcaaagcaagatgggttgacagagatgaatgaaaggctctctcgccggcaaggagcctgaaaagttataaaattctatcggatggggttgactctgcagtcagtattgcttcacagcccccgcagcctgcgccctgctccccgtggaccacttacgtctaaacagagttagcgcgcctagaccctggcccgcaccggtgcctcaggttagcgtcgtgatggggatgctaactcgtagtataacgcaatgtgcatttgtatttgagctcgctgtgaattgggcaaagtcaagtctagtagtcgcttggtctgtatcgatgcacaacaccccctgcaagtcaatctgaagttctttatgtcatagaaggtctgatagcctatagtcgaagtcgctcgaatttctcgaatatgcatgcgaagaccacccatgttgttgcagatgacttggcgataatgctgtccgtcaatgaaatctccctgcagaagcattcgcttggtgggcaactgaccgctgtagatcatgatgcttaagctgtgggcctgagcggctggaccgtcaactgcttcggtacgatcatgcagtgccgcgaagtggatacagttgagatcaagaactcatgatcccaggcggctagaatgcactacaccctaatcggcactgtaggaataagcttaaggtatcgctacgtatacagttcatcaaagaccccagtgtcttctataaccctgtacccttggttcatcgtgccgtcacttctgtcctgcagtgagcttaggtctttcttaggtttgccatgcctttaaatggccggcagttgatatggtgatattgataacagtagctgagcggtgtaacaatcctgatccagcttgagaaaaaactcccatcctgtgcctggagcaaaagccagggaggcgtgtcattctacctaccagccctcaaaacccatgaacaagagccgtgaaacccatatgagtgagaagcaaaaattgaacgccgaaaaccccgcagccaaccgaacatagtgcgcgcatcctcatgtcttgcagcgcgcagagaacatgtagaataagcgattaaaagaaaatcgtcacgtcattctataccatgttgctgtttaagacgttccaaattctcttgcctttccgccaagtcttccttcgacttgagcatcttttccggctggtgatataagactgggaatatatggcgagtcagcaagcgatcttcgagcctcatgttccaacaatgatcatctcaaacgtaccgacaagatatctgttctggaagttgaatccattgagcttatcgcatgcctgtttggcgtcgtgaacgtcttcatagaccaccaatgcagtgccctttgagttgttcgcaatcccttgtcgtatttgtctaaagacgaaagagaccatccacacatggcaagaaaaaaggatgt

SEQ ID NO: 5180 - DNA, 2976 bp, Emericella nidulans
tgtactgtagggctccagggtcttgttacacaacctgtcgctgtgcaatcaccttcccctcttttcacgagcctggctccttatatcttcgcagtactcctcctgaagctgcctcttaactatcacccatgaacatcatggcacctccatacatactatcagccatcgcaaaggccatcctgatcaactttattgaaggcggcgtcattggcttctcccctcggggatccattgttcgacctctcgcgcttgctctgatcgtgctgttggctgcctcagttcactgcaccatcattccctgggagcagcatcgctctttggctgggattctttcgtgcaacagcatcttcattgttgcgcacgcaccagacctcttcttccacagcggcattacctataatgagcattacgactggctctgtaagaccaagggttatcatccgccgtttaccctgcttcagcgcgccaactgggcctttgcaatgatcaggaacggtcgccgcgttgggacgaaatggcaggtcgttcccatccatccattcgatcctgatagaccggactatatccctacccgcacaaccttccttgttcatcgtctcctgacgatttttctctggtgcatagtcctgtacttcttaggtggccctccgtttcactccgcgtttccgtcgtatattaccaaggagcgtcaagagctcctgctggacgaatataatttggccctatctgcatttcttccacgattctggctttctatgtcctttattctcggcctttccacacttcaacgggtaagttataaccttttctccgtgatttcagtctcgcttcgactatcagatccggaggattggccacctatgaaaggtcccttcttaggaacgtggagtgtccgtcggttctgggggtaagtatgctccatcttctatcaaacccataataactggacaggaatacatggcaccaaatattccgctgcgccttttctctcaacgctgacttcataaccttctctgtcctccatttacctccgggaacaatattcgctagatacagccgcttcttcttcagcttcttgttttcgggcgtcctccacctctttttcgatgaggcagccggcgtgcctcgggataaaggtggcgcgatactgttctacactctgcaacctgtagcctttgcgattgaggactttgcgcagtggatgtcaacacaatatggcattctaaccgaggacctggtgctcagaacactgattggatacacttgggtatgcatttggtgtacaattacctggcccatctgggtcttccctctgatgagggagcctgtggaggggcagcggcttgtgcagttcttgcaattgccatttgcttattgaccgctgtgtgaggggaagagggttaataagggctagggcccgctcgtttactaatggggttccaagaacctattattatagagaaatgtttatctttgataattacaggttagtttttggattcctttcctctgctagtggggtagcagggtagaaattgtcctacagaagcgcagctgccgcaatacaacatgtgatactggacatgatcacagcacccatccatccgaccttgagaaatttcactagctgaaaagcctgcacgtgaaagtgcaatctcaaagcttcgtagtcataaacggtactcggacattggcagctccaggctttccggcgacctgctgtttcatgaaggccgagaagaaccgcgccatctcctcgtagtcgtccatatctcccacccaactaacatactggtcaggacgaatgatcacactagccccgttgctggggtcgatgccgtaatttgcatatgcttgcccatggccctcatgataagaatcatcatccacatacactttccaatagtcccagcccatgtcgccatgaatgggatgaaacgctccggggagaaccaaaagttcaatctcagtccggggtccagcgtggactgtcagaacctctatcatgctgtcaattggctggcctggtggcgtatattgtcgaatgaatgagtctgggtctcccagtttctggccgagctgttggaagcgctgcatgttgcgaggatctgtgagtcgtccggggaaaacaatcactcgccagcgcccattgctcttcaggagctcttgcagatgccacgggcgtgcgtcagcctggttcagcactttgaagctgggcatccgtttgccaacgtcgatttttgtggccagctgtggtttgctggtaacccggcatttgtattcatcatttgattctgcgatcttgctgccctttgcaacaagcagactggcatcataatttaccgctgtatatgacgttggtcagtgtcagcaattgcgagagccagaacacggatagaataagggaattttacctatgccacttgcaaattcattccctttctcaaacgtcgccttgaactcctccatgctgactccctcttcatcgatgatatctctggctggccgtcctgaaaaaagtcgagaaaagcggtgatcaaaagcgatgagctgttgagcaatgccccttctctctgactcgtacgtcttcaaaattgctgggtcgcagtatcctttgaccacatgggctagcttccatcctagattgtatgctatttccatatattagtcttggagctggggacggcaacacgaagggcaggcaaaactcactgtcttgcatactgacattcatgccctgtccagccttgggggaatgagtgtgaaccgcatcaccggccaggaaaacacggtcatgcagcgagaaatgatctccgacgcgctggccgatctgatacgctgtccaccagtcacagtacgaataatccagcttataggggtggataatgcgctgggccgactgcaggatgatgtccggtgtgatccatgatcggtccgccttttcgccattcttgttatagcttgttgcctgtagct

SEQ ID NO: 5181 - DNA, 5465 bp, Emericella nidulans
gcttcgccatgggggttgtgtggatctgtcgaccatggctctccttgttgtttaaggtctttgttttctatgttttctgtcttttagaaaagagcgagtgccctgcggtttgaggtcctatatttgatgcttctcatacgcggggtccgggtaacgtttacctcggtcgttgggatgagtctatccctcccgtcattgcatgcatttcatggacaaaagcgtttttttttttttatctttgaaagcatcatatttagctcaaataaaaatgtgtagctacagcttgggctctatatactcccacgtgcaatcgtcccccaactcctcatccagcccaaactgcttcttcagctgcagggcaaccttgtagtattgttgatgccttgccaccacgctgcccgccgtcttcaactggtctcgcccgacctgatgcggtgggcagcatcaggcccatcggcgacgcggacgaaccgggcgtaggtccagatctcgggcaaggggtatgctgggtcaaaccctgcccccgtagagctgcatgcattcgtcaacaatcttggccactgcgataggcaccaggatcttgctttgtgcgatcacgtatcggccgcttttgttgcccagagcgtccatcgtgtcggctgcattgaacacgaccaggcgcagggcatccaatttcagtcgcatctgcgcgatccgctcgatattactgtcaaattgccagatgagcttgcctcgcggtttcttccgctcatctgttgcacggactagcgcgtaatcgaacgccagctcggcttgcccgatcagtcgcatacagtggtgaatgcgtcctggccctagccggccttgagcgatctcaaacgcccccccctcgccgagaaccacattcgagacgggaatgcgcacattgtcatagacgtactctccatggctctcgggtgcgcagtcgtggcccatgattgacagattctgtcgcatccggaagccgggcgtgtcactcgggatcaggagcatagaatggcgccgccgcgggttagggttgtttgggtcggtgcatcccatcaggatatacaacttcacctcaggattccatttggtggcgaagagtttgcgcccgttgatcatatactcgtccccctcgcggcggatgctgatagcgatcttggtcgcgtccgacgaggccacatctggctccgtcatcgagtaagcggacgcgaattcacctcgaagcagcggcttgagccactgctctttctgctgctcattacagtacttggccagcaactcaatgttcccggtctcgggcgcgtggcagttcatcgtctggcccgcccagtacaccttccccatgatctcggcacagcacgcctactctaggttcgtgaggccaggggattcttcaaactccttcggcagaaaaagattaaatagtccacgttgtttggcttcttcacgtagatgtcgcatcagtggtggcatcttccagcggtctttggccagctgagctttcatgatcccctgtgcggggatacatctcgtctcgacccactcatgcactgcctggattttctcgatggcgatcgggcggagttttgtgattgtccatgctgggtaattgctgaacggaagcttcgaggtgtccggtttgatctgggtcattgttgatgattgcaccgagcgggttggccaacattgggaaagaatcgaaaattagagggcgctgcgggtattggtagcctgtatctgccgcatatatgatgtatctagcaatatattcacaccaagaattgatcgctcatctgtacaaacctttgtcctgcttttgagaaacgaactcgcgatcaccgtaatggattcacagtatgcgccggcctggcaaagggcgagtaacctctcctggcagtgcaagacccaggccactaacaagccgctcacagttcctcgacgagtttggggagtctccagctgtttatggctcacttcccgagctacgaagcagctggggatgttaatcagctcctcacctcgattaacaccgcattgtgctggttaaatatatacagggccgtcctctcctcagcagaaacgccaggaaaggttggatccttgtatatgcgcccatccagatactccatgatatagaacggcgtgccgataaccccctcgtcgacgcaaagacagaataccctgggaacaggaagttcggtttgctcgagagcgttgaggacttcacgctctaccttgtgggcggactgtgacaccagcttgcccgggggcttcttgcgcatcacatattttgcgccatcgaaagctgtaatctggtaggttggcttggattggccatacccaaactgcaacttctgtcagtatcattcatcttctgtttacgaaaatggataaatggttcgtacctggctcatcgtgatcggggtctggatcaccgggacatgagtcgcgatgtaatttcccagtgttgcgacatctacggctgatgaagtgccacaacctagcagaacaagagttctcgactcctttcatcacctagcgaatgaatggatggagtcgtagcgcttagctttacggccggcgtggatatcggccggatatcgttttcctgctactaggggattcacagttactgtcggacgaatcatgaatgatcaacaacgtattgctctgaagccgaggaatactttactctaggtagcatctaggtaaaggagctaggaataatattggcagcgcggaagcgattgaaggcaacatgccaggctccctggacgtcggtctcttccttcgcgctcccccacgcggcatgcatcttggtcagatcgacctgccggtcaaagtcgaactggttcatgagaaagttggagacgatcgtcaggctcttgtcatttcccaccctgccgcctttgagcccatacttcttctccatctcaaagcatttccccttgttctcctggatgtatacgctgggatccgggcccggtccgtctgtaggcgccactccctttagcccaaagtactctcagatgatgggccacttgaccgaccaggtggaccactgtgcgttgtcggccacgttgtaccactcccctgcgctccactctggatgcaggctggcgtagacagcgaaccggccgataatatcttggttactgtcgttgctcttgatagtccagctcttcgtgccggggaagacaacctctgcacctggtccattgatttcacggtagagactgaggtagagggcaagccattgagccaggcagtaggcgttgttgttggggacaaagccaacgacgatgtcaggaataacatcacaccatttccacgctttgccggcggaaaggcgtttgagaagcttgacctgggggtagtaaaacagcttcgacttgaacggctcggggatggcaggtagagactctgtcaagggaagcttgtccgcaaaggggaattcgtcgagaagatggactccgtaggtcttttggaggtatgtcagcgacagtaggtcaccgtcaaggaaaggaatccacttgccttgactccagttggcaacaccacaaatgcaaacttatcgctcaagttgtctactgcggtgacggctctccgtagtagatcaacattgattcggatctcagtctcattatcggagttgtagatgtacgcaaagaaatagacatggctaacggtgtcgatctgggggacttgattccgcatgcacttttccaatgcggcctgttcgccagacaggagatccaacccggaaacaatattcagtttcttcgacgccggccacccagatttctgtgcggcaagaggccgattcgtcaatgcagtaactctgtcaaaggcgtctggggttggatagtcgttgagcaacgcattgacgactccccagccggtgatgccggacgcgccgaagactagggcatgatctcccatgatgattaatcaagatacttccttactgaaacaatctggagacgaggggcagctccttcatttatggatctccaactccatttcccctcctgtcgatcgtttttccgccggctgtgcttaaccgatcccgagcacaaccatatcctgggagggctttgtgtccacgcattaggagggagtaggaatgtttagtcaaacagaagcagtatccaggacccatttttcaatgattaatgtctcaatgcaattgttgacattggtgatatgcaaggtgtttgtgggaatccagtcgttgcggctatatataaattgcaagctgtataccctctccagcaaccagtatgggcacaagaggggctggcgatatccaccgccattcttccccaatatactgcttagcaacattatcaactcctgttatttagacctagatgaatggtaaaagtaagcccaaaaaaaaaggaaataaattatattaaaatatgaatgaaaaaccaagcattgttgtgaaagagcctaggtctaaacgcggtaaaagccgcacggaggcatccattgcactagcataagaatgataaatgctaatatacttccagcatatgcgtggcgcattggtatctttccaaccggcgatcctcgtatttcttacttggcgggacgatgttacgtagttatctcccgagtattcccaggatgttcccaggatactccccagagtagggtcagggcatacccagttccccagagccttatttctccatgcgcgctcagcagtctcggcctgcgcttccataggcctggtttctctgcctcatatcagggcaaccaaccacgccctgggcgaagacaggggtctggttcagcctcgccgtcacactgcgcacactccaacagggcaatctctggttggtgcttggctgataccctcttcatagtctgcttgctctggtcatgtcaggctgcgtctacgaggggtataagaaagggtacacatctcaagccgtccttcatcctccacaagacacccttctacgcactgatccactcgttctcagagtaacagagcataccctatccagtctatcctcagcacaatggtccgacttctgcctctcactctcaccctcggcgcctctgcactggcaaccgagcgcgttcaactcctttcccgccaggtaagcgactgctcgcaggtaggctatgtcgactgcgggagtaaatgcatgccacctggcaacagctgttgcggggatggcatctactgtcgaccaggcacctactgcgtcgttaacggctgctgcccgatcggtgaagtttgcaccggacctgggggcaccattaccgaatggttcgacgtcactactacagcgaccctgaccggcactaccaccgttaccgacgatgttgagcccactgaagcgccgccgagagactccactaacactgccacctcgtctaccagctcacggccgggtattcccacgtcgagcgagtcccagccgacccagtccccgaccgag

SEQ ID NO: 5182 - DNA, 3373 bp, Emericella nidulans
cctccctcatccaaatatccagatatacacaaaaaaggatgtaacacgaaatatttatcttaggtttgagcttttctttcacaacagataattctttactagagagaattgttgtcgtgccacttgacttttgagacttatagtaaaattcccgcttaatggtcaagatagctgaagagcgttatgtgatccccagccttgatcgccattcaatcccgatagctcatactgagaaactcattggcagcatcgggtcagtcgcaaaataggtcatacccagcccaacgcagcagatacaattcgtaggcgatatgcctcattgcgccccctaaaataaaacaaagagcggtaaaagcccagccactcgaaagaatcatctgcgcccaattacggagagacgatttcacttgcctctagatgtgccatcactcgactcaagggagaggtattgacaggtgagacctaactcaaaagaggatacacttgtttattgcggagtgatagaatacccttacagcagcaggaatagacctctgtcacttggtttgtcgtgtctcataatacttgacttttaaagccccaagcctactgacgcctgggcaggctaactgactgctcggtagttcctaacagcgcttaatcaggagtagtagatcataaaaaagaaacgattcctggaatattttctgtagctgttagccgggagcagcagatcttgacgcttcagcccttccgttgaataacggcccttggcagtacaatactgcaataaacccaacaaaaatatgtctgcctggaaagctcgcccgcatcacaatagggctgaaaacaagctagtgagattggtgacgggccctggccattccagggttctcaggtgtcgaaccgtctccactaaatatggaccctcaactctgggcgtacgtcaaggccgccatccccgggacatttgcatcttatatttaaaacggctggtcgtcgatttctaccactgtacagatcaaacaaaaaatagaaggcacagaatggaccagacgtacaaccccacgccttcggcacccgttatccgcctcatggtcctcgagaccgacaagcctcatccagacacacactccgagcgcggcaccttcggcaagatcgttcacgagcattttgctaccgccgggcgcgcccacaagccaccggtaggagtcgagacagatcaggtcttcgttgtatctgagcaaggcgccggattccaagtctggaagagtttgacagcttcgacgggctgctcatcactggaagcctgtacgacgctcacggtgatgacgagtggatcctgcagctgctggaacttctcaaaaccctctggatcaaacgagcagattttcgctttctgggcgtctgctttggtcaccagctccttgcccgtttgttgggaggttcgattgggccggcgccgtctcaggactgggagctcgggcactgtcgcatcgcgctcacgcctgttgggcagcgtctcttccgcacgcgtggggacgataaccatgtctacttgcaccagatgcaccaggatcaagtaaagattgcgccaaccgcggcgtccgcaggaccagacatgttgccgcaggatacagagattgcagtctggggccacactgaccatacgcctgttcaggggctctatatcccaaaccgcctattcaccacacaggcgcatctcgcatttgacgaggatatggtcaagcggcagatccagattcgggtggagaagggcgcaatctctgatctcgaacacgcggatcgggctgctgagacggctgatctggagcatgatggggttgaggttgcaaaggctatactcaggttattcatggatgatgaggagggacagtgaagggatgtgtatgtgaaagtgctagagaaagggcaggcaaaatttttgatactcttttacaacaatatatcaaatcatatcacaataatacaactcattcctgatagtttaccagcgccaccaacagtgcatcatcagttgaagagcaaggataaatcccgcagtactattataaacctaacctatgcaaaacgttcgctttttactagcattcaagcaagatttctcttaaccaatacgaacaaataaccacaattaccactcatttccagacatcatacggcgaacacttactgttgtattccctatagcatgaaacagtattatacatgatagaatcccgcccccttcagaccttaccaaattcatcaatgcgcccaatcctagaaatctgaatctcaagccggaacccatatcttaaccttttccgtgcctgtcatgacaagcatctatgtcaggatagctgtatatgtcttttttcaaaggcatacatgaaagtggactgcggagaatgagcatattcctactcatccagctgaaacccctcctaataaatgattatatccttatcaatcgccataacctgttttactttcgcgtggcaattgatcttgctacaagacaagcgtatgcccttttctgcagaaacagcagtgctcacaagtacctgcccgatggggggagggaaaccatcgaacgcatttgcgcaaagaattgttcaccacattgttcaggaagctggaagaagcgacatgtagccatagcccagaaagctgaagattccatgacagcccccttgctcacggattacctcactccacaatcctaggctctgaccccgcgagcctggacaggtccatggcaggagcatcctaaagacgtgcaaggagcctttaacactccaccataaacttttgacatttcgattcgttgttattacatggcctgttgctccctgctcaaagattacccgagcatgtcacggcagagtcggcagcaaacaccacttgggcaagggaggattcaggaaactttcctccttggaccagcatctagaggactttggaacctgcgatgatagcgtataaaccattgatatccagcagtcaaggggttggcttttcttatacaaggatagggtatagttagtgattggtggtggcgttagtcgcactgaatgtacgatacttcgtagatgtgccgggccagcgtccaacagcatatactcaattctcttcagtatatatggttggcagatctatgatagccaaattacaactaagctctctgtaatctttagtagccgaaaagtcgaaccactcacggagaaggatttaattgcgaataatattcagccagataaccatatctatacatccgggcttagaaccaccccgtgtcgtcagtggggctgaatctatgtcttttaatttggttggccctgtgcgccttctctgttatactactaccggttggaataaaatgaacatgaac

SEQ ID NO: 5183 - DNA, 4469 bp, Emericella nidulans
tcccttctccacagatacccaaggattgtgatgttcttaagggcttcccatcgcgacaatgcgatgaatgttcaaagctcatgcagcacaaaggcagacctaaacaagaatatcagcagcagacattacccttggaaattgtcgcgccttgtgttgctactggttgctttctttagcactggggcaactctgggatggctagtagtgcgtggtcgtttttcggcggagacgttgataatttgagaaattatcatagttggaataaatggagattatattcttaacaaatgcagctgtgtcatctctttatctgagctgagacgaagcattatataatgagggtttcattactgggcttggtcaacaaggcaggtaagcctgcagtggaggccatatatcaagctcatctgcgctgtctccatgtcccgtcatcaaaggaatcagatatacggtctacaacgtcgtccaaaatgatcagctgagcggccgagttaacgacagttcggcttctgccggatcgctggtcttgtcatggcgtccggcgtttcaggctgcgatttcatttcgctagggccacacctaatcaaccaaatgggtcccacgagaacagtttaagatgagttaatctatttagattgcagggaccaggcttcagccatgctgacggcctgacattctccggacgaggcgtcgaatgacactctggattactatttaatcctcctccctgcctttctttcatcttgttccatcgctaccctctgcgagacagcttccacttgtctagggtctgagatccagacgtccattcattatcgttatcactactgagctctgtgctagttgcacgtcctttcatttataatcgcttttcctgcgctatctgaaacggcatcgttctcgttctttcctactcttcgagcacaagaccatgaagtaccagcatttctcttctatagccctcgctgccttgagcgcgagcacttttgtgtctgcggcccctctcgcacctgaggagaatggatcttgtccggccgggtactctccgagcgtgtactatatcacggtcacagcggagccgtcttctaccgttcgaccaacttcttcagctccaatttcttcaactccaacgtcgacctcaacctcaacctcgacttcggagacatccctgaccacgctcgcatctacctctacgggagatgtgactgtaacctcgagctctaccgcaggtctcatcgagaccatcccagctgtagtcgtcaatgcagctactagcactactagcgagtctgcaacttcaacctcagctctgtccatttcggagactgctccaactcaagtagccgtcgcccggcccagcactacgaccgcagccgagaaaacttccagcacatctacttcttcctcatccagctccacaagtacaaactcaggcgccacgactggcgaagcaaccttttacggcggcaacctctccggcggcacctgctcgttcacggactacactcttccctcgcatctctccggtgtcgccttctccggacaggcctgggacaacgcagccgaatgcggcgcctgtattgctgtcaccgggccaaacggaaatacagtcaaggttatggtacgcatccctgagctcagctttaataaccaatatgctaacaagccataggttgtcgacaaatgtcccgaatgcgcccaaacccaccttgacctcttcgaatcagccttcactaccctcgcttccgcctcggaaggccaaattccgatctcatactccatcaccccttgcggaataacctccccactcatcctgcgtaacaagtctggcacatcagcatactggttttcgatgcaggtggtcaacgcaaacggggcggtcaagtcgcttgaagtaagcaccgataacggaagcacatggcaagagaccacgcggagcgattacaacttctttgagaacagcagtgggtttggaaccgacacggtcgatgttcgggttaccggggttgatgggggcgttatcactgtaaagaatgtgagcgtggcttctggggagagtgtgacggctgatggaaacttctgatctccaaatgaggcagacttctgcggatggggtcgaccattttgacttctagcagaggatgcagttggattatcctctgagttctctattcgttacttcctataatgtttatcgtcgctaccgacaagcctttatgtatatatttgcttctactccgacccattatacgatatttttggatataagaactgacatattgccattcgattgtggcctagccaatacatgcttagacaattccgcactttgggctaaggttacctctacaaatagacacctgatgataaaaaactgcattctgttaaacgcacagtagactagctccatagcctcagtacagaccgcaaactgtagactgcaaactaacaactcccgaacctatttcgccaacccatccttggatcgaataacgtaccccacagagccctagaacaggaacaaagatcaaaaggaaagacaagatgaactaacatgagtaagggggataaagatggacaccgggcttggctggccacatgtcgccgttactacggtataacgaggaaaaacaaaccaaacgacactaacgcagagacacaaagacaataaccgaaccggacggaggaagattagacatgccaggcgtcccctaaccagatgagctgagggtgaaaatgatgagagcggagagccctgctctcctcttggcagatggagcatgtgagggcactatgtatatggcctggagaggaaacgccggttgtgtactgtagagcggaaaaagcggcgaattggatttatacctgtgtctgatcaacgtcgagcggctctagctcctttgcttcttcgtagtcgtcgaattcgagtcgtgcgtcgcgacatcgttgcagccacttcagcgcgatatcaccgcggcggttgacctcgacctttaactttgagttttgcgcactgatttcgttgatagcgtgacttgtcgtcatattgctctgctcccatcgttcgctcatctgcctcttttcctcatgcagttggttgatgtactcaatggcacgttgcaagatcgcgcctttgtttttgtcgcaattaggtacgaggcgagcgatctggttgataccctcgttgattgcctcacggcggcgacgttccactgggacgacgttagtatatactggacgcggatagacctgagcacgtgccttctttatggttattttttctgacttggtgccattcaggagaaccgacagtcggtttttggttcatgctctgcgcctcgcgagctgcgtaaactgcggcagcagtagaattgtgattctggccgatattctggccgatatcgtctccaaacgtcaggccatgggccaggttgttatcgaatgcgttctccggaggcggcggatacttgttctgaggattatgggctgctagtgctgccttggccgtagtaagggcattttcatcggtgatcccgttctgggtcccaacatgctgaaggatttgttggtcaatattcagctctgatgctgaatttggtaaaccatggtcataagaggcgagggcactgtgagtgaagttctgggaatcagcgcccgggagactgccattactcccatgagaagaccggttgaggcgttgagcatctgggccgccgctgtcactgctctcccgcttccgcttcaccatactgccttctgaggcgccaagttgttgtgtatcagccatggtgagtggtctaggcgcgactattagtcacgttcaattgcatagagcggcgatgcatactaccaagtgggaatatcaaacaaagtcctgccgtaaatagcaagtcccaccgtctgtgaaaggcattgttagtgaaatggcgcaagagacgatctgaacccagaaggcgagtgcaaaaagatgatataagcaaggcgcattatgtagcaagtcaagtcaatctgagatgtaaatgtaacaacaccccgatggtttcgtggtggggatcaagttctctcatggcaagggagacgcgttgtgttggctgacgcgcccgctccgctgctggtaacatgcaagatcaacgatctctgagaggcaaatgatggcaaaacaaatcaccatcgacagatttacttaggcacagaagcagtacggtgaaatgataaagatgtccacgacaaagaccgcatgggcggcaagtcgactcatgacgtctcggcctcagcgaccgcggaaccgcgagaaaagacttcagccaccctgccgggtcagtgcggggaagagaaacgatgatgcggcctcggaagaagcagcaacgcgatacagcatcaactcagggagtgggtcgtaaaagactagcaatcagacgggagaaagcactcacttacctttgggtttctggataccgaagctggatatg

SEQ ID NO: 5184 - DNA, 6137 bp, Emericella nidulans
  unsure (1)..(6137): unsure at all n locations
cgcgcccgtagaccatcccatgagacctgtaggtcattgtatcgacgtggtgcgcagcactgggaaacggacatttgtagagcgcttgatgtgtcaggtgcaaaagtcgaattgtaagtgaccagttcgaggtatggcctaaatagtctgttggacgggcttagctcgcgactctataacttcaggagggttcaagccttacgcggtcgtccggccgagtcggtgatgtactttggaggtccgcaggaaaggggattaaccattgtgctgctattgtcatcttcaacattgccgtgactctcattattataagcaagcccagccccggacgaggctgcactcggtgtgctccgtttggccactggggtagaagtcgtggtcagggctgccagctgctgctggagtgcacggttctcctcctccagttctaatgtccgtcgcttcagactcgaaaaatgttttttggtaatgtgaactttggtttcctctccctcaaacttgcatctcaccttgcgctgtctacagttgctgcagggacagtcgccggtgcacttgatcttatgctggcgacatcgcgagcaggcgttgaccaccctgcgcttctcggggtttgtggaggcacttcccatgacagatgtatgatggcttctttctgtatgccactgcggtggtttgtgtgagcagttgatattctattagtgatctcatgtatctagtatctacagttccacgttatcttccccgcattttgatgcgataagctgataacgatcctatattcttattggcggattcgaccgaagtcggatccctatccgatcagcactttggagagcgcagggcacgagagtacgaataagatgctatttttctttgctgcgtggtgttgcgaagacctacatctctgttactctatcaccgtggccgcctcccagaaaagatcaccatctagcaaattggccaggctttgcgcatatatgctgtcgtcaactccagatgtatcaaggttgttgccatgcgtatccagtagacaatcctggtctccaagcccattcatgagcacctgcgcctcttgaagcgtggagacgtctagacccaatccatcactctcaagctgaacctgtagttcattcaggggcggttgcgccccaaagtcaggctgcgaagttgaaggttgttgcgtggaagggtccaatagctcaacgagagactgaagatatgtagcgtatagaattacagtatcttgaggtgactgcacacactctcctacccggtgagctatgctacgaatcagacagaccgcggtgtgttggaaggctggcccgagaatgccgttttcgggaaggcacagaagaagacataggaataatgccgcgctgggggctagcagtagaatggcatcaggggctcgtctaaggtcatcgagcggaaagtcgagcagatggcgcaacgtaccgaatgcaccctcaatactactgaggagcccaggtagttctggagacaagacgttttggatcgtccgaatgccgagctgcaagcactgcgaagctacagacgacagcatagcttggcggagtataccagaagcgatgttgagtcggacactatggtcccatacttgaaaaagcgtatccaagtgatgttgatcgggatacaacaaaggatcacgattgcctgtctccaaatgcttcttccacttcaacctccaggcattgatatccgtctccatcaggtctacgaggcaaggcagcatctccgctgatgccttttgtactagcgcgcgcagtttgccctggactcgacgcaggtcggcgctagaacaggccattatatccaatggcattgcgtattgcattcgctgccacgtatctggattgccgatcaagaagctttcctcatctgtttgacacagagatggtcgtcgcatgaagaatagactttgctgccggtcctgccggaataacgccagccatgtccttctgcggcgcgctgcctgcaaatcatccccgctgtactgctccggctccatgtcgtgaaggacgcgcagggcataaccggtgtgaaggtaggagatgtcatcgtcggcatccttccagcaaaccagcaagtacaacgcttgcatggtttcgatagttctatcgccctccgcaagtaacttgactactaggttccgagccaggctgcagagtcgggtctggaggaaaggatctggcgccgatactagaccgacatcaacagcgttggtaaatttggaggagcagaagagaattgttgcaaagagcaaggggctccgctgtcggacattgtcgtgggtgtcgacgcgggagtcaagaatatattcccacttggcattaagctgaagcaggaagaaatcaaacagtgctctcgaagactgcagggcgaggatacccccttcgatcgggtcttggatggtctgcccaatggtcatcgatgacgagtagctcggcattttcaccgcgcctcgtgaggcctcattctcactgcttttttgaccggggtcgagcgtgagagggcgtaaaagagaggaaagcattaaggaattccgctcttgcacctgcctttgccattgcgattgggattcatgtctctgggtgttgttcaaggctgtaggggggtccgggttgcgtcgagtgccgaacaaccgactatcctgcgatgtgacaaaactgtatggtgaacctctcttgcctctcaaagaggccagcgcgacgacaatccttgcacgaatcgcattcgtaattaggggtcgttctggggttggcggctgttgttcgctggtttcaatcggagctgctctctggtcggtagatgaaggggtttgcggcaaatcaatccctccgttggtgatcggaaagctggtggcctgaggacaagcaagtccttctacctgagtacggctgtcatcgtgcagagggctattctcgcgtcttgccgggtgggcgtacggatgggatcttaccctcgccctcttgggctgagtgaagacgcagccggtatcgtgtgctatacaccggttgcaacggtccaggcggtgcgagactaggcagcgaaccttggcttgtcggcattgcagacacgcactggatcaatcgacacgtcagatacatacttggtgagggggcaaagcaaagcaacgcgcacggaggcgcggtggaggtcggatggggtagtcgtggacggcgccatcttgacttgttatttctcgacgggccgagacgaagactggagagaagaggagcatgcagcagaagacccggaatagaaggcgaggatgggagatttcctacgcgcagctcggatggccatccgatcatgcatttttcgggccgagacaagacgtggagtagagtagctatattcggtccaactgctatacgatacaagactatggagataagcccagagaatcatatatacccttgcaagcaactgtcgccatcgacataatcacaatatccctgacaaagcatctcaatcatctcagtcggattatctcattacagaaatgcccggccgcctcgaaggacatatcgcgctcatctccgggtcaagccaagggttcggacggggtatcttcgagacattccttcgcgagggagccctggtgctaggcctggacctgcaagccatcgacggtcaagtagagggctttcctgagaaccgcgcctaccagatcacagccaatgtcgccgaggaggagacttggaagagagcggtaactggccttgacccgtgtggttgtgcagctctaactatgtataccagctggaaaccagtatcgcaagattcgggaaagcgccgtcgatcgtccatcacaatgctggctggccgtacccgaacaaatctggtctagatgtgacagttgaagaatttgaccgtctgtttaatgtcaacgtgcgcagtatctacctggcctcgaaagtcctcgtgccggaaatgaagaagaatggtcccgggtcgacgattgtaatctcgagcgagaacgccatccggccaggagccacgcagacctggtacaacgcaactaaggccggtgtctcgtcagccaccaagtcgatggccttggagttcgcccgagaccagctgcgcttcaacaccatctgccctacgtccgggaacacgccgctgttgaacaagtttgccggtattagcgatgggcctgtaccaccggagattatcaaggccaagtgcgaggcaatccctataggacgacttgttgagccgtcagatgtcgccaacgtggcacttttccttgcggagcccgcgagctcaatcatcagcggtgttgagattctggtagacggtgcacgatgcgtgtagattggtaatgctaatatgccatactaatatgccattttgagcgggagatatgacattatattagaatattctgcggncgaaggaaagtatcctacaatatttcgcaatactacgcactaacgaaaagaaaaagaagaagagtctcttatgataattcattccttcatagggtataaagtacatgatcagtcgcgaaacgaattcatgaacctccatgaatcatagtgagaaatcccgttcccacataacgtgttattatatgcttagttcttagcggcctctgtgatattgtcagtaatcaaccatctatctttggaggcaaagtggaatgacccacccttgtggacatcggccttagcatcatgggacttctcgtccttcttgtcaacgacggcgtccttggcggcagtggcacgagaagtgagggaagcgtcggagtccttagcgacgttcttgttggtctccttggaggcagtggcaccggcgccctggacggactcggaaacgtagttgacggcgttctaggcagtgttaagatgatgtctttaaaaggcccaaacgaaaacagcgggaatgctcaccttaacagtctccattgcgattgtttatatgagatttgatatggttattgagaagtgtttgtgagaacttggggttgtagtgaatagaattatattgtgttttgctgtgttgaaaaaaatgtctgggtgggaatgcggctgctacttatgctgaacagaatcgatggactcgtcattgcagcgtcattgtgatatctctctggtctgctgccacaagccttcaggaccggttccagggtctggcctttagccagcaatagggtccaggccggccaggtccaggtccagtctaccgaggcagtcgagttcgtcataagcatgggcgcctacgtcatggcttatcgggccggtttatccacttctgcaaggcctttcctgtcattaccacttgattaagagctgcggctgatacagatcagcgctgcttccaggctcctgacaaggtacggagaccagtagagtacatacaacggcatgtgggaacaggggaaattacgtcattcaagacaatatagtggtgacatcatcatgacaggcaaggccatggacagatatcgattaagcctgtttgggcttagctggcagccgcccgcccgcatcacatgactctacgctcttctggaaattcgtcacatgaccttcaccatttcaatgcacgatccctccccaaatctccttagtcaataacaccctctggcagaatcgagacgtagtcaattggcgcaggctccattccatccgggatgcctacaatgctcagtgtggagcgcgacttaatatggacgtgcttgaacgtaatccgcgcggccgtctgcccatcaatgtaaggagacggtgcgcgccctaaaatatattccaagtcgcccttccactccccaacaagatcgtcatcaaggaacagcctccaggttgagttaccaattgcctggtcataatagttgacggggatgacgtacttgccatttttgaccctcagcggggtttaggcccggcctttccgggaattgtttgagggggcctggcattgggagcccattgctgcctaaacgggccgccaggaacggttcttaccaggcacgcccttgcctaatcctcatgcaacaggaggggttctccccggctaggccatccgattccagcctctcggggcttgtatacaggcctccgcataacttcggggctccttcaaaccccccgaattttctcaataagcct

SEQ ID NO: 5185 - DNA, 3109 bp, Emericella nidulans
cgcaacagccacagagcgtacattatcccttggtaaatccaaccgctgtgcaccatgaaatcgaatattcgactagacttattgccgtcgatctgattgggcaagttgttagtggtgtatgccggtactatggaatatgtgtgaagaaaaaacataccttgcaaagagcccgagcatctttcttcttcaagctcccaccagctttcattgattccttcaatagcgtctccttgatcaccaagtagggtttcggctggatatgaagggcatcgcagagctccacttcctcctttgttagcagatggaggtccggcgcgccttcattctccagtttccacggaatcaccccgttcaagggctgaacgacaaatttagttttggggggctgagtggccggtccgtcaccgttcgcggcaaacatacgatcgaaatcgttcaaggggacattaggttcttgcgccttagaagacgcgtcagcggctttttggagccgtaatgggagctctggggttgttagttggttggcggcagtaggctgctcagattgctgattctgcttgggccgtgtactcgcaaatctgtcgaatgatccttgtggcatgagccgctgagctcgttgttgtttctcctgctcatatttctcgccgcccttaagatcagcaattcccatctgccgccattcttgaagttgtgcaatagccaggcggagattgtgctcgtattctaggcccttgttgaattcctcaaagtcttcatggttcatcatccgtgcgaatggttttgccttgttcagtaactctcgctcctcctttgtgcgctttttctctaaagctgtgtttttccggtattcgaggagattatgctcaaacaatattttcttgcgctctgttcgcgccgtaaggcgcgtattataaatgtcgacaacagtcatcttcaattccatctcggcgtcggtttcaccattaggcgtctcgcccgcaccaggctcaaaggtcatgtgttgcacagcttcctcagcatcgttcataaattccgtctcgaattccagtcgtcccggcatgtaaccttgcacctcatgacaagcgggtacactagctgtaggcttctgctttggtgtggtaggaggtgcagctttagctgcctctttgcgctcttcaatgcgccttttcttccgagcctggaattcctccttggaaatcgagtcttggagacgcgtatcctccggatcagcgcgctcaggtaatgggaagtttgggctatcaatatatgtgctcaaataatgatcacgcacctcctccttcgtccgatatccaccaatatggtctgcgatatcggcccacgaacccaagccatagatctcggcaccttccagcaacaagagctcctcgtcggcaccccaatcttcttggaagatgggcaccgaattctgttctataacctgaaacggatgcgtagatgggtcatggttttttgttttctctccggccgcgaacatggcacacatagatcgtattcagggcaagatgggtgagcgcatgatatgcgaacctaacgcacgacggggtcagcaatgaagacgggcccggaggaggggaacaaagattgggacgaaacaaagaacacttttacagcggggttgagcttcttacagtcgaagtgacgtccacagagcacacatcacagtgatatttggtgccggcttctgtaccgcgcgtagcggtcttctttcgtattacacccatcgatcccgagagcctttcatcctccgcgataccctgatccgtttcgacgaagattacacgccctccggtgcggatagagggcggtttagcgagttcgagtcaataatatagtcaatggccgcagataatacccagataaagggatgcttgatgtctccgcagctgactaagtggatatgcagcaggtcagcgattgacagtggttcgtagggctggaatggatcgccgaaaatggaagtcgttattggactcggtagctcgattatcgtggtgttggtgtctcgaataataatgctgaatgcgactattcgtcctgttccttcaaccagcgcccaagactcagtccagggcgggcgacgtcccataggcggtggctgtgctctggttacgaatccctcttgcaaatcaagtccggagcctggagtacagcccctgtggcgcaaaatgccttgtaaacaaggcaagtatcgcctcccagcccaggcaacccacggacagcccaatcaatggctgctctcacccgcctctggcccccctctttgttcgctcccttcgggaaagccgtcgatttcccctcttcagcctccgtcacagttgttctcaactctcccgacaccgatcagtcactgctgcttcgttccttcgcgcttctctacccttatacaaccaggtctagatatgcttctctagacctatcgaatatctgtcccgctcgcctgtctatacaagcgggcctgtctttctctcgcttcttttgttggggtctcaatcgctcgtaccagttcctgatcgtccctgtcgctgcgttttactgctgactgctgtggctgtggcggtcttgcatctcctcatttctccgttaactctcagcgccgaagaggtgccttcttttgatctctatccgtctcttcttgtttttctttttcagccgtctatctccgctctcttttctcactttactcttccacccgagattcgtgaacaaacttcgggttcgctttgagtttgtctttcaggatcaactccctcctcccttgatacaccagaccgccgccttcacaatgtcctggaagcttactaaaagtatgttcagttggtctcccatatctccctccaatatttgttattttatcgatataggaactgacattgtttgtactttgacagagctcaaggagacgcaccttgctcctttaacacaaacatttacacgttcctcctccacatctactatcaagggtgattctggcgaggaagcacaggcccctgcacagactccgactatttcctcgagcgcctcctccaatggaattggtatgttcgagtcccgttttcagaaccggtgtatctaattttgtaaagctgcc

SEQ ID NO: 5186 - DNA, 1868 bp, Emericella nidulans
ttgtccattgtaagaagcattgatcactggccgatatgttgatagaactccaggagccattcacgcataataatttggttcatccaggcattcttgttccattgccatcgaattccaattgctgagatattgatattgcgaagagctcgtggcttatgtgccttcccaattacccagattggtaatcgatcagtcccagaggcattgacacagcatatcatagatatccgagtcttatccttcctaattccaggcctattaacggaagataggctctgtgaaggaggcatacgccagaaaagcccagtttcatccatattatagatatcatcctcattatactggccagcaatcgtacgtatagccttcatctcttcctcaacgtcttctggtactgagccagcttctccgtggtatgtccgctgcttgatattatagcgttgtttgaaccgatatagccaaccactactgaaagcaggtgggggctggtcacgatactgggatagagaactccagatttggcgtgctttttcaataagaatatcaccactgatatatgcccctttgcaatcaagtgtatgatgccattcataaaggatagcctcaaggtcttgccactggccaatacctttgcgagttgccgaggaaggattgcattccgagtcaagataatgatattgtgggctgaggatatcagagacagtagactggctcaagcgatggttataatgagcttgaaaccatgctatacaggccttttgtgttggacggcgagactggctatgaacccagtctctcaaagccttccgctggacgtcagaaagccttttcggtggagccatatgattggttagaataaggtttccactaggacgagcttttcaaatagacgatatgcttgtcgatatatcggggatcggggttacatagtaaagcgaggtaaatttatatgggatggaattcatcccgagatgagatatcggctaagcgaggttatcggctaagcgagtatcggcttggcggggccgcactgtatctgatttatataattatgctaaacttaatacggtatggtggagtggggctggtttgggtctagcgttagggcaggcttacctaatgatcccacaaaaaccgacgaggccgctaagcgaaactcgtgagtggaccgcatatctaagatttgagtccctgttctcactgcttcttttcttcgcgacacttccgacaacttaccgtgttcaagtcgacaaagcagtcaagatgcctcgcggaccgtacgtttacctcgctacgactatttctttcctgtcaccatgacattgtcagaagatatctattcgagacaaaatgtcatttggagacttttgatgctgaatctggttactgactgcaatgtttctgtagtaagaagcaccaaaagcgcctcagtgcgccctcgcactggctcctggacaaaatgtccggaacctatgctcccaaggcctcccccggtcctcacaagctccgtgactgcctgcccctaatcgtcttcatccgcaaccggtacgaacatgaaaatgcctctgcgtgatatgctcaataagaactgaaggctgacgtttctggttgattcgtagtcttaagtacgctcttaacggccgcgagaccaaggcgatcatgatgcagcgtctcatccaggtcgacggcaaggtccgcactgacccgacctaccctgccggtttcatggatgtcatcaccatcgagaagactggcgagaacttccgtctcatctacgacaccaagggccgcttcaaagaccaccgcattcaggctgaggaggccgagtacaagctctgcaagggcaagaaggtgcaacaaggcaaggg

SEQ ID NO: 5187 - DNA, 8694 bp, Emericella nidulans
gctcaccatgatatattgattgagctaactattgcaacttcccccgccggggtctgcagcaatgtgcagaatgcaagtccgcacaacaacgggaccaatgtccttgggcgtgctgatccccgagccttatcccaaaagattcaggacttggagaaatggcaaccttttttggctgacagcgcctatcagatgccgtaaacgtggatctgacgggtggtcatggcttcattgttccgagagtcttcgactcgtccttttgtttgaggtcctgactccgcactctattaccgtttcgcctgggattgatgggattacggatgtcggaaccaacccttaaggaaaatcgggtctttgtgacgaatggcacagcagatttggtgatatatccgacttaatatactgaatgcgtttcggctcacaggatggagaatgttggctcgatggagataaatagcagacggcccatggcgagaagcaagcttttggctgtgacatctagttcacggaatcgcttgtctatcgcctgttgactttgacgacatgaagctgcttgctctttccctggcctcgttggcctccgctgccaccatcactcgccgtgccgacttctgcggccaatgggacactgccacggcgggtaacttcatcgtatacaacaatctctggggtcaggacaatgccgatagtggctcgcaatgcactggtgtggactccgccaatggcaacagtgtctcatggcatacgacctggagctggtctggaggctcctccagtgttaaaagctacgcgaatgctgcgtatcagttcacggcgacccagttgagcagtctgagctcgatcccgtctacctgggaatggcagtaagtcatgtaaacttcgtctccggcttttagcggttattaatgcggtcaacaggtactctacgaccgatgtcgttgccaacgttgcctacgatctcttcacgagctccagcattggcggagactctgagtacgagatcatgatctggctggccgctctgggcggtgcgggccctatctcctcgaccggctcttccatcgcaacggtaacccttggcggagtcacctggaacctgtattccggccccaacggaagcatgcaggtgtacagcttcgtcgcatcatccaccactgagagcttctcggccgatctgatggactttatcaattacctcgtggagaaccaaggcctgtcgaacagccagtacctgactcacgtgcaggccggtaccgagccattcactggctccgacgccaccttgactgtttcctcttactcagtctctgtctcataaagacgtggcctaccttagcttatggcaagaataggaaccgcgacactcgaggcggtctgtgaggagtggatgatggggggtcggacatttcatctataggtgtttcgttagtcaatgcattcggtctcgttgttcgcggttctcaaacggcgcctagcctgtcaggtcttaaaataatcgggatcaaattagaaacgcgtcatcctaagcgcttgactgggtcgagcgacttgagagcctatgtagggcaacactgaggcagttcggcggctacgcagcgagaatagcagcctcttaaatctgtcctctagttccaccagccgagtgactcgcgcgcttattaggcttgcaattgtcgttctttacttagaaatgttgggactgctctttttccccctaagcgcccaagctgctggtttgagctaggcgccgtggggaatgttgtcagaccaccctacgttatacgtatcaaacaatgctgtaaatatgtcgagcttgacaattcatcaagttactagtgattatcgaatagatattgcagtagaaatcttgaaagggccgaaaaagttatagattgtataatctgtaaagcgtttaaagcggcgatatttcaggccaggaacggcaggagtcacatgagacttgcacttggtactcgactttccaattatcggacaaaattattgcttcgacgcgaagaatccagagcctgaatcagaatgaacgttattatgaacccgtggaggaggggaatgcactttactacttacgcgccgcgtttcagcacccctgttggagggatttagctcctgagcggttccttgacagctcacggaagggtgttcttcccgcggtggtaattgatgatcgtgaagcctatgacatgaataatcgttcatcccggactccagtcaccggaacagcatcataggcaacaagaatagcagaaccagtccggagaattggaaaaaaatagactacattatgcgatgcctgagcgcttatgcagcagacttccggctgccgatcgatcgcccggggtcgagtcaagttgaactctccagccacagatgaatccactgagtttcagacaagggcaacttgagggcacgacgggctccattccaggcgaacgacagtcgagtcatcgacactctggccgctcgtcaggggcgtgtcgcaggtggtgcaggatcaccgcgcaggaaggggatgattcgcccttgattgcttggaggttgcatgtttggcatctgattgaacggttaactttcctgcgttgctgccaatcatccaccaccctgggctcgcgcgcgccaaatgctacgatggctttgaaagtatggagacagggactggaccaggcatgcaggttgcgcgtttgggactctgggttggaccacttggtttgacccttgcagacctgccttttactttgccagtgcgctcctcctgagccctgacagaccctacctagccgccgtttagggtcttatttatatcaggaggcaatcgctcatgaatgctgcacgagatcttggtcatcattccccattcctgagctttgcggtgcggtctcgtcgctcgcatttccttatctatttcactggtgctgcctcacgctctctagactctttttcttcagtttaattattgtattgcattgatcggtcgatggtgtctcaccctatctttgtgtctcactgctcgccccagacaatagtattctcagttgacaggacaacgactacattttttatcctgctggcaggacaacttcatcccacattctttacgttggggaacattcaggaaactctagcttggcatctacgtcctacgatctgctcataactctgccgtctcgccttgcctcgctctcttcgtgctgtcggcgtcttccacctttctcttctattctgaattcataatcaccactttccacaatcatggatctcaaccgaacagcgctgcaagagttcatcgcccagccggtctcgcgggacatggttgcttacctggcccagcaggctgcactggtcatccggtgcgagtctcatgtgacaacaactgcttccacacaaactgtgcatggccagcatacacctcccagcactccgccgatggatgctgctgatcagcagctcccaaggttgccgtcggtcgaagccttcattacctccctggtcactcgctcccaggtccaggtgccgacgctcatgacaaccctcgtctacctcgctcgtctgcgtgcccgcctacccccagttgcaaagggtatgcgctgcaccgtccaccgcatcttcgttgcctcgctcatcctggcggccaagaacctgaacgactcgagccctaaaaacaagcactgggcccgatacacagtcgttaagggctacgagggctttagcttctccctccgggagatcaacctgatggagcgccagcttttattcctgctggactgggacacccgcgtcactgaagcagacctctttctgcacttggagccattctcgcccccgatccgtcatcgtctccagcaccgaaaagcgaagatgcaccaaccccgcgagtggcaccggttccaagcatccgcagagctgctagcctgccgtcttcgccggcaaaagctggaggcccgtctagaggcccgccgtcgactccctccaagcccgcagccctctgcctctctctcgtcagtgtcgtcttcttcaagtctgcaaagcgatgccgctgtatccgcacccgattctgatcggtaccagccctaccctcctcgtcgacgaccctccaaccgtagtcgtcactcagtgtcccccccttcgatccaggaaattcccggcttgtcacgcactgaaacagtacccacgctttgctcgcgctcatcaagcgttgctcccagtacaagaagcaacacaccggctagcctgcgaccgtctagctcatacaacagtatggaccaggaaattcaggttgtcgatgtatcgcgcagcccaggcctgagcagtggatacgtccaccttccttccagcactatgatggtcccgctccccgcagatgtggcaatggcaaaaggagacgacattgcggtgcagcagccgagcaagaaaatgcgaatgagcggccatagtggcagcagcggctttgtggcgcggttcttggcgtcggcgacgggaacctatatgggccaccggatgcggcctcgcgtttagaccagcctcggtcttgtcgatttgcgggtcctctcaggtccaacttcttcaaccaccgacaaatgacaacctgcaactaagctgtttgactcttgagctggcctcacaaacatgctaaacaagttagccctctaccaatcaacactaacacctaatacccctcaaattcgcaccactaaaaattggtttcatatccaataccccgtcgctaagaaagttccttcattctcgtcttcgtttgatgttctccttcgtttgtttcagattggcccggaccttgcattgcattctaggcggcgttttgagttgtgcttattccatttgggatttgggacaggcttggcggttggtggctcggggatacagacgattgatgtacgtaacatgctatatgtgaatgaacttatctatccttcgacttatccggtcgcaactataacacctgatcttaaagagcgtacgtatttggactacgcaacctagttctggatggatgccaccgaagtcgggcgcgatcacaaacttaatccggctctgagaatgcggcggaatgtggctgcctcaacttttcgccggactgatccagtaggcattttggattacagcacctggagatgcagccttgtcggaccggatgtttccatgtgttgtctatcatgacaatttgaactttgggagttacagtattattttgatgggtgactgaaccgtggatagtctcaacgttgacatgtgtactaacccaccgctgtcgtcataccccaccacttccaagaaagagcttttgccgactttcccctctccttatccttgttcccaggctggctttcatctatcagtgccagcaaagttccatcgggcgcacttgacgagaacggctgcccactgcaacctcgagcacgaccgcatctgttcgccacttaggtactgatatctccgaatcccggcgctcgcttacctccgtcaagaccaagttacatccgactcagttatttccttgaaagaccggcttcatttcgttatcaccgacgccgcgccgcttgctctggagctatataagctgagccgggccaacaccgcctgcgttcgaactacctaggtagtatagagatttcgttttgccctgaacacccgagaaagaagtctccatgccgatcacagtcctctcaggagcgcagctccgcacccttctcacctcgttgacccgcgatcagattgtctcgatccagcggaatctagcagacgcactacgcgattactccatcgggaaccaggattctggatgcgcggctacgctgcaacctagacgaacagcggtaacgaggcaatgcgggcgaacgacaatattcatgccatcgagcacgcggcgctcgatcgggatcaaggttatctctctacaggatagggagagtaaacctggatgtgaggtggaatcgggggaggacctgcgtggtatcaagaggtttacagcaagtggtcctggggaggccggctcgcggacttcggtgtcctcaatatcgtctgagatgagcgagttgtcgttctcatcacatgaggatgagcccgaggctgagcagtcggttagcttgtctacatctagtggggagagcgatccgttgcctgtggcttcagtggataagaaacctattggggctggggtgtcgcagacgctgggcgcgtggccgggacccggatcccgggatacctcgccgaaaggaagcgtcacgctgtatgatgatgatagcttgccgtttgggctgatcaatgccgaggagctgacgccctttcgaacggcgctaacgactacgatgatattcaacaagcgcaagaaggtgcgcacggtggtagtgtttggtgcgggcaagcaggcttactggcatatccgactggcggtcatcttacgaggcgaggacatcaagcgcgtggtcatcgtcaaccggtcgtttgagcgggcagcgcagctgctccgggagatctattcaccagagaatgctagctggcgaggggatgtcaagttctccgcagtcagcagcgaattcggggagtacaaacggatcctccacgacgctatcaacaaagcagatgctatcttctgctgtacgccgtcgcatgaaccgctgttcccgtcggagctcctcacctcgcgggaggggcgccgcaagggccgtttcatcagcgccatcggatcgtacaagccgaacatgacagagttacatcctgatatcctccgggaggaggttacaatatcaccgccccatcgccacttccacaagcatgttcagcgcagtgggattgtcgtggttgacagccttgatgcggcgatgaaggaggccggcgagctgatccaggcggaggtcaaacccaaccaggtagtggagattggcgaactactgatggtgcgggatgccgcgaaggattcaagtttggctgacgacgagaaacacctgcgcgaatgggtcgagcgtgggaatgtgatatttaagggcgtgggattgggcttgatggatctagtgactggaagcgagttggtcgagctggcaaagaccagaaagatcggcacgacagtggaggaattctagacagtctaataaatgttggcctttatctaggtagtggccattcagatagttgatatttttggacgtcgtgaagctgttggagtaatcgtaattctaagactgatgatttgcggacgagcaacgtgacaccgcccaaaagggaaaatggctggcatgacatcaagcatcgcacacgacgttttcctctcctgactctcccactctgcgagtgcagatatgtatacggccatgaagccgttccaaatgctagtagaccacgttgaagtctcttttgccctaaatagtgcccaagcgtctgattatttccttgtttctgcccacaggcgatgctcacccactccgactgaggggcaacataaaatcatcccactatcacctgcaggttgacccgacggctcgtatgcaggagccctcgccagcgcttttctttttacttgttcactttacgttttacatctatttaagactccgagacaggtcctgtttctctcttccgtactccgagtgatcgcattcgcagtccagcgcataccttcgacatgcgcaccaccactcagttgcccaacggccagtctttcaccgtcacccccgtgtttgggggcgtaaatttcaagttcaacagctctgaaccagcgaggctcgctcttgctgcctgggtggaatgtggtccttggtacgcgcctgcggccagaggatctttccgacggagacttgaccgacgttgagcgcggccgagcaagaccgatggagaagaagccgcagttactcgcttcacagtgcctaccttgtccagttacgaactgtacatttcgtacatcgtcaaccctccagacagcgactacaagcctgtcagttccccaactcggcagatcgccatgatgctgtgggtcacgctgtactggtactttcatgagcctgaaccagagttccagttgtatactgaagcatcggccaatacaccttttgctggaaagccaaagggagactggagggtaaatatcaggcgtgaggggatctttacggggcacaatgtgctgcagaagctggagcgcatgggattaattgcatgcgacgactcgtctgttggacctgatccagaggacagagatagctggtcgcatatgttcgtcagccggcgcacttctggcagctcgatccgcgtctgtatctgtttacgttgagcccgcagtcgtttgcgcattcggttgggggcacggcgttcggcaggattgcttctccgacacgggagagcttgtacctgggggagccgaatggtcgaccgagatctgcaggaccgggctcgggtcgctacatgcctaatgaagggccatttgcgtcgcatagccatcttccgacattcttccctccgccgccgtgccagttcactttcacgaatggcgtgcggcacccgatcagacagaagccaccgcaccagggtgaggttttctatgtccgttacattccgagcttagggcagtatctttcctttcgagtcccatatctgcgctctcctagggatcacacagaacagttgagttcggaccagacaccccctcggacctggagtatctgcacaagtggatgaatg

SEQ ID NO: 5188 - DNA, 1307 bp, Emericella nidulans
tacttcactttcctcagaaaatgtcagaaccccaaagcttgcaccatccttctccgcggtccttccaaggacatcatcaatgagattgagcgcaatctccaggacgccatgtccgtcgcacggaatgttatcttccacccccgtctgtgccctggcggcggtgctattgagatggccgtctccgtcaagctaggccagctagccaagtctattgaaggtgtccaacagtggccgtacaaggccgtcgcggatgcaatggaaatcattccccgaacactggcgcagaacgctggtgcaagccctattcgtgtcctcacacgcatgagggctaagcacgtcgagggccacaccacatggggtctggacggcgacacaggcgctctagtcgatatgaaggagtatggcgtttgggagccagaagccgtcaagcttcagagcatcaagacagctgtcgaggtgaatatcctttctatcattgactcatgatcatcagctaacttaaacagtccgcatgcctgctgcttcgcgttgatgatatctgcagtggtaaaacagcccagcaggcggctgcgcccaccggcggcgatgattagacgttaggaccatggaataaaaaaatgcgtaataaatgccatgatctttgatatgtatgaacatcctagactaaatttcaatgggtatcttgttcatattgtacatcctcctcgattgttactcatcatcatggatgataactccagacgtctcaacagccgcttccgtctggtcctcttcaccggtcttattcgtcgttacgcccttctcctccgtaacatccatctcatccgaccccttcccaccctcagcagcacccccagcatcagccccagcaccagcagcaccagcaccagcacccttcttggctccctttgccttcgccttgttcctcttctccctcctccgccgattcttctccgtcttctcttgatctttccttctcacctcttcctgcttccgctgccactcagccccttctttctcccgatcaacctcctcctgcataagccgtagccgttcatactcgcgccgccgactcgccttgtaaacatggaattctccggaccctgcaccggcggacgacccctgcacgttcgcaacgatttccggcggcgctggaagggatgaggctgatttttgggtcgaaggcgttgggagctttatttctttggacgggtctcggaagagcgagtttattacgcttgcttgttcgctatggggggatacagcgcgccgtttgttgggcggtggtccgggggtcgcggaggtgg

SEQ ID NO: 5189 - DNA, 956 bp, Emericella nidulans
attcttaaacagaaaggtcgcttgtattgccgggggaatttatggctgcattttttggctgggatgtcctaatcctcgtcttgccaggtcaggttggggcctggaatttcagtggagtggaaccatacaatgtaatacaaaatacattgcgctccctatagggctgccttggtacaatatcaatgtttccccaccggtccccgccacaccagaacccctgacccattgcagactcgacctttagcttcagccccaaaacaggcagccaacatccatccttcacaacccaaacttcgcaacccatctaatagtccatctggtaacccatctgataaccaatcatccaccatggtcccccacaacggactagttcaccctaagcagtacgacatcaaggacagcaatgtcgagctgatcgggtctgacctcgatcaccgagtcaagtacaactcagctcgcaccgagccggcctggaacaacggtaaggttggccagcagccagacccttgatatcgggcgcgtcaagaactatgagctcgttccctggccaaaggagccgagcgggagagttctacgatggtattagactacatcgacctgggcttggcaagactgggcaacaacaataccaagctgagcgatgaaatctacttctggctgggaaacaaaaccacccaagatgaggccgagacgggggatctataaaaccgatgaactgggcgagttcctgcacggtgccgaaacgcataatccctaggtccaggagcacccgtcggaggactacaccgcgctcatccgccgcatcaccatccgctatggaggagtcgcatctggtttcacccaagttgaggacagacagcctagagaagtgacgacactgatgggcgaattcaagcattcagccgcccctcctggtggacctgtctcacttatagcccacgagggtgaaccctacc

SEQ ID NO: 5190 - DNA, 4729 bp, Emericella nidulans
ctatccaaactactgaagcttgccacccactgggctcgcttcaaccgagaaggacgggtccgtaacccgaaattatcatggctcaaattgaagccgatagagctgcagacgccgcgaggaaagcatcagagggcgcgaagctcgggatcaagcagaagaagaaatcagccagccctgctctccccaaccctccacgagtcgacgccggccttgcccctgcaccgccgcagccaatgcagttggccccccgccccagttggccccaggacctcttcctcaccctcactcttatcctcctcctcacccccaccctcactttcatactcatacgcatacatcgcagctgccatcgcagctaccgccgcttgctgcaccacgtggtttggcaccatatccgcctccgcatctagatccccgacctatgccgccgtttcctcttgctcgtggacctggtcctctccatcaaccgccaccgcagccctatcgcacgccataccccgattatttcaatagtccttatggaccacccccgctgcctcctcctggtcacccgcgaccttgatcatactgctcggaccttcccgccccctccccttttttatttatttatttatttattttttttttgcctatgttcccttgttttattttatgtattccactatggaggcggacttggaagggtggctgtacatttagcacttgttttgtctataaatatccggctacacactttttgggtttttctcctgagcgtttataccagcgttaggcgtttggggttgctgttcacatcttactgtcttattaatactgtactttgtcattttctatattgtattattcataagttggttaagagagccgtcatgtcatgttttgggtggaagtggttattgttaaactcgaagaagacagagcttttggtcatcctattaactcggaattgtatgccaattcaaaatgttctctgctttgctttttaccacagaagccattgactgaatcacgtgcagaggaagtaagctgctgcacgtgatgaggagttcttctggtgctaccaacttcaccatgaccaaagatctccaccaacactctcttactcacctcaacgacacttatcagattgcaccttattctatttcgtatccttgtcgcgatgggaaagaaaagacgcagccccactttggaagaggttctcgctcgcccttggtgttattactgcgagcgcgatttcgatgacctcaagattctcatctcacatcagaaggcgaaacactttaaatgtgagagatgtggcagaagactcaatacagcaggaggtctgtaccataatttcaagttgtggcgcattgcaactgtagctaactccgattctagggctgtctgttcacatgagtcaagtacacaaggagcaacttaccgccgtcgacaatgcactatctaaccggtcgagtctggatgtcgagatattcggaatggagggtgttccagaggatgccattcaatcgcataaccagcgcgttattgctcaattccagcaatcagaggcagagcgacaggcaataacgggaaacccgccgtccggagcatcgagctccagcggccaacctgcaaagaaaccaaaggttgagaacatatcagatttgaagaagcgactcgcagagcacaaggcgaagaaagcggaggcccgagctggaggaagcagtggcgaagcaactcctgtcggtgcaggccagactcccaatgtgcccggattcgtaagtgacgctttctgcaaacatagacacatttgctaatatattgcgctgctaggcacaacaaccaacgactgttgctcctacgcaaacgttttcttaccctcaaccgtatggcggggctggttccccttaccaggcaacggcaagtcctgtttacccaaattattcccccgggcaaccgcagttccctactcctacgcaatactctactcctgctggttactcgccccaaccagttccagtttttggaaacacaccgccgcagttgcaacaacagccgcctccggcggtcaacagcccgcaaaccacatttgcgcctcgatcgggaagcctacccacggcgccgagtctcccgcaacgacccgctgtcggtgctcctcaagtcaacgcatatcagttacaacagatgcatatgggccaccctcttccggggacggctgtgcccggccctgccaatggcgagaagcccgaagctacggcgatttcgtcttcgattgacgatcttatctctggagctgccaaacaagctgatcaggcggcggcagcgaccgccaaacctgcggagagcgcagaggaaaaaccgagtaagaaagataagtcgaagcagtcacggttggtgtattcagataacgagaccagcccggaggagaagatggcaagattgccaaggtacgcattcaatcctgatcatcggacggagacgacgcttcaagagcttcctgcgtcagtagtcgtcgggcaagttcccatgtcagaggccacggtcatgccgacgccatgatcaaatacttcgcattcactagcctccgataacaaaggtcgaggcagcttgcaggttataccagggacaatatactccagctaagtcgtgcatgttgaatttctagatacgctatgagtgctcttttctttttgctttgcttctggtcatatcttgtgcaatttcctgccctgatgctttgtcagtagttttgccggcgcggtgtctcttacactgaactccggctttactctctggagtcgacaacgggcaaaactgcaaaggcggctcgatgaaaaagaaatgggtcgatctggtgtagtctcggtgagtgcgctgcgtcaccctgaccgaggacagatgcttcggatatggcgatgcggttgtggtgcaatagcttgcacctcagcagctggtatctcatcttttttctcaaggatgatccctaatcttacctactctactgtctgagccggcatcttaatcctcgttcgctttcgttacgtttgggcgggggttagatatttcgtcccttctgtaagtttcgccaaggtaggcaagacatagacaccatatgatcatgaagatgacgaatgcaatccactaattccacttcattttctctcttgtctcttccattcccgcatctcaattatatttcggtaaacgcatttcactctcccatttcgactccaaagattattaaacttaaacctttctcctaaccgctcccccaaaaaccacaataccatagatcgctagaaaactcagaacaaccggtacaagtttcctcagccgaatcgccctcggaatcgatgcaccgcccagcacaacagatgcgagaaggccgatctcctcgccgtatgtttggccgctgcgcaatcggaggaaggaaaacagatagagagtcccgacggataaaccggcgattatggaggggactgagccggtgcgcgaatagccgattattccgccgagactggtgagaagggagagagttagggcggaggttgttggggtggcctgagactatgaaagagaggtttagttaggagtcaatcagttggagtttgtgaaaggaggtggtagtggctggcaagagcttgtacttgaggcgtgagggtgaaaagggacgtagaataggttagaatagagtagaatgaggatgtaccatgatggattgaatgtcgttctttggtatatagtatgccaattaatatgccgtaactgcagtaaggagtggattgacgagaagcagtagtcacagagagtagatatcagtagttgttagctcgagcagctttgcgactgcgattgtcacaataatatggtctgatgtggagtcgagctggagagtggggaagggagagcacggagggagccgcggcccgggctcagcttcaatcagtaatgcttgattcgaacatccgtctcatgcataactgtttggcggaccgtggcgtcaagagttcgggaaagcgcatcttgatatttcgataagctagacttgatttggtggagtttttaacgagtacataaacgtcgctgtcattgattgtctattgcgaaatcatctgaacagtctataaaggcaatcaaaatataaatgatgaatatatataaccgctcaatcaatcaaggtcagtgatttttggttcgttttacttttggtcagctacgatgttgtgtgatcgtcgcagtggtgtcattggtgtcattgtattggtctcgtctcgtttcgtcttttactgggaagccttgcgcgcagtaggtagatacctggacctagttaaccgacaggaaggtcgtgaggtttaggtaccgtgattgctctcagtcctggtctggctcttcgccggatggacggtgccccgttcagcctccgtctccgactcatcagaactctcgctttgccccatatcctgatcttggaactcatccctttcaacaatccagagtatcggagttgcagcaagcgcagaaatggcacaaaggaaccaccaaggcaaaattatgaagccagccctgagccccagggagaatatagggcccagcatggcaggcccagcggcgcgtccaacggcgctcatactcgtcgcgacaccattaagcgttccaagaatactgagactacctgcggaattcgtgagcaagatcgtaatacccgggaagttaaaaatcgatgctgtaagtttggacaaaattaaaa

SEQ ID NO: 5191 - DNA, 4358 bp, Emericella nidulans
aaaagtatgctgccgcgttaaaaaacaacacttcagccgagtcgtcgcgtgaaacccccgccgcagcatcactacctaagaacccatacgaactcagtcctgttgaggttgagaacattcatctcttctcaaccctcgttgaccgattgcaacatcaacccccgggcacgattctccgggaacctcaaatccaggaattgtatgaaagtatcggagcgcttcggccaaagctggcacgcagctatggtgaaacgatgagcaagcatggtaatgttctagacttctactgaagcactgatataactaaccgggttagacactttgctggatctccatgccaaactgtccacagtggtacgatattacgatcgcatgttggaagaaagactatcgagcgcatactcgcaacataacctgggttacggccccgtccctgggggcgctcaatacccgaacatctacccatcgatgccttctacaacagctgaagtgagaccgggcgcagaaaatttctattacgggaattcgggcgtcgaaccaccagcgcctgctcgcacgccttactcgcagccacctcttgaacgcgagaacggcgtggtgagctcttcgatgcacccaccacttcaacagccttcttcaggtccgtactggaacccgaataatcattcaatcgcatcgcctcagccaaacgtcaacgcattcaatagcaataacacgccttaccctggcccaggtgctccgtcacaattctatacttcctcggcataccaagaaccggagaagctgtttcagcaacctaggcaaggggagcctgagtcgccttaccagccgtctccagtgacgaatcgcgactcgtactatcagtccgcagggttgccgtccaaccctgtagagcaacagccgccagtcgatcatgggcaatccccaggtcacgcgcagccagcagattcgcgatcatcgcagtcggggcagcctaaagcgactgagccgtcggctcaatcgtattatctaccacaggagcaacaacagcaacaacaacaacaacagcagcagtctgcacaaggaacgggctaccaaggatatccccagggaaacacaaattaccaagctccttacggaggggacgtctctcctatcagcgcgccccctcctgtgcagtatcagcaaccagcggcgcctcgaccggttgtggaggagagcctgatcgagttgtagcctcacctttctgacgatcctttaatttgtgttttatgctaccttatgataccagatgaattggcctttcctggttgcaaaattggatgtacattgttcctgatagtagcaataatttctctaaatttcgatttgcgttgacttggtatggggtagtggcgagtctagactctacactagtgactcgattgcggcgataaaaagctggatgggaacggcggaataacgcgtaatagaatcctcgccagtcttccttggaactgacaatctctcctcttcacttccaccatcacctccatctctacccctcttccgctcgttccatctcatacaatacctgatatacctcgttcgacagcccttctcttcgccccgatctcccctcaggccgccgaggtcgcttctcaacccctgtccaactcgtcgtaatctaccaatcgactggccccgcgcttgtcagtagctggggaacagctatcgcttatcaataatagcttttctttccgtttctttttctgctgtttcatggtcgaatcggcccagctgtgttacagactattattgctaagtgaaggataattgcaggaggcagcctccaatcactgataccgatctctgccgatagctgctggtcgcccaattcggacctttcttcgctgctaccgccatgccgacgacttcaaacaacgcgtcccccgttaagcgcccgggcctgggccgccgtgctgtctcctctcacgccgttgtcacgcgctcctcgtcctcgtctacccagggagagctctctcactcgcatacctcccacacctctcagccccaacagaaaacaccagggcatcgaccccatcgagcacatctcgtcggtggcggccatcgcagtcacggccgtaatccatcgtttggaaagaacttggctaaattacagcggcacctaacatctcaccacgccggtccagagtaccggctgcatcagcaccagcgcaagaagtcggccccggtgacgcccgttgcgagccccccgcgccagcacgttcactgggatgcactggacgatgcctcccctcgtaccactagctctataaaaaaaaactattctagcccggctttgcgacggagcaactcgagcgtcttaccaaagaaggccttagtcaccgaccgccctcataccagctcgggaaagaagaagacggtcggatttgaactggcggactcgacggacgagggcgagtgggaggatacaactcaatcgcctgagagtaccaggcgaagttctgtggcgcagtccaaagacggcgacgagaatccggtcgtgctggtcgatccgcttacatttgtgaagcggccgtatccccagtttccccgagcgaccagtcttccggaacctacgagcagaagctttcacgacgatcaatcatcaggtgaagacgacgagcacgctcagcgcacaagggagcaatcttcagacacggaggaagctccggaggactctacgcgcccgcctgatcagggcgatattgcatcacggcttcttagcccgtcacattccgctaaggcgccgcccgccatgtcttcaatatctgccaccgcgacaccggcgccggtggatacgatatcacgaaccgcatctctcacgaacctggcatctggtcaggatggactgcgaagaccggtgtccaccgcaaatattgcacaggccagtaccccatcacaagcgcctgggtcttcatctatagaagggggcgtatcaaggtttatcaacaacaagatcgcaacgtcccgtaccgactcagatcccaacactccatcatcattccttcctcactaccatccgcaaaccccgccctctcccaaaggtacgaagaagacgcgcagctcccctacttcgcggcaacctggaacggaaccgccctcccgcactcaacagaaactttggctgcagcgtacggcagccctgaatgactctcctcctgattcccacggtgcgtcggccactgtgtcgccgtccaccatgggccccgcttacattagtggaacagcccgggcgggattgggaccatatgatccagcgcgggcccttgacaatggctcgtctaggaatggcgggtcactgcatgaagccaagcatatcctcatagcatacgagaggactgccatggaactaacggttgttcgggagattcagtctcccacccagtgcagcttcacccgtgtgaacgcaattctgagggcgcgaagacggacaagactgacagctgagtccaggagccccaaactggtcttgacaagcctgtcaggtcagcgcctgctttggttctgctacaacggaatgccaaacagcaagatctccgtgacagcagtagcgccacaagcgcagactcaagacagctaatagggaggaaacaggcagattcacagagcttggtggcccaagcgtatatgcaagacgcagaggacccgccgcacccctcacaccgactactgtcaacgtccgatgacgctgcccacggtactagtacccacggagccgacgaccatgttgaggatcgcgaccactttctacccagcgaagctgaaatgatgattcggcgcatgtgggagagccgcgaggttgcagcttccggctgatgtacagctcacttttccagctcaatttttcaacatcttatcttgttatttgcttttgtttgtttgagcaggatggcgtcaggcgttacatgaatggttcagcaatccgcatatatgtttcggcttggggcaaagtctcggtcttgagtgtttatagcttgcagcatgatatcccagatagtgatttgtaaacaataaccatttcagtaccctatgtgcagccccatatagtccagaatcgcccgtcagactcggtcagttaatcccgaagccactacccgacgccagcggaccccgaggttacggttatcgacaggcgcccccacagatggcgtcggaatcagagcgggatttctgtcccttgagtctgtttggaacgactataatattccgaatacaggaattccgccctgggaccagtgccagcaatttgttatccagacaaataaagggttgtagttggcatttggagaatcgcctggtgctccgagtctgagtggtggcacaagacagagtgg

SEQ ID NO: 5192 - DNA, 2460 bp, Emericella nidulans
aaaacagcttgctactactttcagccattcacggtgacaagcaacaacaagaaagagattgggttctgaatgagttcaagacaggcaagagcccaatcatggtggccactgacgtggcttcccgtggtatcggtatgagaagatcgcgcttttcccttcccctcccccctccctcccccttctccctttttatcttcctccctgaagcaccctagcccaattgaggtcgtgcaacaaccgcacagtgctcagctctcttagtgcccatgttggcatacttgactcgtccaggctatgtcgggtcttctgaaatggttctcaaagccaagagaaccttggacttacagtgcagtttagcagacacgtaggattcttctattcttctgttctgacttgtgttcatctatttggaccttgcttggtcgagaagcacggtggcttctcttccggcctgtcaagctgcattccaaggttactctaggaccaaaggatatccgcccgatatctgccagcataaggactgaccctttaacggatcttgagatgaaagaccgtggaagagagtgatgcatagtctcacacggctaatagggcttccatgccacgctgttatctgcactaatgctctgtttgctaacctgaatctgtctaaagatgttcgtgacattactcatgtcatcaattatgattaccccaataactcagaagactatgttcaccgtattggtcgaactggtcgtgcgggtgctaagggtaccgccattacctttttcaccactgacagtaagtctcactgcatttgttttcataagacgttgctaacgttgttttacagatgctaagcaggctcgtgacttggtcactatcctctctgaggccaagcagcagattgacccccgtctcgctgagatggtccgctacagcggtggcggcggccacggtggtggttatggccgttggggtggtcgtggcggcggtcgtggtcgcggtggtaacttcactgcctccaacgcagcgcctcttggtaacaaccgtcgctggtagaccatcaatgccccctgcattcatgagcttgtactccccacattcgacggtagacgatcgatttttgcactttccgacttgcgcgtttccgttgttctttgatatctcttcgtaactcaatatgggcggcgttggtcaatctcacgatagactcgttatgtttttactcgagcttttacaggttccggactgggatgataaccgtggtcattttacgcacttacacggatatacgttaattctttctctgctttaaaaagtcgttctttttagcctggacatgattggctcccagtaggtagcttgccaatcatcattccaaagattgacattggataatgttgtagtctgagctctcacatactgtagttgcattctcgaattttgaacagagtgcgattgaagtataccaggttatatatgaagatctgcgcgagtgcggtaatataaatctgtcctgatactctcagcccattcacctgaccctcatcactggcaaatgaatagaatcctgccagtatagtaaactaacctctccacctctccagcgtcttgctcaattgtgctgccagaatttcatggagccgactcgtgatatgtcccgaattgaaccagaaatacgtccccagggatgttggacacccatatgcttgatattctgtctcaatatccggttggtcatatccagggcagaaatccgtcgtgttgactatcccgtactggtctgggaaatcgaggacatgactcaaaacgcgatgcgcatcaaagacaagaacattcgtatccggattccgtctcccgaagcgtctggcttgtgatgtgattgccgaattaaaccaaccaacctgcgttgcatctggcgcggctgtttcgttgcgaagtgtccgtgcctgattcgctggtgtgcggtccaaagggggtagattgaggacgacaaaatctacaaaatctttataccctaatgatactaaagtctgcaatccagagaaagccgtttggaggagggtattatagaagtctggaaaggaggagatggagctgtttttcgcgctatcgttgatgtcattgattccgatccaaatggctgttagggttgaggctggatctaaaatgggtgcagcggatagagttgctttatgtgaggggtgttgagagctggaggtaaggactagatgcccgtatattgtgaactgcctgatctggttaacgagggaaatggtgtaagggtggtgcagggggatgctatatggacaaggtgtattcattagtatccattagtatcccgtccaaaggatatggtatgtatctcaggatagggcaatagagcaacgtactgttcagctgaaacccccgcccccgcaaacgcaaagtcccagagctgtttcgtgcaggatattggcgaggtcagaccctcct

SEQ ID NO: 5193 - DNA, 3474 bp, Emericella nidulans
gccctgtcgccaattgcatatgctccaccataattgccatcttctcatatatcggaaactaactcgctgcagtctgccagttttcattcaactggtcacacacttgagcaaagtttgacagacctgacaatggactcgctcactactcatcctgccactgcccaacaggctcgtgccttcacttctccctcgtcgctgtctttccctggcggcactgccttccctggtggtgctgacctgacaccgccttccgataaggatgcgaatatggccactaatggtcagagcgcgaatggaaatgtgaatggccagcagcagggagcaaatgccgctaacggcaatggggtgatgcccgctactccagctgcgacccctggtgccagcgctccagggagtggtatcgtgcctaccttgcagtgagtatactctgttgtcatctttctggtccaccagaatactgaacaaagactactcttgaagaaacattgtcgctacagtcaaccttgattgtcgtcttgatctcaagactattgcgctgcacgccagaaatgcggaatacaaccctaaggtattattttccacacctccctgagtggattaaatcagggtacagtgtggctgaactggttttcctctagcgtttcgcggccgttatcatgcgtattcgggaacccaagacgactgcgttgatcttcgcctctggcaagatggtggttactggtgccaagtcggaagacgattccaagttggcttcgaggaagtacgctcgtatcatccagaagttgggcttcaatgccaagttcacagatttcaaaatccagaacattgtggggtcctgcgatatcaaatttccaattcgtttggaaggtctggcgagtcgtcaccacaacttcagttcctacgaaccggagctgttcccaggtcttatttaccgtatgatgaagccaaagatcgtcctcttgatcttcgtcagcggaaaaattgtcctgaccggagccaaagtccgtgaagagatctatcaggctttcgaactcatctaccctgtgctctctggtaagcttcccacgttcgatatccgaacacccgctaattttggtacagatttccgcaaggtctaaagagtagcaattctgatgaggggctgagatatctcagcactttgtcatactcacttcaaacccctgtattatcaaaaagtttctcgatgccggggcggctaaggctcaagtctagtcagccgtggtatcttctgaactgcatcacgagttttatgcgagcattagtacggcgttctagcgattcgggtttgtttggtttttttttctaaggcaattttcaacacgattcacaaattagacagtcgcacaccgcaggttgaaaagggggcggtactgcgcgctggtcggcttgttgcctccttctaattccccgtttgtcttccagtctattgacaccgagggcttctcgaactgctctatgcagtctcttgggttactcgtcttttttttcccgtgggcactgggctccctgttttagatcgtcctacttaattgatgcctgatgacgggtttgtaagcctgatccagtagcattacttaacatataaaataaaaagtggatgagatctttctttcgccgtttaggtcttaaaagccagtttgcgtcttaaagccagtttgcgaatataaatgttcgtataaggatgaatcgtattcaaagaattaaattgtcagaaaaactactgatgctcgcataagacatgtgatgcagtcgaagatacgcatgcatatacatatatacactagctaacatccacccaatatatatatccctctccgtttatctatttcacacacataccaaaagctggttttatccgtcagacctacaacgcactctcccgcttcgctttctgcccccttcgccaactcatccaaaagcagcagccgcttatcccctgaacgacttccatcctctgttccgtcaaagtgggcctcgtccacagcctccggccagtcccagagcgcgcgcagttcgggtgcgagcttaccctccagcgcatcgaccaccttttcgccgataagtgggaagaatttgtatgcgtggccgctgccaccagttgcaaggacgaggtgtgggtgcgatggatggtgggtgattatgaagtcgcctctgggactgtttgggcatagttagtatcgaatggtcatgagcaataaagggttggtacgatcgacatacgtatctgtgtaccagcagatccgggtattgaggaaaggacggtccgcgaaggaggggaggagctgcttcagggctgtgcggaaggccgtctccccctccagcgggatggggacgcccttctccggcaagctgacgtgcattgtttctcctgttggtgtcgcgccgggcacgggaactgccttggggttgtggtagccgtacgtagctcgggcgatcttgaggatgttgttgcgcggcggaatgatgaagatacccgttgcgaaattgaggatcgtgggcatgtgttcgaggcggcgttgctcctcgtctgagatgcgcatgtaggcgattgcttggccggttgagacagcgcgaccccgaaggtcgacaagcccggctgtccaggcgcctgttgcgaggatgacgaggtcggccgtcatggtcgtgttcttaaaatctttgagaacaacccctgtgaccgtgcggttatcaatcggggagaagaggagacgggagacttcgccgtgcacgaagcgtactttgccctccttgtcgagctgtggcttcgtgaagaggactccctcctctgcgtccgcccagccagagctccagttcacgtagccgcctgcgacctggagtgtctcgccgtatgccggggccgccttaagcacatctgcttttgtaggcagaaactgcgcgttctcaccgagctgcttgacattgtggtaggatttggtggtgtagtcttttgccgtggagtttccgtcagggtagaccagcagcaggccgttctgggtgtagcgaccttcatggccccattcggtagtacgccagaggtcaacggcttcggaggcgagtttcgcatatgtaggattggagtagtcggctcgtatgatgcgggagctgtcgacggaggagccgtggggattgggaattgtcggcgaagcttcgaggagagtcactttactgttggggtggcgcttggagagagagagcgccgtggatactgtgcgctattagcgtttacatcccagttgcgacgaagagcgaacaggtaggaagggggtgaattgtactcccacaccagcttctcccactcacatccaaaaacccctcctcccacgatcaggatattgtcagggagcgacatggttgtagcgtagaccgttgggtgtagagactccggcagtgttctttaacactgagctgctttctttccttgctggtttttgctctgaagggtacagaatgcga

SEQ ID NO: 5194 - DNA, 6506 bp, Emericella nidulans
  unsure (1)..(6506): unsure at all n locations
atcgtacttttgtgttgtaatccaatatctattagaaagcaacaacactgcccaaacgccggcattggttccaaaccctgaaaagccaacgagcagtttgacaccactacattgtcagaaaggtataataaacgcagccaaaacacccaaaacacaagacacagacaaacctgccgttttaggctgaaggccaccaaataaccgggaaaacatgttcaaggaaagcaagcaatttgaagttcaggggaaacaagtcgaagccaaatgaaccattgaaggtctttcgtatcattctctatttgcctttgcaatcggtagcagatcagtctataagaaaattccatcacgcagcacggtggccaaacagaaaataagaacatcagagtgtatatgagttaacagccagaaaacatgagtagccaaaatcctagttggaagtgtggggtcggtgagtcttactagtttgaggaggttagggaagagcaaattgtgtaaggagttgatttgtctttagcgtagtcaaggccaaagatggaagccagagagcgtgcctcgctttccactacctcgtctggagctcccggtattaccacttgagtctggtccgtggtttccctgccggccttcctcgaagctccgccgagatgcaccaaagtcactcatggcgaataacaagggctcgtcctcttcaacctgggcggcctgcggaaggttgtggcgaccgccgccagatcctcgtccagttcctcggcggtcttccgtgccgctatggctggcgcctgcattggcatcgcgctcagcctctcgctcagctgggtagggatggataagcccaccacgtgcaatactgctggaaccggaactgagagagtggggaccgccggagaatccgcggccacgagaatggctaatacgccgttggtgcagagggtggtgagaatatggggatgttgccacggttgggcccgataacgaagcatcacgatgagcgcctggcccccgtcgtgtggggcctcgaagaacatttccatcatcgcctccgctggaacgcgctccagattctaacggagctatattggtcccaattggttcgtaatcctgttgccgttgcaatgccccaagagtagtatgagatggctcctcagctccaagactcacgctacgcatagtgaaaatctcgtcatcatcaatagcatggctacttcgacggttggcagctgagctagagcgacggaaagtagaggggaagatggtcgcaggcgaagtgggaatcggtatggcggtaactgttgaagggagacgttcagtcgtagtctcatcgcttgcatcctcttctaccggcgaaccgttatctccgtgtaaacgtgtggtggtattatcgactatactgttggagctgagccgagaaggtatggcgggagtatggggagtatgaggagatattgctttccctccgggagatgaagcggtagagatggatgtaccagctatacccggaaccccagaaagttgtttgctggaagtggcggatgagcggttcatgagcagcgaagatgacatcgagtcagaaagggcggcattggaatctttcatgccccgaaaacggcttagagcagcagaagctgctgtcatcctccgggaatgattgtccatagcagtctggctcgaagggcttagcaaatcctttctgagatcgagcatcttcaggaattccgaaatgttctcatcgtcagcgtgaattgaatcggagctggttcctgtgatctcggcaagtaacccggagcctggctgggcaccagaagacgttgcactggctctaccactggagttgtcgtcttctagcttgttaatgcctcctgaagacggcctacctcggcggtgactgaaggcactactatatctcgacataggtgtgggacgaggggatgccgagttcggggatgaattagcattatcgggaccaaatgagggcggcttgcgtgatgagggagtcgatcaccactcacaccggcgccgtatcttgccttcatcagcctgccgagcccactgccttcgatcatttcctcaaaccaggggatcccgttcgtgtttccatgcctgacagtccgagagagaccctcggtgaagacaccaggtggcacaacgacggtcgattgagaagtaggagcatccgcgaccaaagtagtgggtgactgttctgccgctggcggagatatatctggcgactcggactcttcccaccgcggaagaagatgcaagtcctccaggattcgctggtcgtcaccgtaaagactcccaatagtcacagacatgaaatcagcttcttcccgcggattctcactccagtatgtgaggggcgacccacaaaagccgcaaaacaccctttgcgtgtgcggcgcatggtgcggagttaagatgcggcggatgctaccatgcgtctcgtcggggaagaaagattgggtataggattcataccagtccagaggaactcggagccatgcggttaatggtgtaccatacgacttccctaagcatcaatggagttaggtgggaagacctcacataacgtgggcaacgacgtacggttgtcccggccggtgtcgaagtagacccgggcgtgatcagtggcattgtcagggattctaatgaggtattgatttcgtccacacatgcaagagccgcgcagaggctctttgtgctccatgttgtatttgaaggaagctgtgcactcctcacgtcaaaggtggtggcattttctagttaggaagatggtatgcggagatgaggtcataggcccacgggtgggatgagaaggcccatttgtatcctcttattcagacgtcaacacgtgagaagacagaatgtcacatacacaaccggtaaaaaagcaaacaagcttcgcctaattaattgtggtgcggattaactccaaggctcctccgtaggcaatggtgttagtatgaagccaaaattgaggatatcctttcctcgcagttgtctggtaccgaggtcctttgatattgatgattccagaataattggccattcgggtgatcatcgcttggaattaatagcaggaaagatcatggctaggaatatgagactagggccatgagtcgctttctcggcacgctaaaggggtcctaccctnaagaattcgagatgtcacggttcctgacttgacaccgcgtctaccactcccttcttttctagactcttcttctttctcctttattccttcctgacgactatctaatttttctccgtatatatccatcagtatctctttgtaacctatctctaccgtcgccctgttttcccgagtcacacttcccgtcacatgagattcagacccgcccctcttttgctacgctcgctattcacccccggtttcgagaagtgcaggcaacatgccctccgcgcagcctccacatatcctcgcaagctcctctgagcccttgtactcccccatcgcagctagcggatcaacaaatgcagaagaccggcatgatcgctcttcatctacccccaccaattcgtcccgacaaggcggcgagagggacaaacctcgtttgacggagcaagagaaaaagaacaaccacattgcctcagagcagaagcgacgcgcggcgatccgtgaagggtttgatcgacttacggagcttgttcctggcttggagggccaaggacgaagcgagagcatcgtcctaaagaagactgttgattttatccatgcccagctccaagagcgcaagaaccttatcactgaaatcgaacgcagagggggtcgtgtcagtgacgatatgcgaccctaagttacctgtcgttactgtacttggataccgaagcccgttggtgctaagttaagtctggtggcgtctttcagcctctcgcgattgaaacgacacttatataatctatgataccttgcttattgcatgtacggcaagatattgctaattaccgtgaacgaatataggcggggaagctaggcatgcgtactactttcgcctaataagaagggcacacattcttctgcattactgttgtcatcagaccacataatatgggaggctaatcatctcgcaaatactcgcaaaatactgtttcagaatgactcggcgtttgggcatgggggcatattatcagatatcccgtgaatcagaacctcgaatctgggtttctatctattacgcgcagtgctgttctctttgacaagataacaatatcattgaccaaggataaaggctctagcgaataactttagaattgtgtgactagagagccaaactgtctgaggctttattcatccgtgcgaaagtacaccaatagagcacattgttatgtagcacatgttacccctcgagtcctttattaccattaccctaagtactgtatacctcaagtgctacagcagctctgcaacgctccttagcccatttactgcgcattatactcgaccttgaccagccttgctcttctgaaggctcttccgaaaacgcagatatacttatgccaagcttcaccgcccatcactcgaattagtcagatctagtaggcctagttagcatatgtcaactcactcatcttcggcagcatcttactacagagcagtcatttttgcatccgatatactctgtacctttccggcagagaccgcaaagaaggagacattgagaacagtatgtcagaaaaggaaggacccctcctatctggtacaaaccccaccgagcctccgccctcatacgaatccacgacgcagacaccaaaacgcctaccaccgccgccgccactctctctaccgtttctccagacattgcgcacgagacgcgttatcctagcctcgcaatctcctcgccgccgccaaataattgcttatctaggcctccctcatgtcgaagtcgtcccatccaactttgccgaggacctttcgcacgaactgcaacctattgaatatgtgctagctacagcaacgcaaaaggcacaagatgtttacgcgcgtgagatcgtcaacgaggaaaagggcgagcccgcgctcattctcgcggctgacacaattgtcgtggagccgcagtctggcgcaattttggagaagccacgctcggaggcccatcatattgccatgctgaaaagtctgagagatgcgaggactcataaagttttcacagctattgtggcgatggcgccgctgaacagtgcgagggatccgggttatgcgattgagacagcgattgaggagacggaggtgaggtttgatggtgggttgacggatgagctgatattggcgtatgtgaggacgagagagggtgctgataaggctgggggctatgggatgcaggggttggggagcatattggtcgaggggattcaggggagtgcggataatgttattggattgccgttgaagacgacattgagagttatagagaaggttctgatcaaggcagacgatgatgagcggttgggttcggatggagaggacgaagacgaggatgaggagtagttcaaagaatcaatgtctgatctttttgcttggggataatgttcgggatacccggcttggttatgaatagaaaggaacctgatagaatggattgtgatgctcccgaaagttcgcgggacatggtgatagggagcgcatctgatacctgcaatgagatcgttgctcatacttcataacggactgcctggaggaataatcggaacggtcacattttattcgcggcagaaccaggtctatccttggttgacctaccggtgaagcaagtatacaagggcagacgcctaacatagaaaaacaaatctgatataaaatgacaaataaaaaaatcaagattggcaaaagacagaaatcatataagctccgtttacgccttccaaacccgcttgatggtctccgtcaggccgacgtcgtttgtctcgagctcgtacagaccgacagctgtagtaagggtgaagccgcgcaggagccagttcaacaatgtggaggtcttaggaacacggcgcgtggggaagtagtcgataatagaagccctttaaagccgttagatcttcgcaaaggagaatggaggagttggtgtacatactggaatccaacgtgcgagtgcagaacaaggagcgagcagaggacagcatccgtgacggggttgagggatccggcagcgaaaggagcaatagtgagagggatcaggccaacagcgaccagtctgtagcgatattagagttcgagatacctgctgcaacttgctatgttttcgacgcacctctcgaaagtccaatggtagctaccgtgcgaggggtggggtttaggaatgggagctgggtcattcactgcgcagaaagctgattagtatctcgagccggccatgcatgtcctgatattatctgtatctcgtccttctcgtagacgtacttgttccctggatggtctctgtaacaaattgttagcatcattttcagcaaacataccccgcccggccaaaatttccaaaccacttccacaacta

SEQ ID NO: 5195 - DNA, 3617 bp, Emericella nidulans
ttcaaagcattagttattttattgtcccgcacaacctccgtctccatcgctcagttctgggccccgtcggcttttggtgcttttgttgcttttgtttcacttgctagcttgcgagacatgatcacctgttcctagtttccatcccaccagcctctcggcgttaatcccggtcagctctagcgcactggaacagctgccaccggaatcagcgccacaatttctttctcttcagagtccgtcggatagaggcaggaactgtgcatgagagctccctcaaggctcctacagggcggcgcgttctggcaacccaatcacctgctacaggcctccaagtttctgtctcgaaaacgaagatctggcggattcgcagctgcttggttcttgtcggtttcggtgacagttcatgatctgtggcgtcaccactgtactcaaggcagggcggaacaccggttcttgctcaccattcgctaaaccgccaattctggatacgaagccattggcacgaaggccaataataagcacaagagttggagcggccatttctcttgctcacctaacggtggactccgtacatattattttttttgttggctgcatccgaccactgcacactactactccctgcacccggttcctgctgactaggccctggccaagccattttctctctacgcgcacacaccagtagaccgcatgaggatgtattattgcacgtggaaattagccctccagtccagtcagccacaaatattcttcaagcgaagcttgagggcaacccagttgtcctcgcgtgataacgagatgtcaagataaagacgcttccccagtggttcatgcttctactcacttgactaacagtgtgtacgagtcagaagacgtttctctatcctacttttgcagctgcatgcaataatacggcatagtgcgacagccttcgctgcagttttgtcaagcggccagtgaactcttcccgttatcatgcaatccgaccaggtagccccggtactcgcatgtaaaaagctgcacgttttgtcgaagcgtcgacaacccaacgtttgatcaagatttaacgggcgagcagatgcgatcgcactgcctaagcgcccagctgacgcgccctgactgataggacccatttccccagaaaaagacgttttccaactctactccatggccagtttgggtttcggcaagcacgcgccaattgtgttcgctcatttttcacccgcatcgctgggacttggccggcatccgctctctgctgttatccctggccctcggggttcccaaggtgttagttttagaatctggtatccgaagccctggatggaggaaatactatgttgattccctgccgtcaaacggccctttggtacatatcacccgttcaacaagggtccttgaattcattgctggatctactggggatctcccgcgaaagttttgtgatggcccaatataagctcacgagatgggccctgaatcctggcatgtaccgaggattcaccctccgggcaactctaaatctcccagacccctggccgccggttgccccaatgtttgtgtggaacctctctctaacctaaataccacttggtatcttctctagtattttgtctgtgatgaaacgcccattgtaagagtaagagagatcaggagtactccatacgcgaattcacccagcgtggactcagctagtaaaggggatcggcatagcggtccttagagacgcctggtctctcacctacagagtatgcagtttattgaacccgacttcgcccgacggctttcagaaattgagagcatcatggcctcaacagtcccaagcataatccaatagtgatcagcatgccttttgactggaacttgggaagcggtgcagatcatcgaggaagccggcctgcggaaaaagaaagggagaaggctagacaggatcggtttcgattttcgatcgcaaaattgcaggctaccactgaggctagtcggagaggtgcgcacagtccccttgctaagtccctctgggctggttgggcagcaggtcgcaggtctcgcggtcacatcctttcttgtcgcagtcgcggcgtcaaccatgaccggttttctggaagctgacgaagacgcctgaaaaagccacggtcataagatctgctcatgcacgaaaacgttgttttcgtcagtatcctccatagtcccgatacgagtagacgcgaatcccctcgagacttccgcaggctttgcagagctcgggcggcgtttgccattttgggacgccacgaaatgatctcggacgagctctggggtgagatttagaaggcaggccgtcttgaatttctatttgatgtggaggacgaggaggatggatgcgaaacagggcctactccgtagttactccagaattgctaacccccaaaatgacaactcgagcccgcagcccactcttcgccgagtctcaacgcctggatgggaccggcggtttccatcacaagacacatagtctgggagattacgaggagctgatatcatgctggggtctggcatccggcggccaggaactctcagacctcacaggacggttccatgggcgccagacacggatgtttcttgctctggcgataaggtcgatgctcgatcgacaacaataacagctgaggcgatggggcaggcttggatgaggcatatattcaggattccatacgagacgacgaagggaacagtcgttgtcagaggctaacgcgcacagtctactccgtactcaggctccgctcctaagcgcactaagagagctagtgcggcccagggccccagagactcgatgcgatgagcagcgcacatcatctcatcctctccgccagggacgccggcttcattggcagtcgcagctggccggtccacctggagtgctggatctcggactcgccctaacccctcaaataacgctggccagttgagaatgggatctgaagaaaaggcgagttcgattcccacggtgaaatcaccgcggggagacctcgacctggacgaggttgggccccggtagtatgaaattacgaataggatgaccacttgacgaatacttgatgtaagatggtgaagtccatctgtaaggactgaggatgggatggttggaaatggaatggcttgcttttgctgccctgggcgagatccgcttcccctcttcccaaccacagtcggcgcgggcagtcgaccagctccacccctgggcagcttagcaaccaacccatggtagaatgggggacgatgaccgctacgactaggcgtcccagtcccgaataagaataatcgtgtaatcgtcttgaatgtggaatcgtctgaatcgtctgaatcgtctgaatcgtctgaatcgtcctaattgtcctgattgtcctaatcatttgaaccgtcttatcgtacttaatccgtctactctgtctaaccggtcttccacagccgcgtcgctggagtagtatgcaatctatctggcgatttagttgctggaggctggagatccgacctcaacgccgttcgacccgttcgttggtcggtcggtcggtgggttggttggttgggtgaataattagaataaaaccgactgtggtgctatacctactactgaacga

SEQ ID NO: 5196 - DNA, 4174 bp, Emericella nidulans
ggatctcgacgcggcaaagcacattggagaagcattggctgacgagacgcgctcgaaaggcgcaagggttctgtaagtaaagcccgtagattggcagaggacgacaagagaatggcaagcagcgatggctaacactttccagattagcacccacagtctgcattcatcgccatcctctgggaggccgcaacttcgaatcgttcagtgaagatcctttccttgcaggaaagctcgcggcgcagtatattaaaggccttcagggcaacggcgtcgctgcaaccatcaagcactatgccgcgaacgagcaagagacctgccgattcacagtcaacgaacatatcacagaacgagcactccgagaaatctacctgaaaccattcgagatcgccatcaaagagtcgaacccgctggcagttatgaccgcctacaacattgtgaatggaacccacgctgactcgaacaattttctcttgcgagatgtgctcaggggagaatggggatggaagggtcttgttatgagtgattggggcggtaccaactccacggccgacgctctgaatgctggtcttgacctagaaatgcccggtcctacaaggtggcgcaaggtagacgaagtgcttgcagtcgtaaagtctggtgccgtgttggaggagactatcgacgagcgcgcgcgcaacgttctggagcttcttgctaagctgaattgtttcgaaaatcctactattccagaagagaaggccatcaatcgtcctgaacaccagaaattaatccgctccgtgggaagtcaaggcctcgtcctcctcaaaaacgagggcgatgttcttcctctgagaaaagagatattgaccaacaagaaggtagctcttctgggctttgcgcgagaagctctcattcacggcggtggcagtgcttcagtcaatgcacattatcgagtcactccagaagagggtctccgcgccgctttaggcgacactgttgagtttgaatatgccaagggtgcacacactttccgccagctgcccttaatgagcgacaacgttgttaacctagaaggccaacctggttggaccctagacttttttgcggacgaggagcccaacggcgagccaggctcatcgatctcgtccgagcaacccagctatataccgctctttgtcaaggaatcatggggaagtgtccgagccagcgcccatttcacacccacgcaaagcgggaaacactattttggcatgtctgggttgggccggtccaaactcttgatcgacggcgaggtcatctacgaacagaagctgaattgtccggactccatgggattcttactcggcggcgtggaagagccagaaatccagtattcattcgaagctggaaagacctatgcggtcgaagtggtttcggtgaaacccaccagcaagggcggtctcgctctgctggacggcttcattggtttccgtctcgggttcatgaccgaggaagagcacaatagagatttgctgtctgaagccgtcgatgtagccaaacgtagtgatatcgcaattgtcttcactggccatactccagattgggagacggaagggcaggaccagataagcttccacctaccgtccaacggttcccaggaccggctcgtggcagctgttggagccgccaaccctaacaccgttgtcgtgaactgcactggcgtagcggttgctatgccttggttggacaaggtcaaggcggttgttcaagcgtggttcccaggacaggaagccggcaatgcaattgctgacgtactcaccggcgctgtgaacccttctggacgtctacctgtgtccttccctcgggcgatcgaggatgcccctgcacacggtaacttccccggtgactacacagacgggaaggacaaccggcgccatctcgaagttacatacaaggaaggtgtcttcgtgggctaccggcactatgatctctctgaagccaaccgcgccaaggtcctgttcccgttcggctacggtctatcctacaccacttttacacatgcgaatcacaaagcaagtgctacgagcaggaacaccgtcgaagtggccgtggatgtcactaacgtcggcacctgtgctggagctgatgttgttcaagtctacgctggtgcaaaactggcagtcccagagaacccagtcaaagagctagttggtttcgccaaggtacacctcaagccgggggagaccaagactgccaatatcacattcgaagtgcgccaactgactcacttcacggagaggagcggcaagtgggagctggaatcaggcgactatgaaatatcaatcggtcagtccgtgagggatatcactggcaaggtggagattggtctggaagcccagaattataaaccttgaacttttgtagctataccgaagcttaatagcaatgactgattccgaatcttattttcagtttccacagttataatagtagctagtagagtgagagggtatcacatgacgtgctttcaagattcctccccggccgagctcttaagaccttcttcctgtcagagcttaactggtccattcgccgccagtacaaagctgccccgcagattgtcccctgctagcaatggaatatcatctcatgcaatgccgaagtttacgcagaacacgcgaataacaggttcgtggccttgagaggcaataggaagcgtggttctgacatatgctaggacggatcctcccgagaaacatgaaggatcacaacagtggttgaaattgcctttctcccggcaaatcttcggcctttctctcctgactcgggatccatcgttggtgactcagtgtcgccgctgtggcacgaagtctcgaccacgtccagcctggcagcctggagatctggagaccccagctatccggcaccactccacggggtcagcagatttccccagtccccacgcatctgtctcgttactccaagaactgccgatttagagaaactacggagtccaaggctggacaaaactgcaagaccgtctctcggccccgttctgtcggttccgaccacgcgggctccccagacgcggcctcgagcatcactgcgaatagagttttctgggtccagcttcgtttagcttgctggcgcccttgtctggtttccgatgccggtgcggagtccggacacacccgtttggtttctactttctcgcatcgtccgaatgcaggcatttttccccccggcacgagatacctgcagttagtcgagaagtctggcgtcatgcaatctggggaaagggaagataaatagctcgtcgtcccagaagtgagtatttcatccacatccacaactagcttcttcatccatcctctctctacacattcttgctccataccattattaacaatggacaaaggcagcgtcgacatggttgagcaagccgacaagcagcagctcggctacctcgccgattcggaagaccagaagctgagcaaatgggacagccttaaaaagtacccatggaccttcttctggtgtctctatgccgtctggtgtgttctcctggtcagcttcgagaaccaggcagctggagtcgtcatctcaatcccgcaattccgccaggatttcggcagcttgtacgaagatagctatgtcctcgatagcaagtggcaatcggccttcagcggcggtcccgtcgcttctgccgtcgtgggcgccctctcctctggtcaaattgcagataccttcggtcgtaaatggacaatcctcggcgccctgttgatctccgtggccgccgtagcccttgagttcgtatctaccacgaacgagatgttcttcggcggaaagttcctcaacggcttcgctctgggtgctctcgcctccatccccgtcacctacgttggcgaaatctcccctatagcgcttcgcggaacgctcacttgtctaaccgcattggcttactgtattggccccttcaccgtcgccctcattacaaacaccacaggcacctacaccacccgctgggcctatcgctctgttttcgccgcccaatggggcttcgcagccatcgccctctcacttgtacttttcatgcccgagtccccttggtggctcgtctccaggggccgggagtcagacgccctctccagccttttccgtctggggtactacaacggcgaacaaaccaagagacttttcgtatcaagacaacact

SEQ ID NO: 5197 - DNA, 2160 bp, Emericella nidulans
catcagcaagtctagacggtaaagcttcccgtcaaccggatatcccgactcgaagcgcccacaaagacctcaaacgtccccgacgctactacccacttctgcagcccaacatcccagtagctgatatcccggcgtgtaagctcaaatgtcgcaataccgctttcaccaggcacaaggtgcagcttgtcaaaaccacggagctgctttggtggtattgacggagcggagtcgggatatccaatgtacaactgcacgacttccgcaccggccacatgacctgtgttcgctacataggcactgactgttccaatcggagcaaagaggtcagacggaccgccgacgatcgtctcgcctgttgttgggccgggtgttgttgatatagacgttgagagggttgaatagttgaaactcgtgtatgctatgcacaaacaaaaatattagctcactcgatctacactcgccagccagatgttcacgaggtgggttgagggggaaagcatacatagcccaaagccaaactcatatctcggctcgattccgtactgatcgaaatggcggtaatcaatgaacaacccctccgcaaagtcatcaacctgacttgtcgtccagtcagccccataatcctcttccgacttcccgatagtaaacggcaacttcccacttggcgcgtagtcaccgaagaggacatccgtcagggcatgtccgctttcctggcccggcagaccggcccagacgactgccacgacgttgggctctgcgaggatcgtctccagtgtcacggggccaacgctgtgcaggacgacaatggtaggagtgttcgtgcgggcgacagcttgcacaagcaaatttccattgtgccagggatcaagattgttgcggtcaccttcgtggccttcgacggttatgtaccttgtagaatattagtctgaagaagcttaaggaggaagggaaacgatagagcacgaacccctctccagaatcggaggtgatgaagacgatggccgtctcagcagcagcggcagcttcagcgccggaagtcgcgtcatctgtcgtgctggtgataatagctgtcccggctccggcgagtttctcctcgattgcatcgagcggggcgacgaggtactatagcagttagcattatcaaagtacccagtgaaatatagatcatacaggaaactcggctgtcccacttccccacccctgcgcaagagtccccttattacatcctcgatctgcgcaggcattcgctccatctgggttgacaatcgcatctgatccgatgaccgcaagactagccggcttcgccagcggtaaggagccattcgtgttcttcagcaacacgatcgaatcccgggcgatagtccgcgcgagttccccgtgctccggcgttgtgacattcacacttgccgcgccaccatcccagctactaaatgcaacgggcggatggccctggtcttggccgacaaggtaccaagcagcaaggattcgcgtaaccatatcgtcgagtctctcttgagggacagacccgtctgcaatcgcggctgctagattgtcaccccagtagatcgaccccggaggggtggagaagtcagaaccgggcatggtcatgtcgaggccggtattcgcgctctggacggtactgtgttgcgcgttccagtcggagaggacatgacccttgaaccctagctcgcctttcagcagcccattgaggagcgcgtcgtgctcacaggcccaagtcccgtttatcttgttgtacgagcacattaccgatgcgacgtttgctttgacggcgtcataaaagggccataggtagagcaaatggattgtgcggtcatcagcatttgagctgattgtgtcgcggttgtattcttgctcgttaagaaggtagtgctggacaccggacactcagcatcgcacatcacatatcgcgctcccgcagcagaggaatatacttaccttagcacaggcttgtactccactactttgcatcccctggatcgcctctgccatggctatccctgccaaatacggatcattcgagaaaccctcccaattgcgtccagcggagggtatctttcccaacgccccagcgccacgaccaagctggacatggacgacaaggccgagagactccgctcccatggctacgcctcttgctcg

SEQ ID NO: 5198 - DNA, 5231 bp, Emericella nidulans
agtatgactttcagtagactgtaatgagctgatagcgcttaaccaatagcgacatgcacataattattgacatcgcattagccgtgcttgccatcgttattcgttgctctcgtggcgacccaagacggtcactgcaacaatttcggtaaggccccacgcttaaagtcggcagggaacgcaggaacctgatagatatacaggggcagtatgtagcgagccggttggctaaacgggctgcgttcttgtctcatatttcgtcaacctgccggatgatgaggtaggataagtagtttatgctgcctactccaaccggatgtaacttaatcgacagtctattactatatacgccggggtaatcatccatccaagacctgaccgagtagacagcatacaaccaccggtttctaaattcgggaagaggcagctcagaatcataccacgcgtcaatctatttcctcctcctctcagcatagtctcgaatcgcctgctcagccctctccttccaaccctcctcccacctcgacagcgccgggcgatcctccagaatatcctcacaaccccactgcatccgtgcctgatccaaagctcgatcaacatcatcatctgggcagataatgtagaatgagcccctctgcaaccccctctccagctcctctgcaacctgactcggtgcccacgaccctttcatcttcttgatctctttctcatccgtcggaccgacatttcccattaacccagtccatgtccatccaggaacaagcaagtgagctgagatatgtgctgaggcactgtcagagcggagatcgtgagccaggtgttcggtcaggatcttgattgcgcctttcgaggaattgtaggccgggttgtgggcgccaggcggattggtaataccttgcttcgagccagtgatgataatcgctttggccgaggacgggtccttcttaagaactgggaggaccgcgctgataccgtttacaggcccgaagacgttcgtgtcaaagatctatggcgctcacattagcaaacagtaatcccttcagaggaccctctgtaaatagccccaacctgtctccaatactctgcgctctgaacccacggatccaattccttgggcttcgtgccccgcgccgcattcaagaggacaaggtcgagagtcgcgaaagatgactgcacctgagcggcgatactatcccattgcgacttgtcacccacgtcaataacgtatgcttctgtctttagcgatgagtcagttgactcagataccagcacctccttggccttttggagattggcggcgtcgatgtcgagcagggcaaggtgcattctccgactgcggcagagcttcgcgacggcgaagccgatgcccgatgctgcaccggtaattagggcggtcttctggctttggaggactgcggccattgtagttatagctgctgttgggaacttgtagcatcgtctgcgctgttgacgcgggaatttgtagtgcggggaatgcattcggagatagcggagttttcactggcgtaggtgtaagctatactggagcatagataaccatagtagtaaaccatatttagggagacacagactaatcttcgacatgatagactgaactgaacataaaaatacatgttcgtcagcggattgctggtattgtttttgattcgagtagagagacatatttcattccctcgatgctctgttatgcggtgcatcgaccaacaatgtcataatgcacctgtcaagcattgcttcctatagatatagtgacacggggctgaaaggtcaggccactaactttgccaatcattacggctccctagacatcgagtcgcgtccaggatacacccgtgacatcatccggatctttgtttcaccacattcttcacatgatgccttcctgacatccgcaccagcgtagtatttcttcgcctggaatagaagacgctttggcagtaggactcgaaatcgaagttacttcctctcaaccaagcatatatacccagaatgtcggcctctaacctcccattcacctgcgcccttgtcactggcggcggcggcggcatcggcaaagcgttctcagcctatttgatctccaaaggcgtcaaagtcatcatcgctggccggacagaatcaaatctccagtcgacagcacgcgaaatcggggcagcagcatactatgtgctggatacaggcaggactgatacaatcccccaatttatctcgagcgtaacaagggagcatcccgagctggattgccttatgaacaatgcaggcgtgcaacggccgttggaagtattcaagaccccaaccgaggagtatctccaaaaagcagaccaggaaatcgatatcaatatccggggcccaatgcatctaaccctcgggctactcgagcatttcaagacgaagccgtcggcggctattatcaacgtttcctcggtgctaggtttcatacccttctcggtgattaacccggtttataatgggaccaaggcgtggctacatttttggacggtgactctgaggacacagattgagtgggcggggctaaaggatcggatcaaagtgattgagattgcgccgccgagcgtggagacggacctgcatcgtaaagggagaatccggatgataataagaagaagaacaatccgaactcattgagcatcgaagagtttatgcatgaggtgtcgccgcagttggaggcgggagaggagatgattggagctggaccaagtgcgaactttctgaggaagtggtatgatgcgtatggggaggcgtatactaaggccaccacgaagaaggcctgaaagactgcttcagtttgctggttggatagtggttggttggtgtcattgaacctgactggtgtatcagatttcctgtggtaattccagattggataagattgaagtacacgatctggaagtctcttcctccgcgtaggtaattgactggagaaaaaactaagacttgagggtgcatatagtgcctagattacctaggtcacatgcgctctgctgccttctcaaccatagcaacaacacaaagacaacgtctagagaaacaacccgacagtcgaccaaattcaattcagccacaactaaatagatgagaagtcgagctcgggatcataatatccgttcaatcgcatgttgaaagggtcaaaaaagaccatatcagattggccaggttcagtattttgctcttcgctcctgtcacggtctaacacactcgagcttgtgctaggatacgagagcgccgtttccctttgatcggaccgttgaattgttgtttggtagcctgccgcatcatcggcagcctctttatctctgtacaagtgcggtaataccgagtgtttgaggcgagaatgttctcgtgcagtatctgaattccccaggattggcatctggagaagatcgggcgccagacaatcgccctagtgcgctgagcagacgttcggtattcctaaggcagttgattgcactggcgtatacccatctcaggggtgcggcaagctgtaacgccttgttgagcttcttcttcagggactcaacactgttttcaccgtgttctgacatgaggtgaggaaggtgatgcaggatctgagttacttgatatatcgatactgcaaggaattcgtcgccaaagtattcgctggactcaagatgatataagtcggaccacagcccacaaagttgaacagccatactaaagcacgcttgctggcagtaatctttgaaattcgaaggcgtccgagctagtgactcccggatcccaggaacacagaagcggtagagatcacaatgacacatcgtccaaagcgcatggagaccggcataggtagcggcctcgcgagagtggcccatgaccactagccgttgcggagtgagcttgagctcgggaggaagggtccgttcaaatgtgttgagctcggccagaagagcctccatagcggcgctgctctcagcaggactattacccatcctccggacgcctttggtgtacttgtgactggttaaccagggttcttcaacgagtgcatttgcaaatacttgcctcaagattctgtcccttattgcgaggagcctgagtttaaatgcatgagcgtcgacatttgcttcaggttcgaagccaacgtcatcgagaaagctcgcctttgacgatatccccatttcaaaactccgctcgtcgcacggtaaacggatatgcattctttctacagggcagacagccaagtcctccataccatcggagtataggcgatctagttttgtatattgtccagacaagccgcctgcttgactcttggactagaggatctaatccttcatgctcataatccagtcgcattgtgaaagccgagcgagcagcaatagccaggagactccgggcgtctgagaaattgccggcatgaaacgaaagcgcagcgaagtgaccggaatttttcaggtgagcaatcgtctgctctatccacttgaagacataatcctgcacttcctgcacttcctgcatcaaagcccgagccgttgcacaagcctctggtcggtggtcactcacgaacagcccaaatgccatgatacacttcagcaattgctgatcaaggaaatctttgctccagtcagctaggacacttggcttgtgaagaaatgccgaaagcgttttgaatgcgaagtcaaagtaagcatcgagataatgtcttgccgttgctttatccaacgaccacgttatcatgctagggctaatactgattgtcgtcctcggcgtggatacgctcatcaacccgtcgtcgccgttggtggcaaggtcgcaggatatgcctctggagatgcacctttcacagggacttgttctagaaaatatcgctttgcgaacccgacaggctccgcacgccagccgagttcgtttccgcttaatgccagcctcggtataacttgccgaattcctgttttctggtataggactgattgatctcctgtgatacgagcaatgaagttttagccgcgtacaatccccgaagataggtcggccacggtcgcatttgaccttccgagagcgacaccgattgcatgctggcaaggcgttgataggatgaagccaatgccttggatttcagaggcctccccagagacagcagcgtaatttacatggttaggacataaagatatggtactgttgagtaggagaaagggagcggatgtcggcagcaaatagagccattggaacccccccgg

SEQ ID NO: 5199 - DNA, 7147 bp, Emericella nidulans
tcgcgtaattgtgactactagccgtttctcatccagcgtggtccgcaagtaccaggacttgtatacacaggttggttctcgcgggtctgagctggtcgttgtgcccttcaaccaagccagcgtgcaggatgtcaccgcgctagtcaactacatctatgacgcccagggcggcctgcattgggatctcgatcatatcctgcctttcgcggctatgccggaaaatggccgaacaattgaaaagatcgacccacattccgaattggcccatcgaaccatgatggtcaacaccgtgcgcctgctcggtgctgtcaaggctcgtaaagaagcccagggctcgcgcacgcgaccaacccaggtcatcctgcctctctcccccaaccacggagttttcggtggagacggtctgtatagtgagtccaaactgggtctggaggcactcttcaaccgttggcactcggaagactggtccgactacctttccgtctgtggtgccgtgatcggctggaccaggggaacaggtctcatgagcgggaataaccttgtagcggaaggcatcgaggagctaggatgtcgaaccttctcccagcaggagatggcgcagtgcctcctctgccttatgttcaacacaatgtgcagtctttgcgaggaggcgcccctctatgccgacttatctggccgcatgggcgcggtgcagaacctcagacagaaggtgcaggactgcgcacagagatcaatgagacagcgaacacgcgcagagctctcctggaggagctggcgatggaagccagatgctctgaggggccaacgcccactattgactctgaacccgcgaaagctacggccacccccacccttacagctcacgttcgtctggactttcccccgacagtcgactacaatcaggagattaagcccctcacggccgaccttcagggcatggtcgacctcgaccgtgttgtcgtagtgaccgggtttggggagatcggaccatggggcaacgcacgcacgcggtgggagatggaagcctacggagagttctcacttgaaggctgcgttgaaatggcctggttgcatgggtctaatccggtatgagaacagttcatcaccgggctgggtggacgcaaagacaaacgagcgcgtccacgaccatgaggtcaagcacaaatatgaagagcatattctgtcccacacgggtattcgtctcattgagcctgaccggttcggtgcgaactaccaccccgagcacaagcagctgctgcacgaagtgctcatccaggaggacttccccgagttggaggtgcccgaagctaccgcgcagcaaatgaaactggaacacgggaataaggtggacattatccccgacccagaagggggtgatcagtgccgcgtggttctgaagaaaggggcaaagttgatggtccccaaggcgctgcgactagatcggatggttatcgggcagattcccacgggctgggatgcgcgcaaatacggaatcccagaggatgtgatctcgcaggtggacccggttaccttgtacatgctagcctgctcgattgaagcactgctctcttcgggaatcactgacccctatgagatttaccggtatatccatgtctctgaagctggaaactgcgttggctcctccctgggtggcttcaactcgctccagcagatgtatcgcggccggtacatggagaaggaagtccaaaaggatatcctgcaagagacattcgtcaacaccatcggcgcctggatgaacatgcttcttatgtcttctgccggcccaattcgcactcccgttggcgcctgcgcaaccgcaatcgagtccgtcgagctaggatacgacacgctgatcagtggaaaggcaaaattctgcttcgttggtggcggcgatgatttcggcgaggaggtcctctatgaattcgccaacatgaaagcaaccgccaacacggtcgatgagttcgagcagggccgcgaggcctccgagatgtctcgccccgctgcaagcacgcgcaacggcttcatggaatcccacggctgcggtgttcagatcctcacaaccgcaagactagccatcgagatgggcctgcctgtacgcggcgtgatcgcctttgtggagacatccagcgacaaggcgagtcggtcagtccctgcgcctggaagggggatcctttccaaggcccgtgaggtgcgatcctcctcgccctcctcttcgctcatttcctcgccactgctcaatatttcgatacccgcaagcgcctggactttcgcaagaagcagatcgagttcgcgcgagaaactgccctcgaggagctacagcttgaaattgcccacgttgaggaatccgaagtcgaggattatatccgcgagcgaacggcacagattaatgccgaagctcaaaaggatctcagaaacgcccagtaccaccttggcaatgccttctggcaaaacgatcccagcatagcacccctgcgtggagcattagccgtttggggtcttactattgatgacctcgacgtggcctcctttcacgggacatcaacgaagctgaacgagaaaaacgagtgcagtctcatccaggcacaactctctcacctcggtcgcgcaaaagggaatgtcatcctcggcgtcttccagaaatatttaactggacaccccaaaggcgcagccggagcatggatgctcaacggcgctctgcaaatcctggacacagggatcgtaccggggaaccgcaacctcgacaacgtggaggccgaattacaaaagaacgagcaaattgcctttttaaatcggtccttggacacaggccgtggcagcatgcgcgcggtcagcgtcacttctttcggattcggacagaaaggcgcacagactattgtcgtgcatcccaagtatttatttgcgacgctggaggagcaggaatatgaggagtacctggacaagcgtgcgaagaggcagaagaaagccgattcgttcttctatcgggggttggcttccaacaggcttttcgagctgaagactgccccgccgtgggcaccgcagaaggagctggagacgctgctagatcccacggttagattttaggcgggggaatgaattataagatattggctgttattgtgcgatggtcctgggctgggtttcttttgtcctttatgactttgcttttggatttggagttctgcatagtaatgaagtattcaataatgtatatctcaattgtgaatcgtgttgcagtacttctttctggatgtaaacgtactggactgactactgctgagaatgacatatatatagatgctgcggaaatgggatctatccattcatgccgcgatgttaggcaacagcatatctatgcttgtgccagcctccacaaaccaatgttgatgatagggtggctcggtaagcctatctgaagcaggatgtagtcgatgtagatcaaagtggcttgtagatcaatagtgcaacaagaatctgcagtaagacggtcaaatatataacagtatgttcttactctactgtcttgtaggaaccgtagacctgaagtacaatggtttaatggcgtggaagcatatcggaatatatatatatacgcacatttatcacctgataccacaagactacgataaagggtgcaattcaataaacaattgttattaagacaccaaatgtaatcaacgataataacgttaaatagatcactcattaaaccaccgtacgaggcctgaactcaaccagaggaccctctttagcggccgtgatatgcaaggccagctggtactcagcatcctcatttacgttgacaccctgaggcaaccgcatatcaaaagcatacaaaatatggcacagtgtcaaagtcaactcaatatatgccagcggccttcccatacatgcacgaggccaatcgagaagggagtaaagccggcgaacggcggaataatcgctgcgatactgctcaggcaccgcctcgggtcccagccaccgttctgggacgaacttgaagggctgcggatagatttctgggtggtgttggatggcgtatacgcacgtgcccgcttcaagaccctggggtatgtactgtccatcaacggtggcaccgcctgcgtcggcctggcgccagagtgggcctggagcagagggcgacagacgcatactctcttcgatgactgcgcggaggtacgtgcaggaatttacttttggaccaagaccgatctcggcacgggattggaatgtgctgcgaacttcttgaacggcgcgttcgtagactttggggtggttgcagaggtagtatatggacgcagctagtgcggtcgacgtggtatcggtgcctatgatggtttgtcagtttcctacccatagagaacgagatcctattagaatacctgcgaccactaatgttgcgctctcgccgcaaagctccttgaaggaaaggggctcctgggtttcgggatcggttgcatcgcgaagtaaggcaaatgcccccttcaaggaacctttggctgacatagccattccctgccgaatgatatcgttgacaaacttgacgaactgattccgagccgcaatggcagcggggaagaggtatttatcaatcttcatattcttcgatcctccggcctcgatcaaacagccaacacgcacattggacacttctatcaggtgaggtacatttcggtatgtcttctctgtgagcgatgaccagggaacgccgaagatcacactgcacatgacgtcaaatgtgaaccagtcgcctgcgtccatcagttagggtcaacaacttgatgcagatacgaggattaacttacaccagtgggacatgttcttggccggcccccagttcccatctggaacaatttcatttgaatcgtcgtcacgccgacgaagtgccgtgcaaagctgcgcgatcttttgctgaatagtttcctcgtagctgcggaaggctgcgtcggagaacgcctggctaatcaagcggcgcttcttgccgtgcttgcgtttgtcgattgtggtcaaggtgtttgcagcctggtggaccatggcattgtatttcaccgacttcttgaaatttctgccgtgggagtatatttctatggaaggtcagtatgacctctgggatacaatatattccagtgttggaaggcctcatcacacctttcagtcccgcagcggtgttgatgctcagctcattagggccgtaacgtacatatgggcctataatagagaaatgtcagctgttgctcactccgaaaaggattcaatgttacccaccatacttctcatggcagcgccacatatcaatgtgctggtcacctttccatgagtgatagaccgcatagtagttggtgagcttgcccagcagaggtcccgggtacttggagtatgggtggaagtacaaccgacgaacacagaaaatggcgaactatcacaccgtcagttggtagtcactcagtgggatatattaaggcaaggtggtcataccgcaagcacaacaacacccatccacaccgcgaacgcggccaggaagttggaagtgccaaagtaagtaggcagcatattggacttcgtgtcttgccctctggattcggatatgttctgtcttagcagcaagagactggactgagtcaaatacccgaaaggactggacgaaatggcatcatgagatgccgggtcgatgtgctcaacctcgcaaccaaccctgcaaccccacctgacaagccctgctaccttcattttccgtcgtgattgactcaaacttagccttctgaacgatctggacccagttcagctccaagattgaatccgttattcgtattccgtcattgcggttggaacatggtagaaaagtatgaaggatgaaggatcggtatccttgcgtacttgcgatatgacgttctgtacagtggcttgtatgggggccaaatacggtattgaattatcgctgggggtatgtttttgtctgtaatcttagtcacatctcgttcccttgtagatctatgtatctccatggaagctaaaaggtagtctacagccaggatggcgccactaggaaaggttacatcacagcgtaaaagagcaagagcgttatctcagagcttggcaactgaaatctgttactcttccgccctgtgtatacagatgaactgcgctctttgttgcctttttagtgacccaagtgttaaagtctcactcacacgttcacaacgaatcaaatgagcatggctaacccagagcgctcgtacctttctcgttttttctcctcgcagttctcaaagcttccatatccttcccaaagcttcaaggatgccgtaatcctagtgacaggggggaatacggggctcggtctggaggccgcacgacacttcgtgcggtacaagcggccacggttattctggctgttcgcgacttaaagaaaggagagcaggcgaacgtatcgattgaggagtctaccaaggtacaaggtgtcgtcgaggtatggccgctggatctagaagatgtccgcagcgtccagagcctggccgccaaggcatctagtcttcctcgtctggatgtggtagttgcaaatgcaggtatctcaaccaacaaatgggcgctagttggcgatatggaacgaaccatccaggtgaatgtcctgtcaacatttctcttgatcctggccctcttgccgaagatgcaagagcaagacatagagggccagatccgtgcgcgtccccgcgtcgtggttgtctccagcgagggccacgagacgacggctttcgcagagcgaaaagccgcgcggattttcgacgcactccgggaccagaggcaggcaaacatggatgaacggtaaggatccccggatagcaacgtggacgctattttttattctggtggagcccgagtctccatttggaacagctagattgattgattctcagctacgatacatccaagcttatccagctctacctcgtgcgtgcccttgcagagcgccttagccggtccgacaaacccccggtgacactcaacgccgtgtcgccgggattatgcaagacgggacttcttcgcgagactccgcttgtggctcggcttctgaccggtcccgtcatggctatccttgctcgaaatgcagaggagggaagccgaacattggtccatgctatgcggctaagacggc

SEQ ID NO: 5200 - DNA, 4211 bp, Emericella nidulans
ttgaaattcatgtatacacacatacgatttaggtgacactatagaatactaggatccccctcgggacaaatttggccttacagaaggtgggtacctcacgcgcatgatgaacaaagataaactccgcttcccggtcgatgtctacccggttgctgggagatatgtcacgagtaacccggtctccgagaaggcgtccactatcccaccgccctgtccgccgcgtattcctattattacctctaccgacgatacggggacaggagcgggaacagtctctgcccccgagaaataccctctgtggcttgatatccatggaggttttatccaggtcctttgggatcttgccgtcggcgccatcgttggcactgttgccgtgagaccgggtatatccgcgaaacggttggccagcgcgattaagccgacaatgggtgattgggaggtgctcatggtgctcgaatggctgactgatgtaggagttgtgcggaagagcagcggctgtgctggtcctggtgctgatgctgatgaggacactgacgaagcatgttggtttgttagggagtggtggtggatggtcttaagttaatgttgaattcgctgtatcatcatcccgtgtaccaatagaaacgctgtcagagtagttgtagaagtaatactacttttaaaaaagaatgacattcaattcaacggaaatgttcttgagctctgggtaccctctcttaatatatattgcagcaggctgccactatccaagtaccatatagcattctgagagcaaaaatcaacaacgccgttattgagccatgaagatcgacaatttctcttaaagtatttcaattacattcatttcttctggcagaaaacttggctggtggcaagcatatttgacttcgggccactttttttttatccataaacctgtctcctctgtcgctcctgcgcgcctgggctccagaaacttgctgacggcgtatgattgcgctggttgcgcctgtagattccggcctagtggttcttcctggtgaccgtgggatagtggtagaaggtctcgacaattcgttggcgctgtgaaggtagagaagcaggtctggattgagtctcaggcataggtaatagagcccattcgataaccaggagcctctttctgttggcctagggtagctatatcagttaagcacaacagttaagcaaaggccatcagtccaacttcatgctcatcagaacaagcttgtctcatcactgacttcatggaagtctgatctgcatctagggtccgtataaccgtttcatctgtttctgtaagtttactgataaaaaatctgaccttgctcaactgcacctctatgggcagattctgatgatggcttaactgcgaatcttacacggtctcaaaaacaaaaattggaacttgctcgcaatgtcttcgttcattcacatttgtagtatctcgtcctgtccaaaatatgttttgcagaacgaacctgaggaacatcaggtcatggattttcactgtcggatatgagtattcaatatatggcgctgatgcggctactaggatcgtgaggaatgagtgccacttcttcagcaggtaccctggaaccgcatattgttgcataatacgtatagctcgagacttatggtgttctggggattttatttggcgtgcagcatcataataaccaaagccaggggcagtgtggcagatacggtactcaggacgcgccattcatggttagacctatatttcatggagtaaagctattgacaaggagtgggcagtgatttagtcatcaaaggcatgcgtgagtgacacttttacctatgcagacagaaacttatgtaccaggggtcagtcagggttagggctggcctgaactgggcagtgaaggccgcgatgcttgctcctccaattggaaagggatcacgatgcctcgggcccaacgagaattcaagcgagcgagcttctcattcggatggagcacgcgcagtttcgcctcttactctgttctaggctgactacctatatacgtatctgacagataatactgtgacagagtacccagactaaccactcccatcaccgcctcatttgatatacctgcctttagacccggatcattatctatatacgcgactctgtctgaataaaggctctacgaacttttgaaagaaataagaaaatgcagtcctgcgacatctgccgcaaacgcaaagtgaaatgcgaccggcgtaccccgtgtgcccgctgccgccgcctacgccagccatgtacttatactgatatcctgcgcaaaaaggggccaaaattcgtgcatagttatccacggatctatagcacagcacttacagcatcaggctcgggctcggaatcggtgtcgactcctagtctgatggggcctttgaccacttcggtatgcgggtcgagtgagacgctgccactaccgtccttgatgagcagaaatgtgggaacggatttgggtgtggaggcgtctatacagattcattcgagctcggggatacagtctagtgttgactcgggagcaggaacagcgtcagagccggacgaagaattgaacctagacctggactttgactttgaagatgtcccttcaggccagcagcttcggcctccacaaaactcaggcctggacagggctttcaatccggacgtccctttgggttccttaggtaggacggcgggattggagacgagtctggaaggaatattatccgtatatatcgaaaaactgcacccgctttttcctgttgctgatcttcgcgaaatccaggataccttgagagctggaggttgtggccagaactccaattatgaaaagaattatgggtttgatccgactcaatacgcattactgtgttcgttatgtgctgtgacgtatgcgcaattgactttctcatccggacgaggtttaagctcttttcctgctaccatggatcaaattcagggacatgagcatgcatgtctgaaatacctccaggcagcccttgaggcccagaggcagagcgaccacccgcaagtcaaccataaaagccgacaagggcaggccaacggtggttcagtcaaaagcaaagcccgagacaagatcctcacttccttttatctgttcatgacgtactggagtctcaaacagatgacgcacgcgtggtggtacctcagggaatgcatcacgttgctcctgtctgtccgcatgcatcaagaagaggagcatcgaaagttggacatgcgcgaagcggagacgagtagggtgttgttctggggcgtgtttgtcgcggagcggtactttccctatttcgtcacacgtctttgcttcttcgatgaacgtagagcgtcagttgggctaacggtaggctcatagaactttctgcatcatccatgacaaaccagtcacgcttcggccctggataaatcttccaagggtaccgagtcttcttgacgaaaaggaacatgtgaccgcaatccctggatttgtgcgtctggtgactcaatttcgggggttggacgttgatttgtccggttgttggacagcggcgggatttgttacacctatctctcgaagtctgagtcatggaacgggagttaccaccgctactaccgatgcatcaagaatagcagcaggttacgagtatgacgacacgggtctcgaaacagaggcatggatacccttgcagcaacttgacctcgccatcacgagagagtggctgcgcgcagagatgtggaaactgggaacccccggtcaccagcagtcttcatctccgagagagtttgtggcggcgcttgtaaaagaagggggacaatggcggctggaggagccattgcttataggcaaggctacactgggcattttacagagtatggaagaaattctgcaagataactggagtgcaatcatggtttgtcaactgggatagccccatcaggagacatggccatgaggctgacggatgtaggacgagaagctgtacgacatctgcgagtgcctgtgcgacatccggccggtcatacagacaagacaaaatggagttagagatgtcgaggtcgagatcaatctcgatcaaattctgcgagggcttctggactgtttggcaaggcttagagggcgtagtgcttacttgctggcgtcgcgtctcggagattaatgtccaatcttgggagcaaaaacagatccctatagtagtcgtattatcggcccgaagtc

SEQ ID NO: 5201 - DNA, 1399 bp, Emericella nidulans
gtatcgccatatcactaacgactccatttcgggacagtcttggcaatcgccgctgagcacagacgctactggaattccacaagcacggcaacgcaagccgccagccagcagcttctcttgcattctctgggtgggtaacataatacttttggaaaaggcgacccaagctaaaggtaccgactcctccctgtgattcagtcaactgcagattcccgctgatatctgtcttttgtcaggctctgcagtgctccgtattcctccatggcattattagcgaactgaattgaatcaatcccgtcactcccccgcataacgcgacctagctggctgctgccatccctcgatttgcgacgatactccgcttaacctaccgtatctctatcgctagagtaggacagctgcttgacttgttcgcgttattgtatacatactagagtttcttgttgcaccgcgtgctgcgcttcaaatctgatgtttgtggcacgctcctcgcgtggctagacagttcggctttcttcccaccttccttcccctctcgtgcagcgctcgcctccgcttcccattcaggctgactgggaagaccagcgacctgcgatgccagtctatcctatccggcggcgacctcgcgaatgcaaaacgtgtcatcaatgtcgtgcaagcaaagttcgttgcgatcgaaacgcaccatgtagtaactgtgtcaagcgcggtttcacctgcacctacaaaccgtcctccgcctaccttgattcctcctcggccatcaattgctcctgaaagcttcgcagtcgcagcggctctaaatagcgcacctcaggttcagatttcgccaacctattctacgataaaccaagatgttctctacgccggcgattctagtgtggacgattcttcgttggatacaatcacaatttcacccatcgagtgggaggaactgaatagcaagatgcaggagatggcgcaggtcatagagagcatgaaatcgatcgttcaggcacattcccgcccaccgccgcggcagagactaagcaatccactatccgacgtgtctggcggaggattgattcggtcaccgtcgcagcagagcaacatatatggatcaaccacattgaaaacaggatcggtgcatatagggaatcgctctgcgttgcatgatattctggacaaaacgaaaggttctgtaggcccagcgcaggcgctgccgaaggacgatttgctcgctgaattagccttggagaatgacaacagcggatatcctttccttgacctctggtcgacagatccggtacactttaataaatgatgcacatgtgatgtgctttcagatgacaatcaatgctcagagtgattgacagccactcaacctggtgcccgtcttttgacaactcccgaggttttt

SEQ ID NO: 5202 - DNA, 5304 bp, Emericella nidulans
ctagccggcaactgcagtgctgatcgactccaacaaattcgcttgatcgaatattattgaactcaaatccggttcacttctcgatgctttgccttgatggacatcgctccgcatcagcatcgtcatcgtcatccttttcagagtcagaggtgcggttgcggtcggacagccgccgggtctttgcagcgaccactcaaggagtctggctggctggctgactcaggggactgccaacagggttgcgcctctaccaggctacagggtatctcagattgtttggagctgatgaggggtgattcgtaaatcgtgatactgcaagccgctaatcgggtcgctgcgagtgacaagtctgttttcctctggtggcctgtttaggtgagcttgctcaccgacactgacctactaaggcgagacaactattgaggcgtcccaaccgagcctatattccaagtcccaacctcgctctcacccccatcctcatccccattccagcgcctgatcaaagcaagtggcactcgacgagtcgatggacgctttgataacgcaggagcctaaaaggactcgtcaactgatccagatggttccccaccagagtccagaccatcccccaactgatttctttgctgtgggttgctaactatatatgagacacgaggcttttgatatatatacggcagcggctggattgtggctcttatgtccatgagatgggcggtatcgtattgagtctgtttgtctatttgtctgtttgtctatttgacgacgaacatcgtggtatacagagtagttgacaacaagagccgacagcctgccgcactgtactccgtaccctatattttggagtaactctagtctagtcgccgtgctacgacgcctcagggtatgatggtatcccgtagatatgtcgataagggagcggcggtttctcccgaaggtttcaacgttggtgctgccggtgttggagtcgagctcaaccttcaccttccagagaaatggttttgttctaatatgcgggcgagcagtacatgctctcaagtctaggactcgctctttgtgctgagtgcaagatgccttctatctcaagctccccgccgcgggccgacgtcatcgcccggtccagtttcctcgcactcaggtcagcaccgggtccttggaagaaacacaaacgtcagaacaacgcggtcaagacattttttttaaccgcaaataaacaccaaacaggcccctgagtctacgacaacatcatggaccaacggccttcaatagatactgtaccgttgcccctctcgtgatagcctcaaccacgcacgctgacgctcgtcaagggtcatgatcacaagcaggagaacgatcctcccaagcaattcgaggtatgattaccagtcttatctcgaggaattaactaactcctgcctggttaataggttctattcccccgccgaacgtgcagccaccgccgcaaagcctcccttgttatggccgatgagcctcgaatcgaccacacggacgaggcaacagcatgcttcgtccactccctgatcgctggcgagggcccaatgccggccaaaattgcgaatttccgaatttccaaggacaggtcgaagctcgaggcggatatcgtcggtaaatcggctgccggagctcacgatgtcgccatcgaagaggaagacgaggatgaggatgacgagaaccagaagccggatgcgcatggacgcgccaagtcgccgtcgccagacgaggtccagtcgcgacatctgacgaaaaagcagctttctgatatggcgtggaatgtgcgcaacctgtctaagaaactcgatagcatccggctcaagctcaacgtcaagtcgatattcctggttaccaaggcgggcgatgaatcggtagtcgatgctacgcgccaggtcgcgcgctggctactctctaaagaccgcggaacgcagtacgtcgtctacattgagaacaagctgcgcattgacccagagttcgactacgagagcctagtgaaggaggactcgtccgtgggagagcggctcaagttctgggatgcaaagctagcctcagagcaagcgcatctatttgatctcgtcatcgctctcggaggcgacgggacggtcctctatacgagctggttgttccagcatatagtgccgcctgttctgtccttctcgctaggctcattaggctttctaacgaagttcgatttcaatgattatcagaatattctctcatctgcgatccaggacggtgtactcgttagtctacgcttgcgcttcgagtgcacaatcatgcggagtaatccgcacgacaaggaaacgccggctacgaagaaacaccgtgacctggtcgatgaattgataggcgatgagacggaggggacgttaacacatcggcctgacggcgtcgtgcatatcctaaatgatatcgtcgttgatagagggccgaatccaagtatgcctacaatactcttcaaaataagtagaaatctgtgctaatgtatgccagccatgtcctcgatcgaactcttcggcggcgacgagcacttcacaactctgcaagccgacggtgtctgcatctccactccaaccggctcaacagcctacaacatggccgctggcggctccctcacacaccccgacaacccggtaatcctaatcacggcaatctgcgcacatacgctgtccttcagaccgattattctgcccgatacggttgtgctgcgagtgggtgtaccatatgatgcgcgcacaagctcgtgggcgagcttcgacgggaggcagagggttgaattactgcccggtgattatgtaactgtttcagcatcaaggtacccgtttgcgaatgtgttgccgcatggggggaagggggatgattggatgaggagtctttcgaagacgctcaattggaacacgaggcagaggcagaaggctatgacataatgatcatgataatatatggtatgggttggttctaggtcttaaaatagatagaatgggctagcaattttggattgacgctgattaccggctgcgagcctaatatgtctaccacagcgggtgtctttttttctctttcctttctctttagcaatgaaaacgaacttgcgcggcgagccacctcgaagtatctatttctgacgtatatgaatttcagggagagttcatgacttataaaacttcgagtgcttcattgtgtgtggagactggagctggatagaaaatgctgttacttctgtccatctctagaactttcgtacgctatgggtcggtttggtttccacggcagcctgaggcctatataaacccacctttctttcgtgatttttctttcttcaatcaacctcttctcttcgcgacaacaatcagcctaggctgggatcttatgtgattccagatacacgcttacgatttctacttgttaacatatttaacatatttcttacgcccagcttaaactaataggtaagactacacatacttctgtcttctctcctcgccgaaaccaagacaagagccagcatgtgaaacacatttccacattcgcagtttccacgctagccgtcgctagaacccaatctagacgtgctctgtgcgcatgtacttccttggatgtctgacgagattcgctatccacgcattgctagttttattatgaggatttgtgagctttgctgacttagtacaagattctaggtatactttcagatcgccgacggtattgtactctccaggttatctctgttcagggaaaagttttccccgtcagacctgggatttgtctactctgatatttggttcatcggtacccgagatgcttgtcggagaccgagatattagcgtgtcagtttcgatgagcgaacaatatattgggttttggaactacctcatactcgtaggagactttgtagatgagccagtgctgtggctgtagtattcctcagtatcgtattgtactccacccggcatcgctactatgtctggcaccggttctatttcttcaaccgccgaggtttacggagtcgaaccaaccaaaattctgcagcattaggacgatcatttaaataggtctgtacaaggcgtcgttaatcattatcctggagactcgttaggtctgctttactgagcaatcagtgatcaactcatacgtttcagaatcttttagaaatatctgtcctttcactggcgcgctcggcagccttattctctcctattatttacctacccacttccttaccaacatctcagatgccaatctactcatgatgtctgaagtccgccagagagccggtgtccccaaggacgcatctaggtccacttctacaactaaagaccgcggtaatgatgcgcaatctagaactcgcagcggcattagcatcctcgacatcttccgtgtgatggtctctttggcagtcgtctcctgcggtttatcatactatctcaccgaaactgtaacatgggggtataacccctggttcacaaactggtcacagctggtgcgatatgttgtacgtctttcccccgcatctaaccagatgaattcattacccgcttactcgacgttaacaaacttatagaaaggcccaatagccttaacgccatcagagctctccctctacgacggcacaaaccccgacaggcccatctacgttgccgtgaacgggaccattttcgacgtgtccgcgaacccacgcatgtacggtcccggtggtggctatcacttcttcgccgggcgcgacgcaacccgtgcgtttgtaacgggatgttttgctgaggatctcacggacgatcttaccggtgttgaggagatgtttatacctattgacgagccggaggaattggaaaagttgagtagtggggaaaagaaaaagaggcgcgaacaggatatgcggaacgcaaaaaagagggtcgagaagcaaattgcgcattgggtgggattttttggaaagcatcagaagtattttgaggttgggagggttgttaaagatgacacggagaaggatgaaatgaaggggaagagggaactttgcgaggcagcaaggaaacaaaggcccaagagggagaagagtaagagtgcctaatcttcgtcttgattgaggtagaatttagggtgtgtctggaaattgcttccgttactggcagcatatatgtttatgcgcattacgtacttagcaagtagtgaacagattgatcaggttgatttgattgagtcacgcaatgtacttgacacgtccagtagcgcaactttccttccatgcaaagtgtggtcgattaatctaccactaacatcgttcccagccgaattccggat

SEQ ID NO: 5203 - DNA, 3490 bp, Emericella nidulans
gccaatcttgttccccggctctatccatttttgcgtcatacgatcaccagtgtacgctctgcggtcctccgtgccctcactacgtttttacggctagagggcgagggcaccaacgactgggttgacggtaaaggaatgcggctggttttccagaacctattggttgagcggaatgaagatgttctcaaactctctcttcaggtctggtcagagttgctcaaatccttagacagccgcggcgtaattaaatctgatccggaattgccgaaccatattcagccactactcgctttgagtatggcacccttcggcgttcccctttaccctatccctatgaatgcctcgctctttatcaagccgtctggcttacccttttccatggtccaaccggctccggcaaaggcgtcccctacttccaccacgagctcaacagatggacccaagaaacgaggtcgcaagtcggagaagaaggaactcctccttccagctccagttcaacgcacgatgtcgacgcgcacatgctcaagggtgatattgacatggttggcgcggacacaatgttgcgctaaaaaattgacgctgccagagctttcggcgacctcctattactctgggataaaaacggacttgacagcctttgggaaacaatcgtgggcggtctcggccatcccgcatcttcatcccaacttgcttcagccatgataattgaggaatatgctaaggttgctggaccagacagcaagtatgcgggtgctttgtgcgaaaagctccaaaccatcgtcgaaggagagcgcccgccttggtatagcgatatttcgtgctacctgagtgtcgcgcgcgcccagtgtcattcgttgcttaatactttccgggaaaccgcgccgcttcttcgatccgagaaactggcttcccttgctgctgatgagcaagggaacccagatgcgggcccaatgctttctcactagcgaaagcctacgaggtcattggaccagactttgagaagctcaagaggctcctatcgcctgcgcagcgtattactgcctccaaagtcctcaatgagacaagagttacggcagagaatgcgatcaactttgcaaaagaagcaagggacaccagagacatgcgaatcaaagcaagccccgcgggcgcactgataaattttggtgcaatccccaagaaacccggtaacctcattaagggagtgatggagagcatcaagacggaagagagcgccgagcttcagcagcgttctgcgaccgccgtcgcggttctggtggagcactacactagtgcggccaagagaggcccggtcgataaggtcattggtaacctggtcaagtactgttgcgttgacacatctgagaccccagagttcgagcgtaacaaggaacatgagggattgattctatctctccggaaggaggaggatcggcgcgaacacgcggatgctgccacctttgagaaggaagccagagaagcaagaatcatgcgccgcggtgccaaagacgcgcttgaacaactagctgtgaaattcggagcgcagcttacagaaaaggttccgaacctcgcgtctttagtcgagcgacctctcaaggaagccctgtccggcgaccttccggcaaacatcgtcgactctgacaacgtccttggccaggaggttgttgacggactatcgacattgagagctctgctccccaagttcgaccccggcctgtatccgtgggtcgtcagtcttatgcctcttgtcgtcaaagctcttcaatgccgattgtctgttattcggtatgcagcagccaagtgtttcgccacaatttgtagtgttgtaaccgttgagggtatgacgatgcttgtggagaaagtgctgccaaccattaacaatgcgctggacgtccaccatcgtcaaggagcggttgaatgcatctatcatctaattcatgtcatggaagacaacatcttaccttacgttatcttccttgtcgtgccggttctcggaagaatgagtgactcggacaacgatgttagactgcttgccacgacatcttttgcaactttggtcaaactggtgcccttggaggcgggtattccagaccctcccggactatcggagaaactgctcgaaggacgtgatcgggaaagaaagttcatgtctcagatgctggactctcgcaaggttgaagagttcaaattaccggttgcgatcaaggcagagctacgaccttaccagcaagaaggcgttaactggcttgctttcctcaacagatacaatcttcacggaattctctgcgacgatatgggccttggaaagacgctacagacgatttgcattgtcgcaagtgaccatcatatgcgggccgaagactttgctaagacacaaagaccagagtcgcgcaaggttccgtctctcattatctgccctccatcactttccggtcattggcaacaggaggtcaaacaatatgcaccgttcctcaactgcgttgcatatgttgggcctcccgcggagcgttcaaagctgcagggctctctcgctgatgcggacatagtcgtgacttcttatgatatctgccgcaatgacaacgatgttctccgaccgattagctggaactactgtgtcttggacgagggacatctcatcaaaaaccccaaagccaaggtcacaatggcggtcaaacgcatcaatagtaatcatcgtttgattttgtcaggaaccccgatccaaaataacgtgttggagttgtggtctctgtttgacttcctcatgccgggcttcctcggcacagagaaggtatttttagacaggttcgcgaagccgatcgccacaagtcgtttcagcaaatcatcgaaggaacaggaggcgggcgctctggcgattgaggcgctccataaacaggtgcttccgttcctccttcgccgtctcaaggaagaggtattgaatgatcttcctccaaagattattcagaactactactgcgatcccagtgaactgcagaagaagctgttcgaagatttcacgaagaaggagcagaaggccctgcaagaaaagatgggaagttcagaaaaggccgataaggagcacattttccaggccctgcagtatatgcgccgcctttgcaactcgcctgctcttgttgtcaaagagggacacaagcagtacaatgaggtccagcaatacctgcaagagaagaaatcttatctccgggacgtctcgcacgcgcctaagcttagcgctctgaaggatctgcttctggactgtggaattggtgtcgagccgactgaaggcaacttgggggcaggcgctagctatgtcagcccgcatcgagccttggtgttctgtcaaatgaaagagatgctggacattgtgcaaagcgaggtgcttcagaaactcctaccttctgtgcaattcctccgtctcgatggtgccgtagaagccacccggcgccaggacatcgtgaaccgattcaattcagaccctagctacgatgtgttgctc

SEQ ID NO: 5204 - DNA, 6856 bp, Emericella nidulans
caaaaacaaaaccctttacagctcctggctgccctttccggccttgggggtcttcttggggaggaggtctgcatctcgttagaataacattcggggcatgtaaaaggagtgcacgaactctgatgaatgttggggaggacaccaccctgggcaatagtgacgtggcccaggagcttgttcagttcctcatcgtttcggatggcgagctgaaggtggcgggggatgatacgggttttcttgttgtcacgagcggcgtttccagcaagctcgagaatttcagcagcaagatactccaagacggcagccaggtagacaggcgcacctagcaggtgctggttagcgctgggggaaacagaaatacacacgcaaaacgacataccggcaccaacacgctgggcgtagtttcccttgcgaagaagacggtgaacacgaccgaccgggaaagccaagccggccttcgaagaacgactagtctcacgtcaatacagttatagttgtgtagtggtgttttcaacatacgactgagcgttcttgctgccgctagccttgccaccagatttgccgccagtcattttgattgatttggagaatcaggttattcgaaaagtagctgagatgcgaaaacgacgcgtaggtgtcggtgtaagagggtaggagcaagaaatgataagtggaaaatgggaagggacgacagctatcgcgaaggagcggagggcatatataacgacaccatgaaagtaacgccgggcagtccagacgcgttttggatcaccctctcgcttagcggggtcaaccaatcaatgagcggatcatcatcgattgtaccagttggacggtgtcgtcatgttacaataccagattgagaaaaggggccagactaatcgaaaagccttaccgtaccgtatccttggcaagctcctgccgccaatcttgccgcgtttcgcgcattctgagctttctaatcatacaaatcatacaatttcaataccgtatcgaaaaactgcctcctttgtgctttttggatcaacagggcgtttggagccaagtataagtagcgcgcttcccctcgtcaccgcgtattcttaactttcatcctcctactcattccaccccactactctcacgcgtcaaccagtgctctcttgcatccccattcatagtcaagtcactcatccattaccgaattcaactttcgaatttatcaacttttaaaatgcctcccaaagctgccgagaagaagcctagcactggcggcaaagcccctgctggcaaggccccagctgagaagaaggaagctggaaagaagaccgccgctgctgcctctggcgagaagaagaagcgcggaaagaccaggaaggagacctactcttcttacatctacaagggtgagttcgtccgaatcagtcaatgatattgacgtgttttaactcgcaacagtcctcaagcaagtgcacccggacactggtatctccacccgtgctatgtctattctgaactctttcgtcaatggtatgtaaactatttgctcttacgcgcggttatgaagctaacttggctgaagatatctttgagcgcgttgcgacggaggcgtccaagctcgctgcttataacaagaagtccaccatatcatctcgagaaatccagacctcgtgagtattgcattttattttaagagtgatattctaacttgactagtgtgaggctgattctgcccggagaactcgccaagcacgctgtgtctgagggcaccaaggccgttacgaagtattcctcatctgccaaataggcttttctcggcatcttttctttttttaattgcacggatatgttctttgtttcgttactcgtcatcttgaacggttttgaggcggcgggttaaagggtgttcgcgggatttctaacgtgtcatgggatggtcttttttttcctatttgttctatttcccctcgggtcaaatgtcgtctttcaacgccttcagttttatggaaacatggatgtggtgtaacataacttgagttctggaaccggttgtataaatacccttcctcgaattcgaatccaatgctttcatggaaagttctaattaatagttgggtcttggaatatctttgcctatctgggtatattgtaccttgcactcatactcctaggtacaactgctggctgggcggtcgtcttcactgatttactacaacgcgacgtcaagatcatcaaatgcctcaacttcgtctagtgcttcccttcgccctttccaggaggcggcgctgtttcgcttaggattgttattatgggttttccttccagggacataatccgagctttccagtcttcccaatcgtcctcatctctgattaggaatcctatgagcatgcttgggtccatgtcttggatgttgagtcttctcagtcgacagagtgtggtaggtattgacttcatcttccgtgtacgtccctgattcgctgtatcttagagcagggcgggtgttgtgtgggtcaaggtagaagaaatgcgaaccctggacagctacaaaataatgggaagctgacggacgtcctctgttcgatagcctttagcaactgatacatccaataatactccaggtttgcatgacgtaccccgcgatccccacggattgtggcagctgtagcacggcttttagtccattccagtatactgcagtgatacggtcgattccaagtctgagacccagcagtatgagcgtcgggcgaacagtgcctttttcatccctggacacactcataaatttgtcctgatgaacgtccgagttgtcatctgcaatataaacttggagattcgactggtcgtatctcgctgcaaggcctctaaactcctacgtgagctttcgtaccccgcccttttgaaaacaagggtccctactgtatgcatctagctgtagcagttggcccaaaccattcccctggatgctttccgcagaaatctgctccgtgcttgacaaaactgtgtatcgagaatggggcatgaggggagtcggcgaatagcgagagtagcttcccttcttcttctagtctttcgccccttcgccagtctatacggtattagcggtctctgagctgcatctttgggactacactgttccgggactcataccacggcccagtaacaggatggccatggagttagcgagtaagctttggcctgatcttatcatgcacccccatccggtgtcacttgtgaagccctgggcatcgatgagttgacttctcagccgcacgcccaaggtcagtgataagcttccctcttgtccagcgtccttgggaatcggcgggaaatttgacctatatgtcatccatatctttgactcgaagtccagcagaaacgcttcaggccagccaggtgcactcgtgttcgtgttctgttgctgcccatggtcggggtttccttttgcaatattaattatctgaccttcaagctcgttgcgtattccacgtctgattcttttggggggggggggggggttactagattcatcggctgtttcctcgacgcattgaggtgggtagcgtgttcctagacaccagatcggcgaaccaggctcctcgtcattcttaggctcgggatcccatatatactgtattatgcgtttcctgcatcgttctatatccgttgcgttcatttttttcgcgttaccgtttgtttgtggtttaagtgcgggcgttggttggttgacctagccagttttgagctaccctgggtttgactatttgaagatgacacgccttcgttcattcgcagtctgattttggtttcactgctatctgctagttggctgtatgcttgggtctattgagtgcttactgtgctcctggtagaatttgatcacttaaaaccaagacctctttctagctatgtgagcctggctgttgcggcgagtgacgtgttggagatgattggagtacaaggtttcgggcgggtttaccacggggtgaggtcacgaggtgctgtggctctctatttgagggcgcatatgggtgtctgcagggctccttgggttctttatattatgcctattgggtggccttgtatttcagtgataatatctggttgggcgcagtaatgcaacggtatctgtgtgctgattccttggttgtttaaggtatgtgttgtaactatcccttcatgcgaaaatatataacagcaacatggtaagcttggagcaacaacactattgagcgaatataaacaactatatggcacatcagacagactagacagaagtagagctattctcatcaatatcatgattatcaacacccaagaccataatccaacaaagcagtaaaatatgctgttgctatatccatagcacctgcacctcgcagaggatgctggttagacagcctataactccttacctaacctatattgaggtggttgaatgtcgaacaaataatagattactcccatagcgatagctttcatttataggtttaggttataattcattatttcaaatggcagtagacttgttaaacccaacccacgaaacccgccccgacccgccccgacccgccaagaaacgggttgggttagaccttctaattatccattgggttttggatatttttggctgccccaaagcccggcggagcaacccgctaggttgctaagatatctgaataggtgtattactatatttagattacattttcttacttagatagtttataatacagtattgaaatatagtattttattaactatgtagatcactgcttactaaagtaatgatatgcataactgggttattttggattatttgggttgggttcgaattatttgctaaacccatgggcggtttactgttcaggtaacccaccccaaaaaccgcgtgggcggatcagctaggcctgaaaacccgccccaacccgtggtttaacaagtctagatggcgcatttatatactttatataggagtcaaaactacctaataggttctagtattaattagcaagctgttaacaagtacttaacaggtaattaaggtactggaatagaagactgagctagttgtagttggcaagaatcttgaaatttatagcaggaatattagtatttaaagagattctttgctgtacagtaaaacctattaaaagatagttagaaacagttaacaattaattgctaagtactttatacctatacacagcatctttagttgcatctttcttgatttcactaattctgtgttgaatgtcttgtaaagtagtctataaattatctgtaaggcaagtataatatatattcttaagctgtatacttgcatgcttacagatcttgactccagaacactaatatgataagctaaggtaagatattccaagaaataaggactggctgcaaggtctattgcaatacttttgtcaagtataatattgaatctatcaagtagttagtaatcacttggtaagcacccaacagccacgtgacaagtacttacgctgttgaccatgtcctcgacagtttccctccgctgattagggggcacgtttataacatagccatatccatttgggtcagttaatggatattcaggaagatcattactatattccaacttcaagaccttcaatgggttcctcgaagcgtcggtaagtggaatcagaatattttcatccttctaatcagttagcaagcgcttgacaattagttataagtatttttattaacatacactgtatatttgatcgctcaattcgctttcaattgattggaagagatcatcttgtaagaaaaagctgggatcctcgagatccattataaacaattgccaagcagctgtcaagtactttgcgtactgtctgtcaagataaggagggaaaagaagccgaaaatcaagagtgaaattcaaggaatttacagttatttaaatattttacatactagaggtaaagccaaattccacccggtcagctgaccggcaggtggcgggacccgctttcaatgtcgatgccacctaccctctccccccttccgcagaaactggggttgacctcgcttagtcatcacctagtaagcagttaccttagatagttagttggccgtaccggccacccaataggacaaccatccatcgcttcccacatatagggactagttcaatctgacaacatgttacaatgaagatttcaccacgtacgtacccatcacatgtgcctgactagcggctcgaaagcccacagcctcttatgaacacgagatcgacctgtgttggcccttctctcagtctcttattgatccgtctttacctcggttgaggtctctcataaagctacctagctatcactagggacctagctccaacaaacttcttctgctatcatccgccaccttccaaccaacaactaaccaaacagactatgttgcgcgcctgggtattagcatggattctgcccctcatcaacagcccacactggccttgacagagccagaacaagccccccgcttgacagtctcgttaaacgggtggaagaagctctccgccaaggtagccaattggccaagtaacgcgatcgcaatcaccataaaacgcgagccggatggctcggatagaccatgcgtgttcagatggaacccagcaagtgcacctctcatcctccgccttctttccaacaatggagagatgcaggaagcgccagtgactgcgcctacgccgcagggtccaacccttgaacacgactccccgctcggtcctttttccgcaaacagcaaggacacaatcgagctatggccggcggccgagacagcaataaacacaactctcccggaacgttacggaccgctgctggatgtgggtggtctgtccaagtagtatggc

SEQ ID NO: 5205 - DNA, 7631 bp, Emericella nidulans
ccctgctggtggacttctgccgacgtaaggttgcccgcaagcaactcttcgagctcgccaccttcttcgctttcgccggcaagttcacctacatgcgggattcttgcccttggaccaacatttccggcaagttcgaggttgctctcccttctgccactcagtacgaattctccggttaggatctcagcacctcatcaagtccggtgtccgctatattgttgagggttccaacatgggttgcacccaggccgccatcgacatctttgaggctcaccgcaacgccaaccccggcgatgccatctggtacgcccctggtaaagccgccaacgctggtggtgtcgccgtctctggtcttgagatggctcagaactctgctcgtctctcctggacatccgaggaggtcgatgctcgcctcaagggcatcatggaggactgcttcaagaacggtctcgagactgctcagaagttcgctactcctgccaagggcgtcctgccttccctcgtcaccggttccaacattgccggtttcaccaaggtcgccgaggccatgaaggaccagggtgactggtggtgaattagccccgtctcctaattttgatgttgcatgatgatgattcctacgtttgttccagcctttcgggttttggtcttgttatgatcttaccattcttagcgtggatagaggcgctggattcgtttctactatgcttttacctgtagatagaccttttttgcatagttatagtatattataccatagacgactttattcttacccttttccttagtaatgtgcaagcactatccacattctgaatagcccagtatgagatttgtactcaaaaaaacttaatgcccagaaaacactcgcaataagcacggccgtgtcgcgttgtgttccttgagcctcaacagttcgaattaattatcgtggttggctcaggcctttatcatgtgactagactaaggattcacgtgattagctcttgcttccacgcttcggaatctacatgaatgaagcttcatgaacagcaaaatgcccatgctctgggacaagatatcgaaaatcgaaaccggctgagcacgactatacatgcagtctcggaatacccagagcatggccagcgaacaatggagggcgttcgtgcagcgctgtttgctgcatcggattgatgccgccgaattcagagacctgagcatgctgctctttcagcgctgtccgatcggcgacttattgcttacagagacgttgttgcaggcgcgtctcgcaacgggcataaaatgggatcctctactcccggtatacattgactgtctctgtagaatggggcgagttcagatcccgacggtgctgactgcgctgctcaagcattcgtctatccacgacaagccctctcctggcgctgacgtggcgtctgtgaagaagaatgcgaaaccaagggccaagtgctatactttgatgaccgatattcgggtcatccaggatgcgatgctgtccatcaattcgggacgacggtcaagacactcctggaggttatccataccttttgtgccattgcggattggatacaggcaatcattgcctggcataatagccagctcgatgctgaccagccggcgggaatgatggggtctcccgatgcgatgctcttgtttgaggctgtggggatcctgctttcggttctagctgggactgggaagggaatagaggttctctctgcaggtcctcatgagggttcgctccctatatcgtgactttgaatcataactgatattttatagcgacaaaaatacggattggtcaggctctttcagcatatcttcctctctgtgctgatatgtatcctcccttgcataatcggctcgacggtctgcaaaagcagttcaatctgtatgggcagccgccatccaagctggacgttacgatgatggataatgttaatgtcaacgcactccaattcgaagcgtctgtgatggacggacctactatacactctagagctggtctctacatatatatcaatgcgatggtaggtctttttaccttcgcagagttcgaagctaattgtttagctcgttggacgtcctctggttgatgacagtatattgctcaactatctctataatcgctatgcagtaagtattctgctttgaaattatactccatcagctgatagtccaggaacactacgacgtcctcatcgaggagataataacggcgtcattcgacgttctgtccaacgcaatgtaccgcaatgaatctgcgaggacgatgcttcttttccgctcgtttttagtcaacaaattgccaccattctttgcggcaatgctggccgttccaatggtaactttcccgatggaagagtgcatcagccacgccctgagccggatagacccgaacattttcccatcattctcgcagatgttctcaatgcagggcaatgcagccctatcagacgtgcggcaggaatttcttttctcttgtgcctcacacaagttaataccggagtccagcatcgagcggttgttaggtgagaatccgatgcagactctacctgttggaggctcttatatgaaggatgagcttaaggcgcagatcagcgccaaccacgaacgtgcggagcagttgatcagcgatatcgaatcgactgaggggaatgccggtgcgatcgtcggtgctatcacagaagtgtgtctcccagtttctttggtagttttacgctaatgacgaaggttatgcatgacctctgcatgcaaaaggaaacaatgacgttaaaaaacatatgcaactcgttatcacgccgaccacagtctctcgacgttatgctgctcttccgcagcccaaggcagatcctgcagccgctgtgcgcattgcttgattcctggcattgggacgaagatcagggagagagccagccggtgtacgatgaatttgggagtattctgttgctggtgctgaccttcaagtaccggtacgatttacggccgtgggacctgggcatcgcaagcaacgattcgttcattatcaaattgattgagcagggctcatctagccagaagctagacgaactaaccgaaaagcagaataagaacctgggtgagtggatagcagcactatttatcgccgagggcatcagcgaggaaactatgtcggcgtgcagtccacaggaattctacatgcttgtctcgacactcttcagccaaagcttaggcgcgtgtgaagcggggaagctggagttcgatacactgaaagggggcttcgagtgtaagtcctccagttccaaccacagcttttttttttctgactaccccagatctcctcgagccattcctccttccttccctcgttgtcgcactaacctggctcggcaaccacatctgggaaagcgaagctgatccaactatcccactaaggaccctgcagtccttagtatcacccagttcgatatctggcgaggcgcgtgagatccacctcaccgtcttgaacatcacttcacgctcgctggaagagcagctcaaagacgttcgtgcccgccatcccacacgaacagacatcaagcctatccttgatgctctggatccatgtctctccttccagcgaacagcaagctgccataaatccgagcttgagccatggactacacataaccctggtgggcttctaggtagtatccgggcaacattccaatcgcttatcctttggagcacaagtcccgatgtctcaatggctccgccttcatatacgcatcgccaggtcataactgcgatccgcaccctaggcgcttcccgcgtactggccgcactactcgacgaacttaaatttcaaaccgagtcgaatccggggacagcaggtatcgccctcgacattgcagcaagcattgtttccgccccactgtcggagtctttcgccttcgaccagttccaaacgcatcatgatcactccacgtcgaaagagtcagaacaagcaccccactacccgatcttcaatctccgcgacgctctcaatacgcagcatgagttagttcccaagttatctgaaaaagacctcctgcgcgcggaaatcatcgtccgtctctaccgccgtgtaaatactctcctcgccccgcctgcgcaggtagcgcctaacctcgacatgaacatgggcatgaacgtcaacgtcaatatgaatatgaacaacatcatcggcgatatgcacctcgattcttctggtgacggagcttcgaaccagaacatgaatatgaacatggagacggatacccgaacacaagcccaggaacaaggacataacaatgaacaggcaaacctcaaccaaataatggataatgctgcggcggctgtgggaatggatatggatatgaacatgggtgggggaggagatgggatgggtgttggtgttggcgttggtgaattgggacttggcgaggtcgaccagagtattgatgatgtgttaaatgccgccgagatgaatcctgaatttttggatctggatatggagggaatgtttcagtgattgaattcatctctgcctatgggaatgtatagttatgctgtttcattgtgtgaattgggtagcataatagtgacatgatggtactgaaaaaatatcattgtaaatgccagaatggttccagaatccgaacccgttatcctatctcaaatttcatattcctatagcacaacacatagcagctgaactagtaggaaacataggccaccatcactcaattccatgttcgttcgtacctgctctgctctaatctcttatgtagtcccttccctactatcatacatgtacccatcagcaatgaaatcctcacccaagaatgaacgatgatcaagtcagccaaacactcacctacctatcccctgccaaactggtagacctatcatcccaagcaattgactgacgggagaggattcacgaaggtgtcaccttccctgcctgcttcgccacatcttcctgcagcctcgccacgctgtcggcaatcccgctgttcggcatgacagtgtcaaggagcttgagatcaccgacgggaagtttggggagttgtcttgtgtttagtgctaacatggggatcgggagcgcgagggccagcagtaaataagacgtgaaggcgagcgttgtgaggaccgtggtcaaagtgagttgcataattggcggattgggtttgatattcttgctttataggattcgaagttttgttaatgtgacagaaggagcggcggtagtgtgatgtaggcttgtgaggcggagatttggtgtttggatatattctcttgactgattcgagtgagagttcaatagagtcagggtcgatctagttgataaatgaggaactttgaagaaaagttcttgtcctggaggagacatgcagttggtgtctatataaacctacgttcactccagctgagctcgcttagcgctacctacattgttcgacgcgatcccttccgatacgcgacgcgacgctatgcatctgggcaatgtaggtgtctaggagaaaatctgcgtttagggttgtggtagtgcaaggggatggaatgtttgggaggaagccaccccctctctagggataagcattgagagcgcgttgcactcacgtcttgcctgcttagcatgaagcaaatacgaacaaacctgatttctgatactaggcactgcgtactctggctgactggacgggttcattctacatctactcgagtggctagtcacccaatgttgggctggcagttgaataaaatcctctaggtcgtgaatgcagtattatttagatcaaattgccgacaagagatggaatcaatcactgacccctttcgcttttccgcggcctatgcaatgcaaccacaaagttcgctcaaatgatatacatgcgaaagaaaataattgaggcaatgccaaactccaaacaaactcacaccaagtgttatgttatgcatatattcaaatcccaccgggtatcattcatgcatcatatatagcaaaaaagacaattccacccaataagaaaacaagaaaaaggagagagacaagactatgtacgtgacatttcgtcactcgtactagaaacggcctttgtccgcgtgcactgaaaatccacaacgtcagcatcagcgccagagtcagcatcagcgcctgagtcactctcggccgagtccgaccttgatcttgatgccacagaattcggactagagaagtccacgctaggcaatgggtctgcatcgtcgaggacgctgcgctggcgcgaaagaacaccaccttcagagggattagctttctcggaaggaaggacattagcagcctgtgcccggccctgccggcggctgcgccggcgggtatgccggaggtgttcgttcggcacggggtccacctgctttttagccgctgggacaagattaaggtaaaccggaaatagagcgccggctgcaaacagcgcaacgaggacgctgtatgaatcgagtgtgctatttgctgctagttgcgcgccatatcgcgcaaaaggtaggaatgcgccgccgctgatagcgatggtgagtaaagaagctgctgtctttgtgtgtcggccggtgccgcgaagcgcaatagcaaaaataatgctgaaggtgccgctttcgaaaaggaaaaccatcatggcgctggcgatggctgcggcaccagtggtatgcatacataatgcggcgaagacgaccatgccgatgtatgaaagaaggaggatccatcgtggtttgagaaaccattgcaggaaggcggcgaggaagcgaccgacggcgaagatggcgcggccaatcgtgaggtaggtgaattcgctgagcggaggatccgcatatgccgtcgcgattagagccccaaaacctgtagagaagacttcctgcccagctacgtagaaaaactgggaccaaatgcccaaagcgagggtcatccaaacaactggaattccgaaggggggcggtgcggttatcgtctcgtcggcgattagcaagttcctccaaatcttcgtctgacgcctctgggatgggtaggtagtaaaaggccagtgcgaggagcacgtcaaacaaggcaattgcaagatacgtccactgcacatcaaccagcgaggagacatcggtcacgctgcgaaacaggacctttttggcgagcaaaggcgagaggacgctcccgacagcttgaacaccttgtgatatatttaatcgcacttccgagttctcgagcggtccgcaaagcgagataaacggattcgctgcagtttcgagaattgcgagcccgcacccggtaataaaattggatacgagaaaagcagaatatgatgtcaacacggcagaaggccagaaaatcagcgaaccgcaggcgtagaagcacaagccggtgataaaggtcgacttgagccccagtgcttgagcaccggacgcccaactagcggcggagccaccgagatatcccccaaagtatacggcagtggagacctagaggccggcagatgtgcagtgctcaaatccgctggtggtgttcattgagaataaccagtgatccgttcgggtaaccccagaggaatttcaaaagagcggttatagcgtttggagccattgtctcctagtaggtcggttttagcaaattaggcggcttcttcttgttg

SEQ ID NO: 5206 - DNA, 1224 bp, Emericella nidulans
acgcagatcccttcgaaagatcaaggttaccagacatatagagccgccggaagttgctagggaagaaggccataattactggcggtgactccggcatcggtcgtgcggtcgcaattctgtttgcgatggagggtgcttcaagtttaataacctatttgccagaggaggaggaggacgcacaggaaacaaagagacgggttgaggaagccggccagaagtgctaccttctagccacagacctacgcaggaaggagaactgcaagaaggttgttgagacggcattagagaagctaggaggaattgacatcttggtaaacaatgcgggaacgcagacgatgcttcctgatatcagtgacttggatgagtgagtatcaagatctaacaaggacgacacattgtgctgatgatgatttctattccaggtcccaatgggaaagcacattcgacacaaacattcatcctgtcttttatctctccaagtacactatgccacatctcaagtccggttcatccatcatcaactgcgcttcggtaaacccttacatcggtcgacctgaccttctcgactacacttcgaccaaaggggcgatggtcgcgttcacgcgcggtctgtcaaaccagcaatgcagcaaaggcattcgtgttaacgcagtatgccccgggcccgtctggacccctctaattccagcaacgatgaccactgaggcaatcgagcaattcagcggcacgccgatgggtcgtgcaggacagcctagcgagatcgcaacttgctttgtttttctcgctagtcaggatagtagttttatctctgggcagtgcttgcacccgaacggaggagttgttctcaatggttaggagtaatgctgtacagcaagcggcaacttaatgtggcgtgctgtagcaagttgatattatgaatatgaataatgagtcattagaaaccgctcaacactctaatttccccacccacggcccaattgaaataatgatctttgatccagtatgagttcttcagcgtacactttacatattgccacacatcatagtaaaccatatcacgtgaccatacttcagcgcttcgatgttggtggcgtgtgacgtcaaaccgttatactctatatatccactccaaccaccactataaatcaagttcttctttttctttttcttttttttttgggcaatactgtcacagagcaattcgttcaaggaacataaaataat

SEQ ID NO: 5207 - DNA, 6340 bp, Emericella nidulans
gaccaatttacgctaaaaccacctccaaagccgacaaatacttacgcgtaaatgtaagcttaccattcactagtaattgccgcagggttcacatggcagaatcctgaaccacgccgagctgagaccccattgccgcatatgcctcaaaccatagctgcaggaagtcacgagacaaacagacatcaggcatccgctccgccttttcgcaactctaaccacatccaacagaggatcagacaagtcagctatctacaccaattgatcttattgctgggtaagtctgatactactactgcaataagcaagatgatgtctgagattatgatttcataggagtttatttatcactgcaggagtcatcatgggagagagcggggaattttggagagatgttaaagaggctcggaagaggaggaagcaagagaacccgccacgtcgtcgctgctgggactggatgattgtgtcaggcaactgtcactatgcgaagaatcgctcctcctttcaagtgtaccgtcgagtgggacagacggttcacaattgcactggaggggatacctatatcgctggagtaggaactgtggaattgtacgtgcgcgcaagcccgaagagacgatctcccactcggaaactcgtcttagacaacgttctccatattccaagtgctctctgtaatggcttttccatcaacacatatcacttcactcatggcgggacgaccaggtgcagcccttttttccaagggactgatagacaaggctccgccctttggtatggtcagcccttccgagggctcgagaagctggttctagcgggaaatcctcaaggagaatcctatcttgatgatggtccgaaattgctgagcatgaccctgggtaaaacagaactcgatgagattttgtcagcaggttagccacttccagccccatctactcctgaacgatttgttcttgcgctgactattagagttagattaatgaagcttctttccagcgttcaggggcggacgaggatgatcaagtcaccagagttgtggaaagtagcgtctacggtcagcttacgatcctccatgacgtccatagctgcaagtgcttctgccctatcatgacctccaattagtgtccttgcctgaggacgaatccctgattacctggtcaaatatctccagcatgtctccgtcttgtgcacgaatatctgcgttgtctactgctttgtgtgacgagctacgcccgaagtcttgattcgagcattgcccgaattgcgacgagctggtccactaggaaccaactgccgattgaatccctggtccgggataagccctgtacaggccagttctcgtatgatcgttgctgacttccggaatgacgaatcaaggttggcaccaacgtcggtccgtgacacttataggaagctcgacggtcactgtgttttaattctctagcgaattcttctagtctaatactacctgttagtatcaacgactctagctcgtgacactttgcgcttttaacataaccatacactgtccaatgctttctgagtttgttggagcagatatccaaggtgacagaacctaccctggctctgcacttcattttctgtttcctttagttgattcgattcgaaaagatggaaataggattcttaatcgtagtctgctgccagaaggcatacattgcagcacaatatcacaaacaagcccctatacaatacaagtcttcaaacattctggtgtttcctacgtctataggtcatttgataccttccacccctctaattcctctgtatcttcatttacagtgtatcacaggcagatgcctttccccccaaacgagtttactccgccataccgtaatttctcaggtctgctgagccggtgcagtcccaggcagctgtgaagttgagtggccatgggctgtagctggatttgctgggtctgctatgtgaaattcctcatgggtctgtggctgtcagtagcagttatagcgatctgcggatatcgcgagtccagaagaatgatgacgaaatcaacagaagcgcaagcaataccattgcaagggcagatcatctgcagcaaaagaatagaactacattcggttgccatgagcactgcagatagcaggtttggattgtgtatatattgttccatacttgtcgaaggactgctccggagggacctgtatcttagtaataacagtctgccgtagtatgttgatccgcaatgccgagatctttaggatcgtcgaggaccaagcttaggaatcaacaacatcttcccctcctaaccaccattcgtctccaccaacaatactgctaatgtttgcttgtcacagccctacgtgctgtgatcatgggccaacatagattacggacccttattgtggacatcggcccaggatgagcgtcgtgtggttggccatccagtgtacacgacgaaccgacttctgccatatctgcccgcctactgtatcaggttaggcttcgtttcgcgaagacatcccacaatcgatattttcatgtacataattctcttctctttgcttaaggatctgaataagagcgccagaatggttgtttaaatgttctgattggcttgccgtcttaatctttagcatctcaccacatcttcctttttccttcgtcaatcgagactttactcagagtacagacggaaacccactgtgggtagtgacccaagcaacacgattggccttccgcgcattccgacagcgctccgaacggtcagaccactcgaaatccttgaatcctgacttggcagccccagcaggaagctcgacaacgtatgacggtgctcgaaatcttgagctaaagctcgatcaacgttagaccgctcgaaatcaccaaatggctagaccagccacaatgcatacgcgcgaccgcttacgtctctcgatcctcccccagaacgccgaagaacctgtccaatacgaagagttcgtccgcgagcagatcgcccgagatgacaaggagtggaagcgcttacaggaaacatgtgaccgtgtttttgaccagcacctacaaagccatgaagcccttcgccgtgccaaggcggtcctggaggcagagaatgccgacttgaagcagcagattcttgaccttaacagggagctcgaagaagaggcccccgtgacagctgaacttcgccagaagcttgaggaggttactgcagaacgaaacgagatgctctccgccttgcccgcaaaggcagccatgctatgtctgtggtatctgcaacaagtgccccgaaatcccataagattgccgatcctgagcagttgtcagatggcaaggaagacccaaagtttgaagagtggctacttgctatggaacgtaagctaaccgttaatgcggaccgtttccctaccgagtacggcaagattacctacatcctaagccgcgtaaagggtctcgcgttccgaaccatgtacccccgcgtatgtgcagacagcaagaacccataccagactggagaagaagtcttcgaccacctgagagttgtttttgcacaccctgaccgcaaaaaaaaaaacaagccaagcgcgaatacaaggagttaagagtgaagggctgtggcatacgccaccgtagccctaggctgacgggcgacaactaggaagacaccaacggctctatttcaactccgccttgataataccctattcaagaatagttagcacggagaacgtacccttactctgcaagaatctcacctgtccatccccgggaggatagtagaactttgcttggaaaccagctttactcaggactttcctccaatggctctccgagcgctcgaaactgttacaaaagaccatcatctcccagtcccacatggccgatagcataggacaatccttctctggaagaataaattcctcaatgattagcttcgactcgggacgcatagcctcccggatgtgcgtgaggattcggtggcattggccatcggaccaatcgtggagaatgaatttcaagtagtagacatatgcgcctgggcggatcagcacatgtaaatacgtgtttggaccatccttctgcccctggcacagtggccgtacaacataaggaaatagacctacccttaaatggctgttccttgaacagatcgaacgcaatcttcttcgccctaagcccgtccacactttgctccagaacatggcccaagtcctcgagaataaactgacctttgacgtcggggaatttatccgtgaatgacttgagatcatggcccctaccacctgcaacatcaaccataaagtcatcctcgacaccaccatcaaaaactttagcaagctgtccagggagcgaacaccactccacccagctcggccggcttccacggtccgcctccataaaactactcgagaggcggaggcgctcagggtcagcgctgaaccattcccagatcatttcctcgcgattcatcgcatagttccaaggtccggatgtgagtcattcgatgaactggtagttgtgcttgcggaggaactcggggactttagccacactggacatgccgtagtcatatctacacgcgcgtggatttgtcagtatggaaaatgcatgctttataatgcgtcaggatgccatacataaacttgactactgcaatgctgtcgcaatcagtcatttggcgcgtcatctgagtcgccttgtacagatggacatcctgttcctcgacgtaaccgattccggcaagaacgcgaagaatccgctctttggcatgctgttagacttggcacatgcagttactcaggaaggcggaagattcacgcaccggtaatgaacggactcgcgcccttgacggccgcgagatcctcgagtgacactggctccacgctcctgctaaggctcgtgaacatctccaggttaatccccattcgcacgcacatggcttgtatcggctgaaggtgccggtcggagttagacaaccatgagccaagttaagtgagatgtggaagccagtaccgagtagacgaggtgatagacattgtctcttggctcatgcagagctcgaaccagttcctgagctgctttgagcgctgccaagcggtctcgctcctgttttcctgtcttgaaagcgcaaacagtttgcattaaattccccaagaggctgtcaacatgtgtcgtgcttttcacaccattggtgtcattggtttcacttgtaccgtttggttttggcatcatggatgactagggctttgctttctataagggtgaaaaagggtgggattcaatgagcagatgcaaaggatttgaaagacaggccagctggcgtgacacaggtaatcagtaaccccttatcacttccaagagctgtgccgcggtgcaagctaattaatttactccagagtagcttcattgatcgagacagcttctccaatatccatcggccagtcgccgttactcgtcctgctatggaaccgtacttaatgccaatattgcatggaccatgtggaggccgacgtgaatccatgattcatgcattttgacggtttcacctggaggacagcacacgggctgggcaggagagaatcaacatggagctgcagcggaaagacttctaatatggggaagggcaacagagcgttgagcgtcacatggacatggcgtaattggcgctggcagcaactcatcaatcatatccagtagtgaaacaggctaggaattattgaacgaagaccccaagttagcctggtacacgcaatactaccctccactcctgtttcccctgatcagccacctaatgcagtggcccgactctttaattgcgcgataatcggataaccaacgcgggagagggccggacggaccgaaccctgtgctaaccaactagtccctatttaacagcaacggcgtcgattactgccacatcatagcgagattaacgatcagcgggctggtctcggaggaagtcatgtttgccccaaatacctatacataagaagaaattttcctcgggatatctgacgcccgggggacaggtgtactgtcggcggccagcaccacagctgctaaccatggtgcaggatcagtcccttagcattacggctgtctcctggacattgggcagtctttgcgtcgttatcgtcgcggtgcggctatatactcgcgctctcgtcacccgccagcttggttgggatgattccttcatcacgctttccttggtatgtatgcacttgcctaataacgcatggcggggaagcttatatttctggctaaagttaagtgctattatctgttctgctcttgcacaggttgcggtttattatggactgggcaagcatacgggcagatatcagcaaccccggccatcgcactc

SEQ ID NO: 5208 - DNA, 8547 bp, Emericella nidulans
  unsure (1)..(8547): unsure at all n locations
cctttatgtgtctactcctattttgatgaatgtgatgatgagatctgtgattttgacgacttctttggtttttttctctcttctttctctttcggtgtctctttgtgtgtttctcagaagctttctatagccttttttcgccggtcatctagcgccatgcattttgttatacccccagagccgcgttttctaagagcgtcgctcagtctccgatttccccagcagtttggcgtgaaaatgttttgtgttttttttttccttttcatttttcctctcttgtgttttttaggtaggtatgcttacgcttcaggcttgatagagagagacttcaccgttccgataagcaacgttgctggaaatataccacttggtatcatgcaagcatttcaatcttttctcgcactcgaaaccgtatgtcgggatgataaaggaggccagagatggccctatgagcaaataacacaactcagactaattctacggactgtttagtgatccagtcttaagagcaaggtagatgccagttaagtgagaaacaaactggccactagtctaacattatagggaaattgtctttgcgtttggcttgggttcctccttaccgtcttcattccagttatactatgctctgtgatgagaagggggtctgatcttgagtgagataacgctcgcagcttgggctgatgagctccaaccaatggaatccgtagagtacagataagctatatcagattattgtcttgcccttgggtgggtatataatgtctggtatacgaagtgataccagtggcctctgtgctatgcacgaactccctatatcttttctggaataggcatccgattctttgctactaagtcttgaggaaacaggcactccagtcgatgaattagtgctgtctccgttagagaattattctgctgggctaagtcggacgtcttacattatattccatggtaaacttacgcctccattagtcgcgagaggagacagacatgcagaattgggcagtacgaagataaattagagtatacccatcttccttgtgatcgtccaggaatgcatctgcatacgtccaccctcagtttaggcagttgctaaaccatatcatcatcccttcaaacaatctcatgcaaatggtgcttgaggcaagcagtgtccacgttggacaggacatcgggggttagggctggatattttttcccctggagatccctgaggcccggtcctcctctgtttctcatctcttcagaccgaagttacccgcctccagatctattcctattcatccaccttcccggcagctgataaccacggttaacaaacaacattcaccaagtttccctccacaaacccctccaagccctcgaccaacaaatcctgcagattccggatcgtcgactctgagaaccacgcaatatgcggcgagaccaacagattcggcacgctctccctcagcaacaccgactgcccacgcaccggcggctccccatcaaagacatcggtcgccgcacctgcaattcaaccctcctttagcgcgttgactagggcctcttcatccacgatccctcctctcgcaacattgatcaccagcgcatcactcctcatcgccgtcaactcgtccttgccaatcagccctaccgtatcagggcccttcgcaacagcaaccatgaccaccgttgcatgctgtatagccgtttcaaaagccacccgtccttcccgtacatcatcgcccatgacgcccttccgctccgcaatgaggacctgcatccctagtgcacggagaagcatctcgattcttttccccaacgcaccatacccaataatagccacaacctcctgctgcgtcgtatgcggtggcccactaccaaaccggtgaatgagcgtccgcttctcggcgtactcgtcactacccataacagcatcatgcaactcgactatcttccgcctagatgcgaagtaaagtgcaagagcatgctctgcgacagtgctcacgttcgcgccaggacagttgatcaccttcacgcccttttcctggaaagcagggatatcgacccattcgacacctgttgccatgataatgacgcactgaagtcgcggacatgcttgtagtacctctcgcgtgatggggacaagcgtcgtaatcgcgattgtggcgtcatgaagccgtgatactatttctgaatgggagggcgatgttgaggcgtagcctgtgtagctgtgtgggaaggaaaaggcgggtatggggcagtggcattcttctagacagacaatgtgatggtttgtatttttgttctctagaccttgtgaaggaggcattttgtagaatatgcagggtacagtgccgaaagagtgagttggagttgtgtcggcctcgtgagcgtaacgctagagttaggcttatcgtagcttatcagtggggttcctggttgtttggtaggctccactccctagcctagaagtctatatttataccactagccagtgtatacataccattcccagtcactagagtagacctaccaattactgaatagaaagtagtgattacacgaagagttataggaaggtaacagttttccacacattgattaatcccaagtactccatatgtattccacaaacacttcccctctccaatttaacaaatgaatcaaccacattcatcgctagaacgctagacaaagcacaaaagtctatgcaagttcaatgtgtagtagatgataacaagataatttcatcgctgcgactgttgcgacctcagcgtcggatggcgtctcatggttattggttccgcagcattaatgcccgtgttggcttcagtattccgctctctctctctcgcgtccagcgcggaggagacaccagcggcattattctcagatacagcctgcgactgctgccggcctaatgaaccaatctggctaaggttcgacgcgcgtctgcgcatgcggcgctctgcgtccaagatttctttttgctgcagggactcggagggaagcaaaatggcgcggtcgagagagtacggcagcccacgatgacggccgcgaatctgcatcgctataatgacgagtgttgaaagaacgcggaactggctgacgaaggaggcgttgacgccgggataaccgagagaaagaccgacggtgccgtacgcggagacaacctcgaagaggacagaccagatctggaaggagtactggtttttattttcgaggcggtcgccttcaactatcgtgatgatgaagaggcccaggcaaacgtaccagagatcaaaaccgagttgcttgcgtaagtgggtgccgatatagctgggtgctgtctggctgtcgtcgtcgtcgtcttcgtcatctgcgaaaataccaagacttttttcttcgtatacgtttgtgcgtcggagtgagatggcaatggggaaaacggagatgtacatcatgatcatgtaggagacttggacagctgggtggaggtcggcaatagacaccacagcgaatccagcagtgcgggtacaggtggcctggaaaagaccgtccaggattttgattccagtggacagtgaagtgacggtttcatcgttaagatccaggataatgaagaatatcaagtcgatgccattcaacaagaccagaatcgcaaacagccaccaggtagcattgcgcgggaaaagcagcgtgaaacaccggcgggggtgatccaacaagaacttcagctcttcccagagcggcgtttcctttgagactaccttcgacattgtccagataatgaagcgcagcatacagggaaaccccgtgttgcctataatgatcagaaatgacattaacagcaaaggccagaccgcgccctgaaacgacatcatggagtctggcgtcagggtgaacccgacatcattaaatgccgaggcagcagtgaagatggcccaccaaggacgtccttgtcccgctgccgtcacgacatttccccaatgcgtctccataatccacggcgtcaagcagatcacaccgaggatatgaaacaatacgtagtacgaaattaacacgacggccagcgtctttagtgcccggtactcgatacctcctagttcgtcgcgttgctcctcggttaggtcgataaagttcgagttgcggccaactgtggcatcccaactgagatacggcagcgtaggccggtcccgttcctgtgtcagagagcggaaaataccgttaaacgttgactttcggttcgcccgactgaacgctgccgggtcgtcgtcgtcttttgtctcgcgaaatgtagggcgcgtatccatacggggaaatgtggagttccgtgttctcgtccgtggcagctggggctcggtgatcgtgatatgcggaccgtccatgttgggcgtgttgtttgtgtcgtccccgtcaagattcctagggcttcgaggctcagattggtcggtccttgtcttgctcagatcgttgtcctcattctcttcttcctccagcacctccggcgctccgccgcgatcgtattccctcggacttggaatgcgcagagcgcctttgtttttacgctgcttctccaaaaatgcgatgtggtgctcagggctgagttgagcgggaacgcgaaggtcgccaaaatcgcgatttatcgtagctaacggactctgactttccattttcgcgctgctggcgttggaggtaggcgaaacagactcggagtcgctttcgttaggagatctgggcgcactccgcggggaatcttcctgcggcgggttggcggcctggttgcgcaggaccacgatcggccggccatttatccctgcttcctccctgccgtacgactgcgaatttttatcttcgctgattgtccgtagtcgggatctggtcgtgcgaagggcgcgggcatctcgaacgacgtgctggaaccgtttctcaaaccagtaaagccggataaagacgagcgcggtgttgatgaagatcggcgtagtgagcatcgagacaaaataaaggataacctgctggtacgtctgaagcaggttgaaatcgaccgtattcaacccgctctgggtagcagctccagcggagaagaacagcgcatcgatataaggtaaatcattaccaggatatatgatgatagacgtgaccaaagccatcgaaatgatataaatatagtggatgagaatgaaattcaggtgcaagtccttcagccatgggatgcgggccttgagttgcgccagctggcgcaggaacgaagaaaacatcccgggacggcgacggttgcaccgccgtggcacaacgatcgaacgatagaggtagcagcggtattatgtattattttgttctccggagagtaggtcccccggagaattcggcgaggattcgagaagatgaggaatgatgatcagcgggcgccacgcgactcaactgcacagggtgccgatcgtcccgtttcgagtcgaattgacgatgaaggaccgacgttagcctcgaatcatcagggacgaatgcttgcgaataatagcattgcgaggcaacatggttgagcgggtgtaagggaagagaatgtcaagaaacagncggcccaggacaagaagtggtgtggacttggacagcgggactgggctaggcagaaagaaagagaaattgaaaggcttaacgccaggaccagcacaaccaacactaataaatatagacgagatagctggaaagtgcggtctagcttatcctgctgaatttaagcccagctaaaagaaaaaaaaaatagtaaggaagaaaaaggaaaataagcagccacgcagccggaagaaaaagagagcaaggagttgcagcactaagcaaatcggcgcttcctattcggcgctctgggacatccatgcagctaatcctgattattatggtcttacttatgcttgttaacgagctaaaataaattgataaagggttgtcgcaagctgccgtggcaggctgcaagcggccaagcgccaagctttggacgtggatctggaccactggcggtgtggcggtgcagcgttacagtcacgagtgtttatacagtatagtcaacgttagtactgtctgtcagtgtaagtgtacctgacgatatgacagctctcaatttcgagaaatggcaactctcatgtatatcactagcggaacagagactgaggtcgatcgtcccttggcgtcatcctgcagcaacgatcagctcgcaattctgctgcaatcaaaacccaggataaagctcgtgatacatccattggctgtcaccatatttccgaatacggcatatctcccttttactccaggcacgggattttccgggctattctaactgtgctggacggaggcgagtcttgtgaaacgttaccggaacacaaagggtcgcacgactcgtcgaggatcaggtagggctgcagagtcgagttcagccatactttgttaggagtgataacagtgtggactcgataccttcgtagtatgaaagagtatgtaagattatgtattgtctgggcctggtcggcggtatacagcctgacggctgagtgcgtaccaacgcattctgaccgcataattccacgcctttcatccctgcagacagtgcattgtaacgaactatgtccagacgccagagcccctaaccaggggtaagcctaccaaatgaatcgatagaaaatagtagggaggaatagtatatttgaaaatctaattgcatcgctgcgcaagctcatgcaccagctggttgaattcgctctccttctcccatggcagcatgtgcccactcccctcccacactttatacagtatcccctcgccgatctccttattcagcagctcgccgtggtggaatgtcaacatccggtccaccgtcccatgcaggactgcaatcctctccctcccgactttatcgcccagctccttcaactgcgccgccgacttgtggtggaaattgcacgcaacaatctgcattaggaaccccttcttcgtgaacccttcggtatcctcgagcttacgcaaccggccggccgcgaaccggtcacgcctcgtcgggaagttcttctcgggatcatcatactcgtcgtcaggctgagctaggaaatcatcgggaaacagcgaacgcgctaaccggttcaattcgtggtcgatgttgcgcgggatgaacatctctgcgcgctcgcgcagattctccaagaacggagccgtccgttcgacccgtggtgcggtgcagcagagcgtcaagctggccagtcggtcggggatgagcatcgcgagttcctgggagatcatgccgcccatgcttgcgccgacgacgttgatgtctcgtgatgggggcgtcgagagatcgagccagccgatacttgtgaggaggtcgatgacatcttgtgccatctctgatgtcgaatagtacgagatcggcttgtcggatttgccgacgccgcggttgtcaaagaccagcacagagtacttgtcggcgtggtcgtggccgaagaacttgacttggcgcttccagtcgctgtgggcgccatcaggcccatgatgaactggtaggtacgttagtcccgccctaaatctcaacaataggcagtcacgtcacgcaccacaagttttataggaccgtggccatggatctggtagtacagattgatagggccggcgcggcgcttctgagcgacgagcgctgtgccagcagttgttggtgacagtttccagtcaaggtgtttgtaggctgggtgggcgacaacctcagctgctgtcaggtaggccatcttgagcactctttccaagggttacgtgaagaatgaaaggcgttgctgagcgagacaaaagctggaaccttggaaatctggcccagggcatgcgaccgttgaaggctgggctggtcggggccgaggctgataagagcctgcttgtgatttgtcgattctgggcacaattccccatcacgtaatctcagtcaagtacactcaattcaacatttgatatagcttcatatcccagaagtcttcaaaaacgcgagatctcagccaagagcttacactgacctcaatcttgtcgacttggccatgcgagccccgctgctcaacaatctcctgtgatcggcgaccaaccctcgaacacaagcatcattgacatatgggtgtcgttttcgcaacttcgagcaagtgcggttcctgattattctgattatctgagcctgatcttgcactacagccaagggccatctcgaccagcgtagacaagtcagtctgcgcgcaatgtcgttgttttgtgcagacattgggtcaaggccagattagagtgctcgccctggctttaacctgcctgagccagggtcaagcatccttgataatcaaataagggagagtttaaacaacgccaactcacaaacgacgctgggacaatgggcgtcggttcgaccacgcaactcttgtagcgtttctattggacgcaaaatggaccaatcagagatgccatagggaaaacgcgggcgatcgaccataacctagtagcatacccatcactgctactatgcgagtcactgctgtggcactcaattactgtgaagtgatagtggaggattgtagg

SEQ ID NO: 5209 - DNA, 4228 bp, Emericella nidulans
acggaaccttccactgatggtgtcttcagagaaaacgatgcccggcctgaaaaggacgcggcgaatgatgtccttgaaggacctccggtactgcccccaatgccacaagagccgtctcttgcagacgcttttgagccggtgaaggacactgggcctcgcactaaccagggtccggaaacacctaaatcaagccatcgacaaccgacttctgccgtttcgactccgcctcaagccacgcagtattcacctgagcagccttctccggggaaggaacttactttgttcctccagtatcggagcaaaatcaagaaatacgtgctttcagaaggtgcttctggtttgaccatcgggagacttcagttggcgttcatagaaaaatttgcatggaatacgcacaacaatggtgctgatctaccggaaatctacattcaagatccaatttcaggtatcaggcacgagttggaggatttgagtgacgtcaaagatcgctctgttctcgtcctaaacgtcgacgcccttgatgaagtcaaaaagcattttgatgatgagctcggtggtgtacgccgcctacttgagggtgttaaaggagcattggatggacagggaaacatgatgcagcgcgtctcagatcggcaagtggaggctgtgaaggagatcgcccgccttgccgccgcacctgctgtctctagccgtggcgcccctgccactggagaggtgcgacgcggtcccatttctggcagtgccagtcaaatggcagaactgtcaagcctgcgacgagatctggcggtgctgcgacaaacatacaccgacttctcggcggatattgcgagctcgatgggtgcgatacgggccaaagcggataccgtcaaatcttcagctgtcgaagcttctgtgccgtcttacgaaggggatgcaggccgggcgcgtgtcaaccttgggaagaaggagctcgctgaagagtctgaacggcttgttgcgcgagtcgatgacctacaggatctgattgaggatctacggaaagacgtggtcagccgaggagtacggccgcttcctagacagctggagactgtgggtaaagatatcagcgccgttacaaaagagatcaagaagatgcaagaattcctcaagcgagagaaaccaatttggaccaagatctgggagaaggagctgcagcttgtttgtgaggaacgtgaccagctcaccatgcaggaagatcttgcagctgatctgcaggatgatctggaaaaagcagcccagacgtttgctctcgtcgagcaagcaaccaagcagcaggccatgcaaaacggcaacagcggccctacactgcgaaatacctcgcgtaatgtggtgattgacccggcagtggatcctatgaaagcaaaggacagtgtgttgggcgaagttcgcgctctccagcccaaccatgaatcccggcttgaggctatcgaacgagctgaaaaagcccggcagaaggagctcgaaactcgccgtgtcgatctattccagaaggaactgggcacctttgttcaggagggaaagctgaagaagagtggcggtttcgaggaagccgaacgtcttcgtcgggctaaagacgagcgcaatcgcaaggagatgtggaatatagctcaagcccgtgcagctgagattgaaaaagctgaagcggaagcggctgcagcttccacgccctctgcagcagaaccatactccgacgacgcggctcttgagagaaccgaagcaccggagtcgcctaaagggaaggctccagtgtctgacggtgacgtgggcgaggagaagaaggatgaagaagcgccagccgagagccaggacaaccaggaaagccataaaacagaccccgagaattaggcttgtatgcaaaacagccaggagggacccagttaccatttatttcattccatcaacctccccattcatttattttcttagtctacactttatctgtcgttcaatgtttccttactgctcctgtactttggattcaccccattctccttgaacatgtttggaagtctcggtaacttggattgccgagtacttgttgctcacttgatattgacgataccctgccacgcctgtggcatgttatgactcttacgaaacggggactccctgggctgatttggcctgttatcttacattcttgatttgtcctcgatgcactttcattgcttgtcattttttttttctctggacaagcgctcttgtgtttagccattcgttgaagcgttgcagatacaggccataatcaccaccactgtcctgatgcttatacagtaaatttttgcgtaggtttctatggcacgaaggtataaccaagaagatggaacacgaaaaaggaagatgaaggcgaaaccaagttgtgcatcgaggttaaacagcgaaaaagcaaaaaaagaagtgaccactgccgggctcgatccggcgaccttgtcggtgtaaacgacacgtgataaaccactacactaagcggccgcttattaagagttgtaatcgtaattagagctatagttgttgctgagcacatgcaaagcgcctttttgtcgaaattcaatttcctatacatatagttgcgtatagaggaagacaaatgccatgtccaaagaaaacatacagattataggtatgaatttagggtttgctctttatccttagctctccgccaactccacgggctgcgagtaccgaagctgctcgttcaaagccggagactttgggtaaaactccccgctcaccgtcattgggctgtactctgccacgggagccttactatctgacgtgacagttcgaagtcgtcttctcctctcatacatggcccagacaaacccagccagagcaagaacacccaagggcaccccaagcccagcgccgacggctactgttttcgcgtctatgttcgcatctaaggtatcggcatcggcgcaagcattcgttttgtttcgcgctgtcgtattggaggtgttatccgaatccgacagctccacgtagttctttagaagcccagcgcccggaacaatagtcgcgctctggagggtgaacggctcgagatccaggtcgcaactcgggttcggtccggtcacattgttgacgattgagttgcaacagtagtatacgccttgatcggtgctgttgtaggggacgattgcgcagccagtgttgcgttggatattggctgggtgtcaggcgcgttagctcattccgtcccaacctaacagtgtactcttcagtgatggattgggaaagggtttactgcaagcgcttgtacactcgtcgatctcaaagttaggatctgtacagcttccgcgcgatagaccgaatggctgggcgatactcatgcaaagcccatttgacaaacaaatggagccgctgccgcagcaggcactattgtcacctggcgtacattgcacgtctgtggttgcttcgttgccgtttggatagtagcatgttgcgacagagagggagggtaatagtaagaggagggggacaaggttgagtggattcatcatgacaactatactgataaaacggagcaagaggtctctagcactgatcaagcttcttcagtagattgagactcaggggctcgtttgtggctaggctggagacacccgagagaatggttcagctctcgggctgataatcctggcgctaaagggtaagcgtcaggctgtggttgatacctactaaatgcagctataccgagatggtaaaagtagcaggctagcgctattcaaatacccagcgctattcaaatacctgtttccgctccagtgtcagagacagggagtacggcggtgtcgtcgactgggcaagcacaagactagccaactgctttgctgccacataccttgtttgcgctttgccttggatgcatatgcaaagagctgcgccttgttatagaatcggcgtcttgttggccccatggcagtcctttcctgatcttctctgactatcttgaacatcatctcccttgatgatgcgtagccataggcctcaagagtttataaccattattaatggcgcatttattctgaccggccgtgacctatgtcttcccatttgacatctctttcttgcgcgctttttgttgttttgcgtactactgaaggtcattcaaaccctcccttcttcaaccgcgagacctccagcgctgctatccaagccagatttctcctagccccaagatctaactgggagtactcgccagtggaaa

SEQ ID NO: 5210 - DNA, 5362 bp, Emericella nidulans
gggtaacccactcagacttgctagagcagatatcgttgtttgagccaatctaataaaagaggggggggagtgagctaaaacgcaaccggcacgcgaatgctggatatcgtaacaaatacaacctcgaaaatacgccgaaaatacgcctcgctatgccatgccagtttaataagttgaaaaactcacgaacgtgagttcctggcccgtcttcgacttctctccatgtaagtctcgaagagaaagctcactcgtcatcactcatcgagtcatcgccctgctcaaacgcatccgagtcaacctcctcctggtcacttccactccctccaaacatatcatcgtccacgtcactctcggcccaaaagtccgagtcatcgtccttcacctgcttcggggcactcctgatcgtgctctcgtgtgtcggcatttcgaatccctcgggaatgtcagccttcgaatcctccacgcactttcgtacacgttctttgtaggcttcaaaatccttgcggaggagaaccgaagcgtctacgttggccggcgaggagacttccgcgtcgtcgagaagggaaagtatagaaatcagtacggactcaacgcgttgggcgggcgaccagcgttcagacgcgagttcaccggacatttcatcttcgccgggcgagtggaggatggagatgcagagcttgccgtcggtgtagatgttcgggtgatagaggggtcggtgaaagcggaactctacgagcattgttagtaaatggcaggtctgagcactcaagggcaaaaaagcgtacccggtggcgaatacgggtagttcgttggaaacttcatggatgccttgaagtaacctccgtaaaataacgaatctggattcagcacgataagcccgatcgtccatctgaagatgtcgtcgttttgaagctcaacgttgacccacggctcttgagagagagccttgaactcgttcattaaaatccgttcagccatgatggagatggtgattgacggtgaacagtgattactgggattttgccgctggacgagtaattcgaggcgagcttgaatcgggggcaatggcccaagtcgtcgataaaagggggtgtttacaaagaaaaagagtagataggaagatgcaggagaaaagagaacaggagaggcaacaacgggagaagcggcggctgcgggattcagcgcctgtgcctgttgaagactctgtctggcctgacgccattcattctttacctacaagttccgcacgatcgtggcggagatccgataacggacccggccggggtggtggcggcaaccagcctaccttttggtttcttaagcctttttaagacccgtcttcaagtggggattcctgcataagatcccttgtcaaccatctagaaccgagcatattggtctatcaagcttgtctacagataatgcaaggctggcgatcccgttaccaacagatcagagcgagcagacgccgggatatatagccgagcgaagcttgcgttggtgtcacgcgtagatgaagcggtgctggatgcacggactttggctaaataatttgaccgtctttcggctctaaagcgttatcagtcggttacatcggacgatattgcagaacagagagcgtcgtatggaataatggccaggatgctcgtgggggattcagcccaggcccaagctcaacaatcctttcttgttgcgacatctcgtattggacgctcctcattatgagagtcatgcatacccccgtcccgaacgcctttgactcacagatgactgtcccttgcgcgataactccgcagttagatgcaagctggagcactttggtattaacggggactgggtctggttagaacaggactggagcgagaatgaacggtgggcggtggagtccagagcgttcccacttcttactaacaaactgctgtctcaggtcaatctccgtcgaagttccttcgtcatctctctagttcttctcttaacttcccgctctcttcctttcacgcctactttatcaattgtttggctgctattctttgtctgccattgttgctggctgtcaaagcttgatactcgtatattatattgtttctctattttgtacattcgccttgtcatggttccgcctttcgttccaagctataccacgatctagaacgcgagctggtgcccggaaaagtctgtcctcgcctcgtgtcgtcctggctgcacctgctgcctggtatacaatagaggcgggctctgctcaaggctttcgcttttgcgacattcgccgtcatctgcgctgtcgggtatgattccgcaatgcgccggccctatatgggctgttgacgatctttcccgctgcttccaacgcaggtatgctagttggcggtcggttcttggagtgtctgctaatgacctcttcaaggtatttgcaggaaatcctaccgcttgccgcatgcgctctctcgcttatactcattaccacccgcgttgcgtatcgttacatattttcacggaagagcttcgcctacaagctgttgccgagcgacgatgttggaagcgtacaggatataagaggggccgaggaggatttaacggaagaatcggacccgatgctttctaaagccgcgcggattgagctgccccattttgagctggatcgaccccgcggggagattgcttttgtcgtcttggaagcagcagcgctagttgggcaagtcgttgttttcgcactggtcttgaagtcggacgcatggggccgcgatggacgtctcccggcggctgctcggctagtttcttggagctacttgctctttctggtcttggtccgactgctcctctctgtccgtcagctgcattcacccgccaggctttggaaccatacagctaccctttatggacttcaatggctactcactgtcctcgtattccggtctgccgttatatacccgatctcgaagcgtgctatgaccttctcttcaattgagttctcgctgtccagcttcctcgtgctcctttccgtgactacccggagaggaaacaagcccgttcttgtccctcatgaggaaggcttggagccggcgcgtcaccccgttgcaagcttgctttctctggcgaccttttcatggttggacccgctcatttttaagggttataggcaatcgctagaactggaggatgtctggaatttgaccgcatcgcaaaaagcctctacagtcctggaagatttccgttgcagacaatacaaagggcccttggtagtgaagctattacgttactttgccggcaccattctgctacagggtgcatggactatattctcgaacctattcacgtacctgccaactctccttcttaaagccatattggagtacgttgaagatcccagatctaccacgccaaatgccgcatggctgtacgctgtgcttttgttcgtctcggccgtacgcagggtgtggcagacggacaggctctctggattggtcgtcgaatgggtgtgaagctccgtgccattataatcggtgagatctatgcaaaggcgctgagacgaaaggcggggccttcggtcgaagcgaagaaggacgaggagaaggtccctgataagaagaaacgaatcctgtcctttggccgtaaaaagaagaagcccaccacggacgcagagaacgacgcctctaagaaggatgtcaaagaggatgccgaatcattggcgaacatcggaaccataatcaatcttatggctatcgattcgttcaaggttagcgaagtcggcgcatacctgcacttcttgtgggccagtgtgccagtgcagatcgtcattgctgttacgctcctgtacagactcctaggctttagttcctttgcgggtatcatcatcatggtccttatgctccctatcaacctgatcattgccaagaaattctcgaagttgcagaatcagatcttaaaaggaactgacgctcgcatccattcaacgaacgaaatcttgcagaacattcgcatcatcaagtattttgcttgggaggaacgcttccaagacatcgtaaatgaaaaacgccgcgcagaacttcgggcattacgcttgcgctacattctctggtctactgctgcgacagtttggtacggaacgcctattctgattacctttgcttcgtttttcctttacactgttgtcgagaaaaagcggttgaccccgtccattgctttcccggcactttcgatgttctcattgctgcgtattcctctagaccagctggcggacatggtggctcacgtccaagagtccaaagtctcattggaccgtgttgacaaatacctcaacgaggatgagaccgaaaaatacattcagcttgcggacgaggatacgtcggagcctagaatcgcgctggaacacgccactttgtcctggggaacaggaccgacgaacgagaacggtgacaaggacgaaaccttccgtttgatcaacgttgacgtagagtttctcattggcaaactgaacattatcgctgggcagactggctccggaaagacgtccctcttgatggcattacttggtgaaatgaaactcctggaaggacgtgtccatctacctggcggcactgctaaccgtgccgagctccctgttgatacacgtactggtctcatcgagagcgtcgcttactgcgctcaggaggcgtggctcgtcaacgacaccattaaggaaaacattattttcgcttctccgttcgatgaacgccgctacaacgccgtgatcaaggcctgcgccttggagcgtgacctggaaattctcgacgctggtgatgaaacgcttgttggcgagaaagggattggtttgtctggtggccaaaagcagaggatatctcttgctcgcgccatctacagcagagcccggcatctccttctggatgactgtctcagcgctgttgactcacataccgcaaagcacatcttccgagaagcgctgagcggtcctttgatgctcaaccggacgtgtattcttgttacgcacaatatcgcactgacagcgccttacgccgacttcatcgttgctctggataatggtaaggtcagtttccaaggtaggccggacgaagcaggtgcttctaaagctctaggcgaggaacttgccaaatcaagaccaggctctcggtcaagctctagtccccctcgatcccgtcgcccttcgaattcggccaacgatgataacgagtcgcacgcgaacggcatccctaacggaaccgctaatggtaccgccaatggtgcagttaatggaactcccggtaaaacactccagaagacagctacctcaaagaaacacgcagagacgaaggcagtccgtagcataaaatggcctatcattaagatgatcttttctcaatgggcccct

SEQ ID NO: 5211 - DNA, 3866 bp, Emericella nidulans
atggctactagaataagattggtgattttctacccagagtacacatcagccaaacctcgtcgactggtctttgccaggggattatttctcaccttccaagagggccagttgtaaggatccgcaggtccatgctggggataggatccagttccaaggtgccgtgacgctccatcaggaaatcgcggtgtgccgtcgagatacgcgaggccactatatcggcatatgttgaagggatacccgcctctgtgctttctactagatcaaccccattcttcgacccttgctgagggatatctgtttcaggagagtccccggcagtgtaggtgcgatgcatctccatagatgtaggcatattgagggtcggcgaggaacgactactaatgtagtcgtcgcgttcttgaggcttttatcgaagtctcaacccctctcctggatgttttttctctgaaagaactttgaaaggtctctgaaagttacctgaagagacgttgaggaagaggctatttcgagtacgcggctggctgcctgggcaggactggaaggaataagaagcaaatggttgtggcgtcctcggtgaggatcgagcaccatctgccggatgctgagcaagagctagtcccgcactcatctgggcagccggggaatatggctctctctggcctatcggtgtctcatggttggctggttacggacgttctccccccggggagagtgacattactgtggagctttccttactcagtcaaccaggcgagcaccattggggaaggcctcgcggagagcgtgacacgggggcctccccagttctccaccatgggaacgagtgagctcgcttagatgccatactctagcagcaaatttgtggccgcgctctcgaccaagccctaaaccagtgacgtctttgacgaggcactggcttagtctgagacagcgtagtccgtcgaggcaaaatttcggaattcccgagatgattcagcgcttcgtagacagactacagtcctatctaagtgagtactataagaaaagcacagtctcctgattataggcccaggatctggactgcagggtcgtattgttaaaccggtaaattactggctgaattggcttaaagctcgcttagggaaggagctaaccgtgatcgggacaccaccgaattgccgtcgagccacgcggcttcccagagttttcacatacactgttacagtacaagccgagccaaggtgttgacccgaaccagtgaccgatgatcaggttgcataaacgcatattgtgtaaagaacattacgaagacgcaattacgcaaggcggtaaaaatagtggcaatcacaggttctgtccgacgagcaactggcatgctcccacttataccgcgtcaagaacgcatcattgcgtaggctaaaatgcttcatgattaggcttcgggaaaaagaatcatttatcccgtcgggatccaggggtagacgctgccgaagactgccaagcgtaagcccagaacggtggctgaaggcttcagcacggcaaaggttggataagtttcggatcgcaagacggcactttggtatggatttcgggagagtcgagagcgagacgccaagagccaaagaaccaggccgagacaggcttggtgacgcttagtcacgcctctcttaatctctttcccacgatctccactctccacaatcctcccacagcctatctctccatcctccaggcttcaaaatctactctccactcccccagacctgcgtttctgctggtgcctccttgtggatgaattgtcgatgtattgtcgacttaacccgcattccactactgctggacgatgccaccatcaaccacatccccaggcgccaagcctctgatatgtcgagtgtgcgagaaaggattctccaaggctgaacatttgagggttagtatatacctcggagtagttttcccttggcggtggagactcgatggttaacgccggcatttagagacatgaacgttgccgtaaggactccccaagagagcacagcttgacgcggaatgtgccgaaactaaaagcagaaacaaagctgaccggcaacctggtataatcaagataccggatctaagccgtttgtctgcaaagaatgtcgtcgtccatttgcgcgccaagatgccctgacccgccacgagaaattgcatacccgcgccgctgcgaccaagcaagcacaggcacagcagtccttgcaggtgcctcaggtgacctcgttggacactctgacctgggatgctgctcgatcaccggccgaagctggggtgtcaacgtccgcaacagaccagccatggatggcatctgatgctcatcaggcgtcggggttgcagggcgtagcctcagacctcgactttgccctaatatggcccgactccgagaatctgttccagagtatcatgtcctcggattctccggaccagtggcagatacctctcggatctctccctatccctccagtcgtgcaggatgtgagcggtatgaattttggctcacccaactctttcgatgaccgagcctcttctatcggcacgatcccctcgggcgggagccatcaggctgtccgggatgtttcggacatggtgacaagctcggtaagatacctacgcggctcctgtgactgctatgaagagtgtagctgatgatatgtagtcctccagcgtaaccgctgcgataaaggcgacttcgatcacatctgtatttctggatgaatgtctacacatgttcttcgtacgattcattccgaccttcccgatcctgcatcgagcaacctttgttttccgcgattgcacccatcccctactgctaaatgctatggccctcgggtctctgtatctcggccccaaggactcagtcgcgaaggtttgtcgagtgatctatcaagaccaaccctatctaattctctatagggagaagcgttatggaggctagcacatacagcggtttcgacctcggtatgtcagataccctgcaaaggaaacaaggactgtgagtcgctgacggtctttagtggcaatcgttgatcactcaccgcggcccgtacgacgcttgcaacggcgtacagcttctgcttactgctcttttgggacagatatatggggccttgtccaaggtacgctttgatgcaagccctttccacgtcttatactaaattcagtatgtagagtcgagccattcgcactaccagccaggttttccgtcctctgggcttcttctgggcacgacactgcggcatgctagacagtgaacccttctctatagaggacgttccattccccaatacccccagctccgagaaagatcgcaaatggcgaacatgggctgcgcgagagatccaacagcgagccctgctagcatactatatcctagatggactcgtggcacagatgtctggtgatggagcttccactcgccacgtcgctaacccgctcactctacccagcagcgaggctgcatttgacgccaatactgctgacgagtggttaacgcacatgcgctctcaaaaagcagaacaaccctccttccgactcatcttccgctccctcttcccaccaacaagtagcttccgagctctcgactaccaattatccgccttttcactccgtgtaatactcgaaggcctccaatccctcgtctctgactcagacgagtgcgacctcgccgccgttggtgtccccggccgctcagatgtccgacgagccctcgcccaagtgcacgaaacaatcacaatgagtatccacctctctgccccggaacgcctcgaggtcctcctccgctggcataccatctgcctcgacaccatgattaatttaccggcctctgccgcacgtctgctaccgtacgacattcc

SEQ ID NO: 5212 - DNA, 6758 bp, Emericella nidulans
caaacagaagtaaggtcattgcaggggtggatgtggtctggcgctgtgcttgaacataccagttctggcgccagtacagctgtcagtgctgaccacacctttcagctgcggaatgagatccgctcgctcaagaacttcgctccagtcccagcatctgagatgctggtgggcctggacgagttcgacaacgccctggctgccggtgctgacaatgatcttgacttcctggaggaggacgacgatgacaaccacaatgtggaggaggatgacgacgatgataataacaataacaacgacagagacagcaatgatgatgatgagtgaggtcatgatactgtgcttgggtgaatgtggcgtggattttgtttcttcatagcaccctgggtagttgtttgtaataattgatgatactcctgtatagttatgcaataataatgtagttaactatgatccttgcctacttgtagtacatatatctcctaagtactggcttgacaccattatactgctggtatgacactgatgttgacactgcaggtgcagccaagctttgaggcacggcacagcccaagctgactgtctagtagcataatatgggtcatgcagtgcaatacctgtatcaagcctggtgccatctattagtcatgacactgtttatgctgacaactggcttgtacaagaccaagctggctcaagtttgtctgaccaggtttgcgtgacctggacgcgtagctaacacatcaccggcgctgtgcatggtgttaatcagctcttatagtttagctggcagcctgtacttgcaagcttggtctatgttcctcttgcctataattctattctgctatccacctacacacataataaagcaacaaatctgctatgactctctacatgactgattcttgatatattactatcagatcatgctgctttgcactcctgacaaacccaccataaccagcagaatacagcctatatctccataccctgtctatcagctgttacctgcccaaggaaggctgctaccaaggtgacctcctgtatatctactatataggcattaacctggcaccgcgccttctgcgcgtacaccatccactgcttgaccatctatctggccaaatagtactgccaggtggactgtacctgagccctgtaaggcctgtacagcatccctgcaatagtcaagatcagcaccccgcgccacagacactcctgcctggcctgccagccctggcagactaactatggcatcccatactagaaacaacagcagaacagtgcatagtcaatctaggatcacagctgcactatccactatttggcagtctggctattagggtaacagcagttatacagcttatagtcactgttatacctggctactgtgcagatatagcattggtgcagccatcaccaggcctcttgctcaaggaactcacaatccaagccccactatacagtaactgtctactgctagatagcagcatacctgtattatactggtatcatgttatctgctgggactgttgaaacagctgcaggaggcaccagtgccttaaataagggtgctactgctgcagattgcagtacttaggacaggattaatacagctaaggttttggacatggattaagatcaacaattaagcagaacaggcctattttgtgcattggggggattattgggctagttacttatattgatgttgcattctgctgctgatgctgctggcaatagtgatagcaatagcatcagggtttgctcatcctgcccatccagccggcaggcattgcatggcagcttgtcaggatcctgatcctggcactgctggcacgtgtatccatcaactgtcctgtccagatactggtcaaggacataccaacgacaccccacccccttgacgacctccatgtacgcctgcacgcgcttgaactcggcatctaatacctagtcaacctacagatcaaggtcatcccagccctgggggtgcatgataacagccttgcttgctaagctgttatgccctgcatgcctactctcctggctgtagttaagcagtgtctatagccgacccagatagatcatgtactagatgtcggggatgttgatgcccatgcccaaggtgcttgtcgcggcaataatacaggtctggctgctctggaactgttatatcatgcctgtctagtccagaacagtactatagtatgcctcacagcccagctcacagctgatagcattaacctggctcttgatattggtgtacacaattacctggccatcacaggcctgctggatgcgctgctggatgaatccctgcacattgggctgtgtcaactactggtatggctcgcgagggacgcctcggggcagtgacggccaaaccacgcgatacacgacattgcgccgacttgtccgcgcgtgatggatgccaaccttgctgcatttatgcttaatgtgttgcaggaactgtgcttcctctgtcaggggtaatgtcgctgtcaaaaacaccagctgtgtctgggcactgacaagacacctgaggcatgccattgccggctggaaatccttctgattgttgaggatgacatggcacttgttggtgacaatccggtcaagctgtcgcatctgccgttggcggttcaggaatatatagaaatccaggttcttggtcaactcaggtattacaagcatgattgctgcctcgtcagggggccagcagctcttctacaatatatataagatatccagggcctgacagtgcatcatcaggtctgcatgcagcaacagcaggggcactactataaatatacatccccctggggctgtatacacaggcaatataaacagcatactcttgctactgcctataggcatgattacaactacaggactagcactgtcctggattgccttcagtactggtacctgcaccccgcgcaactgcagtgcaggtcatcctgtcatatactataatgcctgtgccatgtctatctaggctagctattattactgttgctcctgatagttgacagcctactcttcccacaggttggcatgcttgcccagcactgtgttgactggtagcgggtctggaaaccccagaaagcaatgctagtccatgcttgatacttgaaaccacagccagcacatcatcgtgctgccagcaagcttgctgctctcgcgcccatatactatcactgctacatggggcgagtgccctgcctgctcatctacaatattacctatcttattaaggtccttgtctgcctccagggcagccattacctgcttgtgcttggcctggatattgttcaggaacatgcttaacatatacaggaattgacagctaatgctaatagcaatattgtgatagttggtaatattcagcagatactaggtactaatactggtctcactctcctgcttcagcacctcgcgcaggtgcttgctggactattcacaacctgtactgacatccagcccccacagatacaggctgcagtacattgtcagcttgctggcattactaccctggctggtactgctgaacatcacctggcaccatattactgcgagctagtacacaaatagcagcaccagccacaagtactacacaacaagcttgcccacttcgcaaggcaggtactagtggatgatcttgacgttgttgctcgcgtaaaaccccttatggtacgccgtcacaaacacgacgaggctgtcctcaatgaagatgttgcgacgccagttattgttggtgttgatgtgctggatgctcagcagctcgggcacgcgtgctggcgccctgctggtgaggtgcacggccaccgccagcttctctttgaattgtgcgacctgctgaaagtacttctgcaccttgtttgcactgacagtgccctgggtgatgaaggctcgagcaacagccagttcagtactgatctggtcgaccagccatgtcttccctgctacaggccatagcatacaagcatcctgcaggaagctccagcctgcagtgcctttagttggattatcaaagaggtgatcccatgggatggctggctattgctggtgatcaggctggtacagcaggcctgtcatcagctctcgcgcagctgcaaccacgccatgcacaaaactgtgaaactggcccatggtgaattccatctgcttgtacagcagccgctcctgccccatccatgtcacatgccctggcgccgtggtgttgtagtgtaccttcagtccgtacgtgcgccagtcaagcagcacttcaacagggccatgctggccatagaccatgaatcactgcaccatccagtcgacgccagtctgaaatgaccgggatcaaatgcagccaatcgtgcggccttgggatgctgatatggtctctgggctcgacggactcgacagggacgaggcctcggcgtaccctttgtcctcgaacagccatgcgagctcctggtctgctgccttgcctacccacaagccctgcttggcagctgctgcccatatctagataatgtcccagtactgggggtcgagccacaataccttctgcacaacgagaaagcgcgccaccttcagtacacatgagaggattggtggatagctgtcggcgtcgcgccagccctgcttgccgcaaccaaggaccgccattgcatatactaacaggctcttgtacttgtgcaccttggtcttctggttgagcagctcaatacagaagtcgaggcaggctgtctccaacagggtcatcatgaatgccttgagttgattatccatcagattaggactctggcgtgaggctggcgacgcgcctgccttgtctaatcagcaggcctgctgccacagttgctgccaggtctactactattatgcagtcatgacatagctgggcttcttctgttgctatggccacttagtctgcgtacaaataatgaacagcaggatctgctgccatggctgcatgtgcttggcaatgcttgtcttgtccatatatgcctgcagcggatggtgtgggatctggttaggcactgtgctcacagccatcatataaatgccattcccacagtgctgcaccatgcactgactacgccaagccagctgccccatggcatcccacacgcgctgcgtcgcctggctaacgggatctccctattcatgcagggtggcgtcgttctcatcgcggtcagggggtatgacgatgttgagaaggtcttggaagtgcatatcagcaaggtatcatgcccatcaggtcatgcgcagccacaggttcgcatcatgcagtgtgttgctctcagccatccggcaggccgcctgctgctcgttgtcagtcacacacgctttgatcttggcagcgatctgcttgtaatcagtcaacaggggtcggggctcatcaggcttggggtcgcacgatcagatgtgcacaaggtgcgagttcttgcaggtcggaaacacctgctgccaggcgactatttgatatgactgctcaaactcctctttgccttgtctctgctgtgctgcacgaactcgcccgccatgggtctgctggctccatctatgggcctgctgccaatgctgctgcatcttcttaatatttatactgatatagtagtaatagttcagattatgctgacactgcatgttattggtataaagagggataataggcagcaggttcttgagctcttgcaggatgtggacggcatcagggtcttggatcaggttggtctattgctgtacaactgcaataacaggctggatctgtaatatagtcatacaatgcttcttgtgcaggtgggtttggaccttaattaggtaaacagcatacttatattgccggcagatcatgatctacagctcagggattggctgaaagagtgggtgtgacatactgtggtagccaagacatgaaatctatacctagaagataggagactgacttggaaatgaattcaaggtgggagatagttacccctgactaaatctgacaccagccggcatctttgcttttgttgttaaaacaccaatatctatacagccatttgccgatctcccgtccaaccttgtatccaaccccaaccaagtttggctcaataccacggctgcatttatgcctggaatgcttccagatcatgctcacctatagctaagtcctgtttcaatatcctggtaaagtttgagcctgatcggccgtctggttccaatagaactcttcgcctgatcatcaatggagccattcgcatcggccaaaaattctgccataatacgccgctagaccctaacggaaccattctgccgttcccagggaccagtgggttaggcctgtacagcatccctgcaatggttgagatcagtgccctatactatagatactcctgcctagcctgccagccctggcagactaactatagcatcctatactagaaataacagcagaacagtatatagttaatctgggattgcagctatactatctactatttagcagtctagctattagggtaacagtagttgtatagcttatagttgctgtcatgcctagctactatatagatatagtattagtatagccattgtcgggccttttttgctaaggaacctgtatttcaagccttttttttgatatcttgctgctcttgatagcatattctattttgcctgtttgtattttttctttatgtatgcctaaacttactgtaatttagttctctttccttgtttttatctcttttgctcttttttattttttttcttcttttttt

SEQ ID NO: 5213 - DNA, 1516 bp, Emericella nidulans
acaccgagatctaaagccgcagaacttattgatcaataagaaagggcaattaaagctgggtgatttcggacttgctcgcgcattcggcattcccgtggacacattttcaaatgaagtcgtaacgctttggtatcgtgctcctgacgtccttctcggcagcaggacatataatacaagtatcgatatctggtcggctggctgtatcatggcagagctatatacaggccgccccttgtttccgggaacaaccaatgaggaccaactgcagaagattttccgcctgatggggacaccctctgaacgctcttggccagggatctcccagctgccggagtacagggccaatttccacgtatacgcaacacaggaccttggcctcatccttccccaaattgacccgctcggtctcgatctgttaaaccgaatgctgcaactccgaccggagatgcgaattgacgcccatggcgctctgcagcatccatggttccatgaccttccgcagctccaggcacagttgcagcaacagcaaatggccggatatggagggatgatgccaccgcaacaagcgtattagctgtttcgcgatggttcatcgatatatgctttgcgttgcgatttatggaatctcttttttttttttttgtttgtttgctcaattcgtagcaagacataagagtactagttttagatagaagagcatggcgttgacacgacagatacggagtaatggtaatgaactttttttttcgagcctcaagatataggatcgatgtcactaaggtactatgccgcacagtattgcatggaccatcaaatagtctgggctcttggccgtccaacaacgctcgcaagagaagtgtttctttgtcgaatttgatcgaatttgagagggatagaccatgttttgtttttccacaaatgacaaattccatggcaataatcactgttattgggcagacctcgggtacacaacaggagctttgtccatccgatgtgcggggaaatcgatcctcatcccacaagcactcaacacatcctgtttgtgtcgaactggcaatgcaccggatcacctttttgctccggtctttggttcctcttctgagcggcctcttccgcctttgactccctgtcctttgagcccgggcatgggagtcgtccgcctataatggccgttttgtggcatcgatggcgtttcaggtcgcccacaacccgttcgtgggagcagcttgccgcaatttgctttggcccattgtcaacaactcctgtcagggcccttgaaattgatcgctgaccgctgctcgttgtgcggatgtatccccgcagtccggatccgatgttggacattctggttggatccataactctcattctgttggtgtgttcatgttattggacggtaatccatgtcaaggctgcacattggacactctcttagcaggctcgaacattgatcgaaacgaacggctccggggccggggggcgagactcgtaatacggatccctttagtagggttat

SEQ ID NO: 5214 - DNA, 1623 bp, Emericella nidulans
atgtacgctcgatcatggtgtatgttctcaacagcttccagtatcatgcccaggcctactttcagagtgatgctttttacaagacggaagttgatgataccaccaaacataacagcagttttcgtgagcgcctccaacggatattcgtggtaacaatggtattcatcaatgaggccatggaccatgcaggcgaacagatcctgctccgcggggtcgcgagaggatttgtattgcctcatgagttcaagaatttctctcagagatagctcctcatggtacattttgccgaacagctcttgcattttcttgtccacaggttcgggcaatgcattcccagattcgccattcgcatcgatgatatcatcaaaaccttcgccgtagttgattagtcggggataagtttggatgcaaattcgttgcacaggggtgaggttctggggatctccgacgtattcttctagaaccgacagcagtgtaaagactgttttgaccgacaagctgaccatctggggcgcaagctgttccctcctctggacacgaagctcatcatcggccttgatacggaggtatttggatagaagtgtacccatgtccataagacctttggatgcggcattgcgaacccactgctccagttcaaacggacctttcctatgagcgtaacaggcaaggtccatggcaagaccatttgtatatccaagaaggtactccaaccagttatactcaattgcgtgttcataaattgctgcggtggaggtgggatcctgggtaaacatggcaaagagctgatccgctacccactgcttatcctgacgccacgcgccgtggagagcaagttgatatccctcttcttgtttcatgataaaaacagcaagagtgcggaggagaaagctttgctggacactggtccaaggctggggtaaagctagggctgagcacaagaatacgggcagatcatactgcacgacagctttaataagcatttggctttctgctgcagcccaagcagcttgcgaatacaaagctagatcgaagatggctctcgtggcatccagagaccgaagaggcgatttggcggcacgttcaccttgcaaacggacaggctcgggaccgtcagagaagaagtcgtgcgggaaggtcgcacggagatttggtatttgagaagcatcagttcgtgagttgataaaagcagttaggaaagacatttgggtatcgcggtgttcccattcgcccccccagagctgttgaacgtccaacgtcgaatcctctgcggctataggtgaaagcgccgcatacagcttcgcgaattgccgtgcgtcaagtcttaggccctcgcggtcaaagtgtcgaaatatgagcgaccaatttatttgcttgccgccgtagtggaaccgaacagcttgcagaaaggtctacaaagagtactctcgtcaatattgcgacaaaactagaaatagaagggccgatgcgatgtgttcttcgcttcaaaacatccggaccgggtcgcagaaacaggatcattcacagcattcgagcttgacgtaaccgtcggacccctggaatgaagttgccgtactaaagcatactttgggttgacgaaaataaacatctgcagtgcggacg

SEQ ID NO: 5215 - DNA, 2489 bp, Emericella nidulans
cccgcatcggagctcctccaccacctcctcccaagcctggccagttatcgagccctacaggctgcagcaacagattgctccagcacagcacaacactccgccaccgctacctccattaccaccgaagacgcagagttctcgacagcacatatctccagcacaagcctctataagcaatcaacaaaccagagatcctcactgtttacctcatcatattcctgggggcgcatatcctccgccacaacagctcccacagcagcgcaacggtcctcatccagggcccgcattcgctccagcaccacctgctcactatcaggctgcgaatgagactcatggtatacctctacaacaccagccccctcaattccagggtccaacacatgcggctcctcacccagcatatcaccgacaacctccaccagctcaagtgcatctccaattaccacatcacggaccaactcaagctgctccaaccagccaaccgccagccccgcgaccaaagcccgaaaccgaagatctactcacatcccccttcgagctcgagctcccgtctttcacacccacgggccccgcgcctccaatcccgccaaaccctgaaaaagatgcccttctccaggccgtctccaaagctctcaccgaaacacttcatgcaaacaatgcccactccgagtccgctgcgcactctctagcatcccagtcccactccctccacgccaccattgcaacgctgcaagccgaaatatcctctctgaaaaacttgaactcaactctcgaatccaacacctcaatcctcacgcaatctctccaccgcgctgacgccgtcattgcagacgctcaatcccgtgtctcaaccgctcagtcatcctccagctcagattcctcatcctcctcaggccttccacccatcgacgacattcttgtcgcgcccacagtcgttggcaaacaactctacgaccttgtcgccgaagaacgcggcattcaacaagctctctatgctctccaagctgccctcgtaaaggtgttatcggcgtcgatacttggtctcgtcatacacgcggactagcactcgaggctttcttgaagcgtgccctgatccggaagataggcaagggtatgggcctagaggaatactagccgtgcttttgttcgcattgatctatagactttacttacggcgatatgaaagcgtatatacttctcttgtagccattctcaagttatttctttctctatagaccttctcgaaggaaaagccgggctacttccccgctagaattagtagtggtagctgatcacagctagatcatgatcatgatattacagcaagcaagacattaacgaatcgtctctttgggtcgacgccatacataatcttaatatctgaacgagcttccggaaatccagcgcgagaaaatagccctgtcatctgcgtaagcaccagttggaagctgagcatataccgtttagctctcgctgaatcactttcacagctcgacaagttcactttagactacggaacagtgtataactaagaggctacggtgccctccattacaactcagcagtaggaataatgagcgggttggtaaagaggaagagagagaaaagaaggatagatttgctcacagcccacaaaaggccgggccttgatatgcaaaagaaaaaggaggcgtagccgatcatatacaagaagggtggcaaactatatgccaaaaaaaaaaaatggtaaagggcaacatcgcatctatagttgataaaaatgttcaaaagatgagtatattgtgaaacctccaccctcgtgcgccacgccaaacaaaaatgtgatgaacaacccagagaaatcacaaaccaaaaatcagacgtcgtgattgggggaaaagagaacggggtgatttatgagcctatttcacctcgtttgaatctgcgaaggggctctcgactcgtggaggcggcgcaccgctgtgtcgctttgagcttatactagccccttctaagaatgctgagttgcgcctgtctgtttccacttctgttggtgtttggtcgctgaaggggctctggacgattgctggtgagtcttcaatcaccgtcggggcttgagatctcctggctgatattggtgtctcagcgggtgtggatgtgcgattgttggcggcagcgggggcatcgtttccgtcgttcgacgagatgctgggagctttggcgggctcttggctgggagctgagggctcggcattggattctggctgctccgctataggctggacgggagatttggccgtgttgttcttcttcccaatagtcttcaccatcacaggtttcgcggtgacggtacgagccacaattgagctgttgttgtttgcgtcagtgacacccgccttggcgagctgcgaaggagtgatagccgggacagccggtgtgtcagggctcaggtgctgtgaggatgacggggtgtttggtccattgtgaatactgactacagcagcacgggt

SEQ ID NO: 5216 - DNA, 2629 bp, Emericella nidulans
cgctagcgttacccacgggaataggtgaggatgggttaaggatggagatgaagtagtggatgccgttgtccttcaaaaggtcattctggactgtgtggtcgacagccatgattcttgcccaaatgaataccatgaccggtttcaactcctgagccgccgactgcagaagcttcacaacataggggaatataccaatgctcaaagccaagtggacagcccatggtcctaagtcgaggaacttgctaagcaggatcagggctctcaacctgtgcgcctgactcaaaaggacctgcagaacgatgggtaactgatctggtgggctcttctcggttgggccagatgataagtacatctcaaacgcagtaagttgttccgcgaagaatgtggaatgttgatactcgtattgtctgcgaccttcctcatgatcgataagggcaggcagctgagcaagaaccatttcaaccgccaggtcccagcttttccagagggggtgattatgggtctctgggagttctggtgatgagattggttggcatttgtatgtgcgcatgatgcgctcgctcagcagaaagttcctgaacaatgccgccaccataaggtcttgccggaaaagtttcttgaagagggctcgtggtagagttttccacgcaatcgtgtcggtgatggccgtgaagatccagttcaactctccgagaggacttctgcggtcctgtaagcgaccgggaacccgaaagtcgtcgattcggatattggattgaagtgggttttggagaatgaaatagcgcaacgcaatctcgatcggtgtggtcaggcagcatgtaaacaaatccgccgggagatctggattcgtcggaagggattcattcttttggcacgccgcaaggatgatgcagtctccatagttctgaacgatagcattcggatcaagccttttctgctcgaggttttctttctcgtgtttctcaacaaaggtgtggaagttttggactatgttccctgcatgagaaacatcgaacacaaaaagactgggccccgcaagccattgttgtaggtcgtacaaggacacagggatgtactgtgtgtaatttttgttgaaaacccatatctctccggactgagtgggcaacgggacaccgtgaccattgtagtggaagagaactctttcgtctttggcgtttcggcggacggatacacaaaacttcttggtttcgtcaacagaagggtcgaggtattgcttgtaccgcgtcctaagactaagtgtctcgtattgctcttgcagtttttttccaatttgctccatcagcttgttgttgccgccgccggtggtggatgtcgggtcgacccagcattcgagtttagcggttggatttgtcttgacgacatccggagatcaacaccgatgttcagacaaatcgccaacgcagcagaaacagtcttgaggcggtccttcatccgccagtcctgggatggccagcttccaacagggtctctcggaaatccatttgtctcgtgacgtttctccgtaaagtacatgtagaagttctagacgcagcatgtcagaccggtatcaaaaacctccagcatttgaatccgcttaccgaatgaagcaccttgaggtactcgctcgacgtgtattcctcctgccacccatgcctcatcgcaaagtcctcctcatcctcgttatcgacgaccacgggcttatcgaaacctccgcggggtccatagtcactcttggccctcttcagagccgccgttggccgtgcactactactggaatcttggtctgaagtaaaccgcgaattgccctcggtaggcgttgtgttctcgccagaagagctcgtcggcctagccggtggaggcttgtggtgttcgacagtggtaaatgagcgatggtgatttgaaatcggtgcaggggatctttggcgaggtgggatatgcgtttccaagtcagggccaaaggcaactcggacggacttctgggtcctcctcggggcctcagcctgaagactggaagcctggtgcggtgatgtattacgttgctccatatctactgtcgggtccctcattgtacagcgatgctcatcgtgtgcgtctatcgtaggaacgtcggccgtcacttacagtcgcaatcgctgttagtgaggttaccctgtgcaggggctctggagagccgtttttcgacagtggggcgctcaccttatcagaagtcagcgcatgcaccgagtccagaccgactatcatcggtatgaagtggacgtcgggagtaaaagagagaaaagcccgggggactgcagatattgatccaggctaagaggtctccgtctatccttgatgtcgaaaccgcagctgtccgcccctagccaacagcttccgaacggcgagatgatcgtgaagcgggtttagttgggaggtaagctcgctgggccttggcatcgagctgaggaacatcattcttccgccggcgtcctaacagagactagtttgaaatgtcacgtgacactacgcgtaacagtcgcaagccctaaccgcggcaaagatacccgctgacccaacatgcgtatatcgaagcccactgagggtcatttgagtgactcaatatcacccacagccccttactattctaaaacat

SEQ ID NO: 5217 - DNA, 4732 bp, Emericella nidulans
ggagcaccctcctgagctgctggtggtgcatctcaacggacttgacttcagtggtgacgttggcgggagcgaaggtgaccaccataccgggggtgataacaccagtctcgacacggccgacagggacagttccgataccagagatcttgtagacatcctggaggggaagacggaggggcatgttggagggacgaacaggaggctcaatagcgtcgatggcctcaaggagggtcttaccagtgaccttgccggccttggtctccttctcccaacccttgtaccaggggcagttggcggagggttcgagcatgttgtcaccgtggaaaccggagatgggaacgaaggcaacggccttggggttgtagccgaccttcttgatgaaaccggaagtctccttgacgatttcgttgtaacgggcctcagaccactggcaggtgtccatcttgttgagggcaacaatgagctgacggacaccgagggtgaaagcgagcagagcgtgctcacgggtctggccatccttggagataccagcctcgaattcaccagtaccggaagcgatgataaggatagcgcagtcagcctgggaggtaccagtgatcatgttcttgatgaagtcacggtgaccgggggcgtctagttgaattgttagatggagttacgttgtacaggatcatatatacataccaatgacggtaacctcatacttgggggtctggaacttccagagagcgatatcgatggtgataccacgctcacgctcggacttgagcttgtcaagaacccaagcgtacttgaaggaacccttaccgagttcggcggcttccttctcgaacttctcaatggtacgctggtcaataccaccgcacttgtagatcaagtgacctgttgtttgtgagtgtttggtcaaggacggtcggatgcgaggaagtcttaccagtagtggtggacttgccggaatcgacgtggccgataacgacgatgttgatgtgagtcttgtcttccttactattgatcaagaaagtcagttaatgtgtccagcaggcgatgagagattgcagcaacgtaccccatggtgaaggttgtgttatgttttgtggaatataaaagggagaagtgcgctattactgcccttgggattgcactgaggaactgaccttcatgcgtatcgtgcattaaatcaaacagggaggtaacaactgtcttcaagaacttgcaatgagccttcaagaaacgcgggtactggcccacgatatacatgatcatactgggcaccacagctttgatgcctttccctttcttcattttccagaggcctaaaaggtctttgatgacagggacaaggaaacgcttgatcggtctcttcgttcatggcaccggatattgatccgatcgcccaacaaagtgtgttacagtttgcccaggacgattctgtaccatcaacctgcttagctaacttttcaatcatgatattctcggtatcgataacgtccaaatgtgtcaggtagaccagacactcgcggatggttttgtataattggattgtgtcgctgtctttaacgaattcgcgtataatctcaccctcctcgttctcaacgatcagaacttcttctggacgcaccattttttctatcatgaccgtgcgcaaactcgaaagaacctcatcatatttgtgcttgcggaggggatagccggcaagggtattgggatgtggtgcgcctccattagacaagccactcacgcccatgctcaccaaggggtttatgtcggtgatcggaagctgctgcatttcttcatagagctcctgcactagcctggtccaatattccaagcagattttgaacacttctctatcgtcgatttgactgattcggatcaagtagaagtgggcatgcgtgagataatcccggttaggcaacttctcaacgagctggtatcggttagcatcggaagcagctataagtatatgttttacgcgaagaactcacattgagatgcgcgctgaagaagctgcaaaggaataatgccagattaagcacaaactcctgatccctcgagttactcttggcataagtgctcttcaagtccatggataatggaatggtctttgatactgtggtcagagtttccgtgaacatgtgaaccagcctctcgtcatagttgtagggatgtccgatctgcagcccaccaatttctgtgagacattttagagtcacattacgaaactcggggacgtcgagaaaccgcgttaacagggtatttatgacgggcgtctcgaagatataccctaggggaatccagttcaagaacctaaggagcgtctcgagcgtggctttgactaggctcggttggtttgcagtagtaagtacctcagagcataactggaatatcgacgagaactcctgggtcatagtcgtcttcaggttcctcgctttaacggacgtcatctgatcctgagagaagtcaaaaacctcttcggacagtagtcgaaggatcgccatattgttttcacagatggaaagacttgtgtggcacgaggagacaatttcgttgataaaagtaggccaattatgtggccattcttgcttcaatatggaaacaaggaccaagttaagcttgttcaagaacgcccgttcacttcttaacttctcctcagacttggaattttcgatgatgaaattaacgataaaattgcgaatacctgtgattgtcagataatctgcatcaagcagcttcgattgccttcgcataagctcacctaggcactggtcccttggtagaaccttccatcgtgtcataataacatcgtcgagaacttgaagggcgaggtctataaatgtcagcaatcggtcaatagcataagttggaacactttacatttggtttggggatattgcgattcctgaagtatattcccgactatcaaccaggcatccggattttgtttgaactaagttcgaagcaagttagacgtgatcctttgtttgcaacgcgctcgtggcgggggcttacttctgttagtgtctgctgagcttgtttttgctttagatcgcaggttcaagagtcagcgaaaaattcatccggccttatcgtaccacctttaacgtaccaattcacccttgccttcgtaaaaggcctggacagtagtgtccagctcctgtatagagacagacattctatcgcagaggcttgggtaaagtcgtattccacctcgaactcgattgtctccacgagaaagctatatttgaaaaggtgcgaagagtaaagttgaattagctttagcgtgtatatggcatgcgttgttcgggttatggagagctaaggtggaatgtttggcggggtagagcttctttggaggggtttggtagcggtcactaagcacaaaggtttttgagagcaatatggtgttgcgtaagtcgaagtatgagggttttaaaaagggataagcgggaattggtggttgcgcgtttcgactggaggaatgatagactgtcaagcctggtgttcccaagagggattcataaaacggctagttaagatacttgacctctggcggtgaggccgggatatcagtttctctatcatcaaaaaagtgtcttagtcagcgatttggctgccgttaaactaacctcactggtgcctacttagcctctaatgatatatgtcctctttcaagcgctattgtaaggtaggggggaagaaaaaaggaacaaatgcatgagaaaagggattcggagattgagccaaacgaggacgaaggaataggtcgtctagctcatagtgctcacagtcagagacgtcactcgggtaaggtgaagcgagcttatacaaagcacaagataaaaaatctatagctgttttactttagatatatttgtcagtaagaatattagtagatagcgagagctagcgcccgtccgcgccatatttgcgcgccaataaatatgagtcacgcacaaaatcagttagccagactcccacaatacaccttattggaaacatactgaaaacactgagctgttcagtacagacatattcctagaatagaaggaacagaattcgatcgggactgagattacagaatgctcgttctgggagtaaactctacaaggttgatgggctatgtctgtcaagcatccgcttcgacttatttggtatcaccacagtgttctttactgttgatctaacaaagcctttctatttcttttctagctattcaatttattcatatgcttaagttaacagataacctatggtgccaggctgccgatgtttcatcatattttccatcgagctgggaactgtgactgagatgcagggaatataggaaccgctggctggcgccaaatggcgaataagtcgacgaaggggttgcagtctccgccatgctcatgctgtgccgcgcttccccggcggatagcacggacaacagtgagggaaaagggcgtctgacacctctctcacaaagtggcttgtcgcctgagcgcgacatggtccaatcccatttctggcagcccgaccggaagtgtgacgaagccgccactggcgagtcgccaaccacctgcttcgcgcggccagggccgatcgcgcgccaactaataacccaagtcaagttcttagccaactggcagccgcatctctcgatcttgcttggttcgtcgggcgacgacccttgtcccaacccaagtctcttcaccctttcactttccttttcctatccatcaggtgccttgct

SEQ ID NO: 5218 - DNA, 4670 bp, Emericella nidulans
aggtataggaggttgatggccatgtaataagccttgcgtcgacttgctctgcagacatcactctgcataatgtcgtcgttcgtcaaacttgcccttcagcgatcccttgcatgcgcgtcgactttgatctggaaggcacgtcatcatacagaacaaggtcccgttcactgaacacttcgactctgaaacaggatcgagcacctgagcgcctacttacctgcctctgcctgcaggtacctgcataccaccccaagtacggcataccgtgatcagaactcactgcaaccaaccaccacatgacgaccacgcgtccaagtccaacgtatccaacaacgtccccccgtcaacgcctctcgcacaaccttaacggttcctacctcagccagtgtcccctcctcaacccaattcagccatttccccgggtctgcagggcaccccatgccgtacttttaatttgcggcttgcagtttcgaatatcaaaccgttgggaatgacgtagatcgtagcacgcgctcgttcgtcaacggtccaatagtcataccaggcgatgaatatccgtctgcgcggaccgcactgctaaggattgtgtaactcgtctcccggttattttgaagtgtcaggggaatgcgttgagtcgaagaaagctaaggggacgcatggacagatgattggcgtaaaggaaacggaatgtcactgagggaagggtgagaggtagacggcaggtagattagaggtatcttccgagaaagtcgtacaggagaggtaattggacgtgggcgggggtacctggtagcttaatgagtccactagtaggtagattgctgttatttaatatcattgtaattgtaggtgagaataatatacatgagattgatagaacagcaagtatttgccgattatctaacagagaataaaggccctatgtataactaaactcctctgccgcctgcgccttgtcgctgaacccaagatcaaaatgtaggtaaatggccaatgcatattcgcatactcgtacacctcctccattcacgaaagctccttgattgaagcacatcgatcaagtcgagatatcatcaggcgtcttttccagccctgacatgtcggtgtcagcctcgatgtctgccggaatccgcctagcattctcttgcctccgccctagacgtcccagatgaagaagaagctgcaaagacccagctggagtgacgccttcaatccgcctggccatgccgatattcgccggccgaacgcgctctagagcctgccgctcctccgtgctgatcccatgaatagcattgtaatccaggtcaagcgggatgggaaaatcctcgtatctacggactctagcggccgctttgtcctgtttcaacacgtaaggcgcgtagcgagcttccactataacgcggttgcggatttccggcgcgaacgaggacgctgtgtatgcggtgcctgatggggattcaatatgtgggatcaggtcgtcgagcccgacggctctgtgggcaagaagctcgtgtgcagagcggacagtgccgtcattgcgaaccgttaaccccttccgggcccatgctgcgaggggtagctttgtgttggagaggagcgattgcagttctttgatttgggcttctgtgtcgctgaagtgggaccagcgcttcttgcctacgatgccggctttgtgggcaaggcgagtaagacgaagatcagcgttgtcagatcgtgcggaaaggcggaactcgctgcgtgcggtaaacattcgataaggctcggaaacacccttggtaatgaggtcgtcaatcatgattccgatgtagccgtcggaacgggtgagggtgagaggttctcggccctgcgctgacaggccagcgttggcgccggcgattatcccttgtccggcggcttcttcatagcctgtggtgccgttaatctgtccggctaggtagagaccgctgatcagttttgtctcaagcgttggccacagattgcgcggatcgatgtagtcatattctacgccgtaaccgggctggagcatccgtacgttttcgagaccgcggatcgtcttcagtagttcgaactgagcatcctcaggtatagtcattgagatcccgttagggtagatgacctcgttcggcgcaaagccttccggttccaaccaaataaggtgctgcgtcttgtccttgaagcgtataaccttggattctaacgatgggcaatatctcggacccttcacggtttctcgaatatgcacggatttatccagattggcgcgaacgatatcatgggaggcattgttggtataggttagaaagctgttaagctgagcgtcctcgtccacctgaactcgttcattaagataagaaaacggcataggcggcatgtcacctttctggacctgcagcgctgaaaagtcgatcgtctttttatccagccgcggcggcgttccggtcttcaaccgacccagctggaagcctgcttcgcgtagcgacttgctcagcccgaatgttgcagcctcaccaattctcccagacggataggccttgagtccgatatgaatttcacctcccaagaaagtacctgtggtaatcacaacccggctcgtcggtatcacttcgcctgtttccaaccggaccccaactattttcccagccggcgcagcaggacccgtcccaacatcttccttcgagataacgatatctgccactttaccctccacaatgctcagattttctgtcgcgagcagttcttcacgcatgtaaatcttgtatagctcccggtcgatctgcgcgcgaggaccccaaacggccggacctttggatcggttgaggaccataaacatgagtcccgccttatcaacaattcggcccgcgactccgtccatggcatcaatttcccggatcatcgtgcctttgccaattccgccgaaactcggattacacgaacatactccgatattggagagcgagggtgttatcaacgccgtgcgggcgcctgagcgagccgctgcagcgcacgcttccgatccagcatgaccacctccgataacgaccacatcgtagggtctggaagaaacgaaatcagtaagttatagatgaatgttgattcaagattttctcataccgcgtagaatcagacacggaagccaatccgcgaaaaccacctaataaccgagatctaacactagcaccccaccgaaacatcgtccttgaccgtgccctgaaagccatgatgacatgaatatggtagcagacgattcctctgctgaagaataaaatctccttatctgaagtggtagcttatcgtttatgatcacgtgcatttatgtcagggcggtgaggcacttaatcatctgacataatctatacaggattttgtcgcataacaggaacacatgacgtacttattttaatagctccccgcgcatccgaataacatatcctcactctccctccttatacaaaatataatgataaacttgcttggccaatccctggtccacagatcgtcttaattttttgattgatcttccagatcgctcaagtgaatagtcaagatatcatccatgactcgttccacgttgtccgaacattgaatgcagactaaacaaagagtaccatcacggcattcttctttttagaaagcttctaaatgatgccgacgaagtgttatccaatactaacttatcaatgctatccagatagaaggctttaggtgcaagttttctagagcgtttgaacgcaaaccacaactagcggattgggcaattacgtcgcttcctgtcagataatgggtcactcactactcaactctagcagaccctcacacgaacgcttgtagctactgtcgcactacaggctgggtgacggatcgcctaatggcggaaagttcctggaccaattgctacttgatattggcaacgcagatatactgctgcacatggttgagagctcgttgaaggaacggtctagaagtcgcatccgcacctgtcgcacaggaacctgacttaacccctttgtcatctctgggtcccttactcccacctcgtttttctcttcaagaagcattgaatctgccatctgaaacaatccaacggtctgacgggtgccccgtcatatccgcgatcagcatgccctcgtacgtctgctgcagacaatacaacttcagtacttggtgatctcagcactatctgtctgaaacttgaatttatagcagactccttacccaaatggcactcagatttgcagcaccaacaggatcaactgctgctgccaagaagatccgggcacaagccttcattgtacagcaaggcagcacacaaacagaatgcgtgttcattacctacttcgtcacggccatcccccaggagaattgtttcttggagtggcaacgtaaatcactcaatctgaatattgggactgcaagggcatttgtcgccgtctagaccctatcaaaacagtcagagtgaatttcgtggcattgcgggtttcatggcaagaggcttaggtgctgtcatctcacctcctacctcgagacacttgatatctaggttcagtcaatggtctaaccctggttacgaatacatcgcagtcccagaagaggactaccaatttgaggatattcaagatcctccagctaaccaagataatccaccagagggttcagagcgcgctaggaaacat

SEQ ID NO: 5219 - DNA, 4729 bp, Emericella nidulans
tggcgatctatcagaaactcgggtttgagggggtcggggaaattgagtgtttggatttgaatgggaaggaagcatgtacagtgagtctctcccctctacgcctttctcattgagcgaggcgtccggtatactggaaggtactgaacgagtctagctatattgcatgattcggcagccggcgaaaatggattattaatgtatttattcgaacgaatttttatgacagtctgaagttacaacatcaaccgcacatcctgccttcaccttctccctctaaataccatgagcaaaccagcgattacagaatggagccaagggcaatgcaggggagcgtacgcccacgaggtcgccgtcctaagagatcatcagcaccgtcttctaatctttagagttatagggtcaatgtgaacataccgcactgccgccactcttcgcacagcaagcaatgttctgcttgcacttctggttcaggatatcttcgatgccgataagtactgtagtcgtcattagcaccctgcacgcaacccgaagaaaataaccgaaaaccaaaactcaaggaaataggaaaacgtacgagagatatcaagcttcgagcaaccgctgaaagcaccgaggccttcggcggcagagccggcaccgagcaggtcactcagcagcccagcggcgatacccttttgtacaacggtagtgtctccgccgtacttgacgtcgttgcagcaggacagctgggcttggtcaccacacttagagcttccttcggcgacggtgatgctgtcggggacggggaacttgtcggcgctggcgagcgcaaagagggagagggtggcaaggccgatgaacttcatttttatggatgggacgtgacgtttagtctgcacgagaacgaggcgagtagagatgagactgaggtaataaggtgattgtagtgagtgaggtaggtgagagaggacgaaagaaagaggaagggaagagtggacagcgccgcaataaatgcgcggctatgatgaaacatttctgctagggttacaaacctcgcatgccaacgagtaggatcaacagcctgtttaattgctgtttcggggttgtgcctgatacccctagttggcaggacgccttgcattcccacgcgcggatcggggaatgttgaagctctatagttatttggcgacgcacagggtaatcgatagctgacagactcggtagggatccaaggcaggacgcggattgaatcttgttttacgcaggaaatgacggtgaggcttatacctatcgggctcggtctgtatatgtctcgatgctcgtgccatgattagtccgactcagaatttgcagcactatctatgcagaaaacttgcaaggaaaaagccagacctggccattcgctaacttcaatgatcggcacttccttgatacctagtgacgacgtatccagatccgtgttccttgctgataccgaaaacaacaagtaaacagtctggatacagattccggccaatgggctccgttagggttcagatttcagtataccagcgcacccggtcttcacttgcacatctggtttgcttctctgcaggcctttagagtatatggcagtgcccaccttagattcagaactagagacttagtcacttatagtgcccaaaattgtgagttctggcgtaaagttcatccactacctgtctggaacccaccggcttccggcttgagccatttcagaatgcttaagaatatatgatatagccagaggatggcgtaggctacacccccattgcagcaatgctctacatccgcagacgttcaccttataagctttcttgagaaagtaccgcaaacagtattcatgtagttactgccttgctctttgactccagctgtactgctatggtatcatatgtgggatagaggcggggcatttatttctcgaaacttagcgagaagaataatcctggaaaaggaaagtatctctcagcgaacctgagccacgaccttgcagatcgtacatccactgccggctagactccatgtccggcgccgtgatatggcgtccgaagcgccttcagattgcgggcatctggcttcctctatgggtgtcacgggaatcacagcacaaccggcagtatactggacgggacgtctaaaatacactaaataaggcaacgaaaaaatggaacatcagggtggttgttgggcataatacaaatggccgtccctcgaaacgaggaaccgaacccccatggctccatacttgcgctcgtttccgccgccacaaacgggtagattgcgccacctgataacaatgcttgcatcatcaaggaggcacctgtagggcgtggccgtcgccgagtgcagtgcgtagagacttccatgctctttcaaggtctgcttcatttcctcgcggaactctcacttgtcaaggccccgggctcgagcacctaggaactgcgaaatctgcgctttatatgtagatatacactatcaccgcctcatattttttgctaagattccttaagtgctctgacacgaactgccggatcgcggtaaggccagactactgcggagtcgagcgtggatcttctgttaagcatagtccggactccctcctctcctgcagtatttccgcagatcatttctccagtcaatgtaccagtataggcgaggctgtagttctgccccgaatgtgccgcgagtgtggaatcctgtggtcactgctgctttctctgctgcttccccaaccggtgatagactatctgggccatttatacgggccatagttgagtaagtctcgcgaacgactgctcaatcctgcgcacactcttgataagcgttattatgggtactggtagcgccagaagtggggtccttcgggaaaagtccatgttgacgaaggcaaacagagtctggttggagctggagacgaagctggagaaggcctgcgggtcttggcatcagaagacctactccgaaggtggaagagacggagtagactaaccgcattaaaattagccctgacgaaggctgtttgattctagctcgtagtaaccctaagatagggcggaatggaggaatagtcggagcatcaacaaagcaatgtcatctaatcattatctataaccttctccctagtcatggtacacggagaagaaagtgataaatagggacgtatgaactagaatcagactctaaagccatcagatctgacaaatcatcagagtccgagtcggccgccgataatcctctataacccaatcgcagctataccgactcggtgcattcaacaggcgcaggacgacgagactttcgtccttgctctgaccacgggaaatgcacaacaggaggcacgaaatagctattgctcggttccgcaagaccggcgaatgcgttgtaccagcacaaaaacgcgcataggattgcaaaaaatccaccggccttgcaaagggattcattcggcataccctcagcgtctctgtggatgaacgcaactcctaggaggagcaaggcgatatcggcgaatatgaatagggagcagaaggccagagtggacttgaatgtacacaatgtcatgatgacagtgaagataaaccatgcctagatgaaacgggatgtttggtgagtggaagaagggaagatgagtaactacctagggagactaaccagtaagaataggcccagacagtcgttgaacatgtcggtattaccgccgcttgcctctatcaggcttcccatgatgttgaagccgccgggggtgaaaatgattccaactgagatccagaaaccgccgtatgaggagagcacagtagctccgaacgtgttcccaatggccatttccctgattagttagaggagaagtgacgagagaaggctgagaacgtaccacatgccagccagtagctggactaggcctccgtatgcaaaggcaggggcaacgagaatgctaggtacagtgatgttcaggaccttcatctggactgctcctaagaggaacgcgctgaggccaaatgcacataggccaagaggggcaggattggcgatcttctttggcggacgatatagacccggctggaatgcacctccaaaggcaggaaggcggctctctgcggtgagcatgtgcgagaggcctcctgaggtggcatagtcgagatgcgagctttcaggcgccagttgctgttcggacggaggcgaaggggtatctgcgttggtaatggtgttcttgagatcatatttctctgacgtttcggtggatgccatggttgtacgaataaaagacaatttctcaattttgcaaatcctgcatcagcaaaaaaagaaaaagaaaaaagagggggtaggagcttttaaagacgtccttttgaatcttgagccattgaatatcacggggtacgcctcatgtcccgatacttcgtactgggtctcacattgtagtcaatggccactgcaagcgtcttctagtctgcccggcttcaatatcggtaagcagagtatcaccacattttccaaaaggagagcgaaaactgacagaggatcgccctagcatggcaagcagagaagtaggggtgtcctagggaaaggcagggccgatggttcgtcatcgaattagaaccaagctatagggttccgtttactgggtcagccagcataccagaaaggggaggcgagtcatagtctgcggcaattccgaatgcgggggagcctatgccatttagttcatgggtatccctgaaaaacccaaaag

SEQ ID NO: 5220 - DNA, 2794 bp, Emericella nidulans
aagagaaaagaagaaataggggtaaggaaagctagaaaagtgatgaaatgagaagagaagaataagaataatgaaagatggaaaaataggagaaatatagaaaagaggaagaagaagaaagaagggagaagaaaaaagaaggagaaaagggagagataaaaggaattaaaggaagtagattgacgcagtaaaatataataataaaaagagaagataggaaaaggaaagaaatagagaaaatacgtatgaaaatgaaaagggataaaataatgtagttaaaaaggaaagtaaaaataagagaaagggtgagatagggtaaataaagtacaaaagtaaagataagggatagagatagagatgagattgtgaaaaagagggaaagaaagagagactagtgaaggtatcgatattatacaagagtcgaaagaaccagtgctgatgatagaaaataaatgtctttttaatagttgaattcatcaccaagattattggccgtgtacatgttcaaagtgcagtccagaactaccctcaaaaattgacacgcgctcttaaggctctggcctcttcttccgcaatcgcaacagtcgacccaattgtacaacgagatcggataaaaatccgagtatttagtttgtgtggatcttttgaaagactccaaagtctccaactattgttggagataggagcccagttctaaacgtcatgaaagtcgcagagatcttgtccgatctgacgtctttacgtgcttgtgtatgtttcacctcccgatccaaattcaagccatgtgcagtagcaaatacctgtccttgaagcaatgctgatcccggttgataggactacaatgatgcgctcaaccttgtcactgtcaacgaaagattaatgcctactcagacagcgacacagccggtacgagcagacgcagcgaacgaccacctccgaattgcgtctgagcttgtggaattgcagtatgagatgaggacaacccacaaggacggcagagtagatgatcagctgcgccgtgcgagggaggaagtaaaccgtgtgttgcgtgaattggcagctactccaacacgctgaagttctaggaacggatgtaatggattagactggcagttgaagccgccatcgtaatctatgaatttagttttattatggaattattattatcatttaccttcccaattatctcttcgtatccttgaactatcactcgcccaggtagatgcccgggcagtgaatgacttcctgatcaggacatattgaggtttctcggtccgaccatgctccggtgcagcgagcggtatgggccagcagcgcaactctttcacatcgcaacttcacgccctcgttttacagcttcagatgtcaatcgcgcctctcgaggacttcacaacaagatggcgacccgtgtcgatcagaaactgctgcggcagacgaagttccctccggaattcaaccagaaagtggacatgaccaaggtgaacattgaggtcatgaaaaagtgagtctccccaatattgctgaaattatgccagtttgctaatcaagtttttatgatactgctaggtggattgccggaaagatctccgagattttaggaaacgaagatgatgtggtgatcgagttatgtttcaatttactggaaggatctcggtttgtacgtctcaagtctttacctcttatctagatccacgacaaccgcttacaatcgcgcctcatctagcccgacattaaatcgctacaaatccagcttacgggatttctggataaagatactgccaagttttgcaaggagttatggtcgttatgtctgagcgctcagcaaaaccctcaaggcgtcgcgaaggagcttctagaggcaaagaagctagagcttatccaagagaaggtatacctaccttgcccagcgactcagagctgcccactaatgtacggcagattgaagccgaaaaagcagcggaagaggctcggaagaagaaagagcaggagcgcgcacgggaacgggagctcgaggaaatcagacgcagagaacgctcagacaggggctggggagggaggagaggcggtttcagaggccgggactttgacagacctcgctcacctccgagacgacgcagccgggatcgttattgggaccgccttcaaggcgggagttcgattcgtacgttccctctggttctcgcaggggccgtcggccttctaggtcacccagtcgctcacgttcacgttcacgttcacggtcgcgatctgtgtcatcatctcgttcgccgccacccaggcgtcgcaatgaccgcaacagacgacgtcgatcagttagcgattccatctctccagaccgagagcgccggaggcagaggagacgtagtcctgattacggtgatcgagcaagatccatatcccgcagtgattcatcgcgctcacgtactcccagaagagaccgaagacggagatctgtttcttccagcccatcccgctcacccgcccccagagaccgacacagacggagggactcatctgtctcgagatcacggtcccgatcgcagagccgtgacaggaagcacggtcggcgcagatcgtcgccttattcaagagatgacaggagagaatcaacggctaatgttgcaaagggccacagaacctgtgatgatcgccgtttgagccgcagcagagatcgcggcggggaccgtaggcgccggtactcgacgagccgcagtcgtagtcgcagcaggagccatagaggccgttcttctagcaagagtcgtgactctcgtagtcgcagccgcagccgcagccg

SEQ ID NO: 5221 - DNA, 2696 bp, Emericella nidulans
gtgagcaggaaattatgaggtaggctcatgcagcgcccatcggcgccagcccggtgcacaccattgaagccgctcctctcgctccgttttgaccatattctgcacccaaaattcctacttatcctcatcgaaccacgtccaatacctcccttcgcgccgatcaatctctctagcctgcaacttaaacccacaagtctgatacggctccgccgcgataaccagatattgaaagttcttgtctggcggctcctccaccttctgctcaaacgcgctcatgaatcgcacccgcggcttaacaccaggagtaatctcctgatactgcagctgaaacaacaacccaaactgcctcgtcagcggatcccgaatcttcgtaatcttgtacccgggccttccaatcttgattgtctgcttgcgcacctgcacgcccatcgcacctggtaaagacgcgggatcggcatttttgccctcgcgctgttcccgggcagctcggcgcgcgagattcgtctggtgctttcggccttgggtatgtgcgaggtaggaaccgtcgttttggtgaactgtcagacagagacggcattcgaagctgcccacatggttcttgaagaagtaagggtctttgtccagatcgatggtctcaagggcgagtttgcggagtcgttcgcggcggtctgcgttcgttgcggagtgagaggcgacgccgccaccgccgaacttggaacctgcgcggttctgcagtttcgttagttcgtatatactggattataaacgtgctcagagcagtgtaatgcaaattgacgtacctggtaatccattttgaatgtataaaggcggtttcccttgctgtagggagtggagtgaagctagagtgcttgatatgaagcttcgcgggaaattcagatcaggtattacataagcggctagagtaggctgcgattggaggacttagcaggtgaacagaaacaattgaaacaatcacactcgtagatattgagacgatggtttgatctacagtacaggatgaacactagccctgttgcagtctatcctcatccctgggtgaatcaacgacgatcttacgatggtcatttgtgcaccatccgctatgtgggcaaagtcgacggaacgtctggggaatggctaggggttgaatgggatgatccgacgcggggaaagcactcaggccagcataatggagtgagatactttagatgtactgtgaccctttgaacagctgtccaggcgcatgtactttccacgaagtgtcatcaaaacatctctaatctgcagcaggcttaagaaatcaccctacggcagggtcatttgtgcggccttcacgcccagcagacagtccgcgcagctttctagaggcagtccgcgagaagtacgcatctgattttgagcagagtcgtgagagacaagctcgtccggatgcggagttcgaagagcctatcagattcaaaagcaagattgctgaagaagtgggcttcgacaagatccggaagcagctcgcggacgttgaggagctgaaaattgtgctcctggatggactacgcgtggcgggtctgcttgcgcaggaggctagtcgagaacaggttgaagaggcacgcggccagatcgagcgtacttgtcctaagatcgtggagcttgatttgagctggaatatgttgaccaaatggagggatgtttctgatatctgtcggccgcttaggcgattgagtcttctgaagctgaagtgagtcttcttgcgttaacgaacagttcaggctggctgactgagttttccttagcgggaatcggtttgagcctgttgaggagggcttgaggtttgatgggatcaaagagcttcatctggatgacactttacttccatgggagcaagtaagtggaaacacggcggtctgtgatgcatcgctgactggcgcagatatcaagagtggctgctcagtttccgtcactcacctggctctcggcttcagcgaaccaaatctctatggtgcggacgccaatatccaacactataattacactcattctcgacaacaacgaaataggttccttgtcttcaattagagcattgacttctcttcagaacctcgagcatctgtcactgcgcggaaactgcatcgacgccgtagccgcagctgaaactgagggtcattccttccaattctcaagaagtcttcgatctgtggatctctcccgaaacaaaatcaattcgtggctgtttattaaccaacttcccgagatcttcccgggcctgcgaagccttcgtgtatcagggaaccctctttacaaccaagccgtggcaccgtcatctatcaccggtcttcctgagaggccgatgacagtggatgaagcttacatgctaacactctcccgcctctccgctttggaggtactcaattacagtacaatatctgagaaggatcgcaacaacggcgagctatattacctgtccctgatcggcaaggagctgtcagcgcttccggagaccgcagagccagatatacacaaagcacaccctcggtacagggagctatgcagaatctatggggagccactcatccaacgagcctccaaagccactgggtcaggagctgcgcttaacccacgctctgttgcggcgcgattagtgcgaatggtattccatctaactcaggcagagtgggcatcaaatcatcacgagaccgtcaaag

SEQ ID NO: 5222 - DNA, 3848 bp, Emericella nidulans
attcaagttcaggacgtgtcgaactggatatagctaacgaaaccaccagttaacctgggaatgttagaggagttagtattggatggaatgaatgacttactgaagcagtaacgctctcgcccattccctttatgctatgccaccaacctttgggaatgaatagcccatcgcccgcgtcaagctccgcttcaaacccttcagtgcattgtcctgattgtcccttccccgcatcatcccagatagcttgctccaacagacctctttcccggccctgcatcatctcttcacccctgaaggctgccgcctcccgactcccactgcgacccaacttacctcgcacatgtgagaaaactgcctgtccatctcgcggtcccagcaaccgcacagtcttgcgtccagcaagttgtacaaacagattggggttcgggtctcggtgcaaaggcgtgtaggtgggcggatatcccatccagatatttgtatcatagacatcacctttccccgcctttgccactattgtaggcgtagggaaatcgtcgcggagaatctggggaaggtcaaggagttggcattgagccagatataggcgcgactgtagttgcgatgaagattgggcctcgcggatccattggaggaagaggcttagcggcgcgtggaacttgcggaagctgagtcctggatcttcagatattgatatcgatcgttcagactgagtgagttccagggggaccaatgcatctccgccgtgatctgccagatattctatgttcagttgtggttttgttgcggtgtggtgaaaccagcgctcatatgccgggaggtcgcggaatgaacgacgtggaaggaggacaggaagctctggtataaaaaatcggtcgcgaaatatttctatgtcgacatctttgagggtctggagaggctggtagtagtagggaggagcggaagaattgaagcgtctaaggtggctggagcgagctaggactcttgatggccattggggtcggacctgtgggttactgcacatgagccatttttggggcttcattggacaattgatgtccttgtcgctggttgtggaggagttgagtcggttgcaagcctgctaaagacgttgacgaactcgggtttcgcttctggcacgtgcttggccaccaatagacacagtatctccgccttgtgagttcctgacttccaaggactatgtgcgcaatatcgcgacaactcctctgttgctgagggctcgctcttgattacttcgagtaggtcccggcttgtctatgtacaaggcttgcagcttcgttattgataatatagtacgtcatagagagcatctggtctcgaagcaggtctctgaaatgtttatatagcaaagatattatagccagcaaggcctggacagagattccgttatatcttcgccgttattagcgaccagcatgaagtgataatattgttgcatgtatatttggcctcccgcaggctccagagtgacaagcaagtggatctggggacggaagaaaccccgcgcagaggaatctctccgcacttcacttgacgttcctcacgccaccatcgcatcgaaccatccgttttaataagcagtatggactcaggacgcgcccaggtcgacgcgagtttgtcgcaggcctcgccagacgaacaactcgatggcccagctggggatagcgcgaagagaaaggcggaacaaccggccaacggtacccagactcgttcaaagagaaatcggtatatttccattgcctggtatggccactctataactcacttcctacggcattgattgaaaccttttttttttttttttagcaacgagtgcaagcgccggaaaatcaaatgcaatggccaggtacataccgaccttagcctgaagtgaagccactaacaacgatagacaccctgttaccgttgcggccacctcaagctggaatgtccgtaagcgcatgcttgcttctttctatcactgaccatgtccaggccgctatgcacccaactgctgcaataataacttcaaggactccgagtatgttctcttgctattgtgtcgcggtgcctctggctgacaatgtcgcctatccagggagttccggtctatgaaagaacaaatagcctctctgcaggatcaagtcactagccttttcagcagcatcagtgaactgcgagcgcagaggtcaactttcgatactccagccttcgacaacttctcgcgtgacggctcgcaggtttttacatctatgcgtcccccaacaggcaagccacgcttcaaacatgctcggttccatggtccgaccagctcagcattcaactttgacgttgctcgatcaagcctccagcacatgggtattgcgccagtcgaagaaaccatgcctgatgatataacgacaggacatgccaccccagcggcgtcgcctcctcacataccagctctgacacaaccgatgcatccgtcgaaagaccctatttgggcgatcaaaaaggatgagcgttacggctatgtcgggtttatgaagaggagattggtattatgtatcccctcgtcgacatcgatcacgtcgtgcaacaggtcaacttgctttataccttcatggaggccgcaatacgaacgggacttatgcatcgaggtctagcaggtacagatggccttgaagatgatagtacgaatataatcaaactcatttttgctactatccttgttgttgaaggtggtggacaaagccagcttggccagcgcctatatctgagtgtgaagccggctattgagtccaagatctgggatacgctagatgttaaaaccatccagcttctaggattaatggttagttccaattactactgccgtgtggccatggcaatactgatgaacaggcgacatatcactttcatacggatgaagatgctttagcttatcgaattattggtgtagcctcccgcatgtgccttgagatggggctacatagacgagacgcactggccaaaaactttcctgacgaagcacagtggcctgatattgtcaggatattctggtcgatttactctttggatagacggtggagtcttggtacgggactgccgttttcaatgcacgatgaagacattgaccaaatggaaccagtaagaaatgccgatgtttctagaccactctactcactggactcaggatccatcattacagtacctgcgatgcatgatcacatacaaccgcatcatctccaaggtgtggtactctggtttaggttcagacggagccacggacatacgtcgagacgagattggctacttggactaccaagttctacagtggtataaacaaataccggattctctaaagttctatcctgccgagtcgccgaggcagggtgaagcggcgagcaggggcttacggcgattgcgaatacttttatatttgcgcatgaatcagctgcgaattcttatttaccggccagttctccattctgctgccagcattgccgaagacaaagggcacgctcaaaccgttgttgacgtcgctaaagataccgttcgtatcctcacccgactgaaccagacttcagatatataccgcacacaacaaattactttcaactacttcctcgttgctgcattagctgttctcttcctggctgtctgtcacgcgcccaacgagtttaatcgtcaagtacgggacgaattttatctagctctagaccttgttaatgggtttagcaccaagtctgcatgtctcgaaacgcctgtggaagacgatcagaggcctcagacaaattggcgagagactgggcgttctcgaacgcctttatggtccggacgccaatgagccacactcgacagcagctgtc

SEQ ID NO: 5223 - DNA, 2351 bp, Emericella nidulans
caacctatctcaggtctccttcgccatggctctcgcgacgagcagtgaatatctcaatgtagacaaggtctgtacatgtggatcatgcgctacaggccaaagtgaaattctgctcgtggctgacgtcggctcgcgggggccagaatgccctcagccccaggctccttgctgagccgacctgccgtgccatgacatgaaactcgtggttcaagctgtgtgcatgccagttggctcgtggtcccggcttgttgctattttaatgtgataattcgacaaagttattggttgatggtgtggttgtcgccaatagctgagtcaagggagagtatgttctacgacttgcggcataacgttatctccgtcataccgccggacacatcccttgtaaacacgcgttcagctgaaagtccgcctgttccatatgagcctcagaaccctgcagctgaccgtttgatgacactattgaccacacctcggggtcgctgaaccggctgcaggaattggagaacgttttttgcgaggcgacgtttaaattcgtgataagctgatgagggacactagcggacgccgtctagtagggctgaagaatccaacagtagtcttacagcatcattagtggccggctcgcaagctccgcgtattccgtcaagctagtacggtacttgacactgccagcccgcctaaaggactccaatcgcaccattctaggagtccgcagctgggccaatcatagtatcgttttgagccagtttcacgcaatgactccaggcctgcaatataacagacgcctgacttggactcaaacggcaagcttcatagccagtgcagatcccagcaacatacgctgttggtttgcatgtaacccaaaagactgcctgactggctgtagacgaggaggctttactccgaacgcgagcgctctccgatcaaaatcaagttgaaacatcctcatgctgggtctccctggtagttgcgggccggatccagacaaaatactcgacaagagccgctcgacaggattctctggtagggctcacagagcatgcggtcagcagactcgaagtttcagcaaacattctagaagcagtgaagcatgaacggtcagattctaatccggccgggaagggccgaaatagtgcttgtctaaatgaatccgtgtgtggcatttacattctcgagtctatgcaaatccataagaatccatcttctttgtaagcacgccgatattatcaatcaacatccggccttgctgtgattcgacacgggatcaaatggcggagcgtcgtatggggtttgcatggcccccaccatggaaattgtctgagcgggaaagctaccaccaactcccgtcgtgatgactgctgattcgagggtgaaggctgagcatctacgtccgtggtgagtggaggtgctgggggccgaggagaaggtattgtgttggtttagtcccacctatgcggtccctggcgggcttcacgtggctactatcaacgtccgcatcaatacattgcatcaacactacctaatttattctaatacttgttccttcctgttgaccagacccagccacatcagacccaatatagatccctccgacgtcgtcaaactagcaagatgagcaatcctggccttcagctcttcagctggtctaggggattttcgattttctgtttattctctgcgtgaactgtcttagcgcagatgggcaagcttgaagatattgttatagaaaccccatgctacgtccatgaacacgcgcgtcttactcaataatgaatgcgtttctcctgactactccgctatattctagtcattccttctaatcaagcatttgctttcctcttcctttcacaaaatccgagagcctcagtttagcctctaactaggagactccagaatcattgtccatctgaaggcgagaagccactatctttgatgtccttggcccagtgatacgatatatacaggaccgaaccaacacctggcatatcattgaagagagataacttcgggtgttaggcttaagcggctttggtctacttccttaagataacccaatgcttggttgggctagagttgttgaagtagcgtctccataattctctcagcgttttactgcgtctcctgcaaatcagcaaatccatgtacaaggagataaacagcttcctattcaagggaggctcgttcagtttaggaatggtccaggtactgaaacactcgtctttctgttatgctctggcactctggaatcgcccctcagtctcccgcagtctggattcagaaagtcactggaccactccgggtatcccgtaaggccaaactggatgctatcgcacgtagattatggctta

SEQ ID NO: 5224 - DNA, 2463 bp, Emericella nidulans
cgggaaccgtccgtagaattaactgaaccattcacctttaggtccacatctgctcaatcagatacattgtcaccgagaaccaagttcatcattgggctcgattacggtaccaccttctcttctgtctcctacatcaagttcgattcggccaggcctcctccgactctctttggagcgcaaatctgctccattaccgattggcccggtgtcgacagccgggcacgcaacattccagaagtcccgagcgagagttggtatctaggcgatcgattctactggggatatggcgctcgccaaggcgtcgttgcgatcgaagacaataatctaaactataaaaatcggatcattcagtatgcaaagcttcttcttccggggaaccaaaaagaaactcgaggcccgcgtgaagaactccggagaaccttggtaagggctcgcaaggatgaaacagaggcaatcaaggactatctgcgacagatcttgaagtatagcaaagaatttctcacagagagagaagaactcagtgaggagtgcgaggttgagctcgtcttctgcgttccggctggatggccggcaaaagcgatacgaacaatgcaggaaatcttgcttgatatagcacatgaactcaatattggtacccttgcaactccgtttgtcctcaatgagcccgaggccgctgcggcgtatatacttgaagcgtgctcagggaggaaaaggctgtcagtgagtgcttgatcctctacagagcatcctactgctaactgctacctgaaagacaggagaagtgtttatggtttgtgatgcaggtggtgggaccgtggtaagtgcattattttattttttttgtcatgcccggattaataacaggaatgctaggatgctatcacttacagagtctgccaacaacacccatttcgagtggaagaagttgttcctcctactggtacgaagttttccgtatatcgagactgaaaatttgacacaaaatataggaagcaactgcggatccagctatgcaaaccaaactctcaagcaccaggccatagagaaaatcaagagtacagcgtacgagtcactgaaaggcccttcttttgaatacattattgagcacgacatcatgaccgagtttgagtataaaatcaagagaggtttcaatccggcagatgggctggacggggacgaagttatagtcgtgcacgggcttgagaggaatgagcgtttgggatttggacacaacaccatgcgtattaaaaggttcgtcagttccagcgtatcgcatctgtcatactaagtgcagccgagtgcaaccacatgctgatctatttctaagacgagatattgcggcactatttcagagtagcttgaacggtataagcaaactcattcgccaggagaatcagtgcagcggcagccaagggcctcacggtcgaggtatatcacactgttctccgaaaatactattttggttgattaatccaaggcgaaaattgctgacaccacggatacagacaattctgttggttggaggtttctcagctgcccccatcctccgctctcatatagaaacagagttcgaagctttgaagattatatatccgcccaaggggctgtaagtctcagtatgcataaaagccgcgcctggcttacggacaatagtgatagcgccgtgacagtctcccacggagctgttttccgtgcgttcaacaaatctgacggccctaagcgtattgtgcagtcaaattttggtttccttcagttggaactctacagcacaagacaaccagctcatcgaggcgtttccccgatttttaacgccatagacggcaagaaatatgtacgtgttctggattgggtgatcaagaaggtatcagaattgttttcagagctgcaaccgcgataggtttaagactaacggggcgcagggactagttttgagcaagcagcaacagtttcggactcgaaactggcaggtcttcaaaatggaggaggagctcgtgatacatcagaaaatctgggtgtctgattttgacaacgcccaaaaccactaccgagtgaacgctccttgcaataaaggtattaatacacattcatgttcctctccaggcttctggcactggctacacatggctgaccctgaattattgcttggacaggcgcggaagtctttggtatcctgcagatagacctagagccagtgaaaaacgagggcctcctcgagcttagatcgggaccagaggggatgttctacgagatccactacgaactggcaatggaagttgacggaaggaacctggctgtaaagctcttctatccaccagggggaatgtgtcgcgcgcagacgcagctttgtatcgcggcggccttcattccagggacagagtgatgtctgagttctatacacgcagatttaacatttactagctcaaactgagtgcttcagctcgcgctgctcagagagttaacccg

SEQ ID NO: 5225 - DNA, 8590 bp, Emericella nidulans
ctgcactcttggatcttagacttagcatcatattgcagtggtttgaaagaatatatcgccttccaccgggctccgctttatagataaggatttccatccgccgcaggtatataggcaaaaacaccaacgcatcagctcccccagttcgccaggccctcacgcaacaaaagtgccacggcagatgctcaagtgtcagcggccgttcctgacccctggccacctgcatagccgagccctttctccatattccagaccagatggcggacgccattttatgagtgaaacactaacgtgagagcgacgctgaacatgattgcagtgtcaaaacaaatgtgagagaatactgagtgccgcgatcagcgattcagagccgtattccaccttgtcaataatcagcagaggattcctcacgtgctaggtagaggccgcgtgagagccccaattggatggttagaatcgcgacactggtgatccagctgagttagagattggagatagagatatgccgcgagacgggtttgatttgaggcgttccttgcgaggagaggacgaggattgggttcagtgagcggaaagaaggttggaaggagctgaggcaaacatcagacttagcaccattcctgctgacgacaatcaaggatgaaggtcgagggtgcttacctcgacggccaaacaggtagttgtggcgtgagcatcgttagagacgcgacagcttcctgcagctgtagctcgaccaacacaaactaggatcaacaccaaaaggatgtgagttcgcatgcgaatacgagaacgggagggggattcatgcataccacaaccgtgcagcggtctcaggagctgaatagcaaacactgttttcgctggttgattggagacggggtgctcgtctgtcgagtggatcacctgggcgggaagcgaggaggcctgtcgatgtgttgaaggtcactttgtatggctgatcccctcgcacccctgcgccagtgcgagcatctagcctttctgactgcagactaacattaagtatccttgttcgttatccttatagggtgtaacaagcatcgagcactcaatcgtcaaatgaccatcatgggtctagaaaagggatgcagtattactccataggcgctctcaggctcaaagtgtacatctccagcctcgcttacttgttgacgttgattgagcctaccagtgtccaagagcctaaaaaagggcagatcgacagtaacttggctgctctggccgtcagtctactgcagagatcaccattggtcatctgaagctgacgcccaatgggaagaggggcttgtatagaccgggaagaggagaactactgggaacggataacaggtaacagatccattaacatatcgtgctctcttcattctctgtgcgcatcatgttgagtcgtgatcctattcgcatcgcatggttgtctcgtaacgaggacatggcatctctgtcaaagaacaagaaattgagactccacacgcccaccaggacccagaccaaacaagacagaatttgaggggagaggcgggcgacaaatatcccccggagaaccagcattcccttccctccacttcggactcaaacaaaacagtaccggtagggtcaaggaaaacaagagaaggaaaagatggcagacaaacttttcgacatgcgcgacaatacaagatggctagacgtaaacatcatagatctagcctgcgaaaggaggagatgctggtactaacagaaccaagggacaaggcaagacgataggtagagatagaagaggggaggagggcggtagaggtaaaatgagagacaaatggctatcaacgtaaccaaaaggcatcccggctgtgcaaagaggagaaacatcggcgattgattcggtcaatgtacagagtccttctgcagacgcgatgcttcggtcaactgatgataagttcaaacggggtatccatgaatctatgcaaagttacggccaccacggcggttgttgcgcggttttgagctgacggtgctccagccctcgtcgtcacctgcgttctccgtcgaggtaggtccagccctccaggaaccgttcaccttatcatcggccttcggggcttccgcagcagcggcgccgccgccttcagcctgctgttcaggatcttggtcggcgctcataccgctctcatcctcaccggcccgccggaggatctcaaagttaccgccaccccgaggagtatcttgctgatcccggccgttggggtcaagggtcgagacgggcttctcggatttggccgcctccttggcagccttctgcctctctgccttctcggcctttgccttctcctcagcttccttcttctggcgcagagctagttggcgccgttgttcaacttccttctctctggcagcggtatcgatgggacgagccccgccgaagatgctagactttgattcggtgctggggctggggctctcgccggcgtcagtcacggtccgcttctgaaggttgagcttcggtcttgtggcgggaccaggggcaacgtccggcacggcaccagcggggagaggggcagggggggttgctgggttgcttggggccgtcgggcttcattcaggctctccactggttgtccaattcgacggcagtgggggcgcgttcctggaattcgcgtctgggaggacgtgagccgtcctgagagcgtccctcaccccaggcaggcgagcgggttcggaaacccgcattatcatcgttacggggacggccttccctcataggcggaggagaaagaggacccttgcgttcccagttcgagaagtcacggaccttgccgtcgctctcgaaaccaccacggcgtcgaggttcgctgccggcgtcagagaggttgtcgaggttacgaccgaaagaggcgcgatccggcactcggcgcggaggagcaacatctgggagagggccccggcgggtccagtcaagttccttcacatcacgttccttggctgtaacctgttagtaccatgtacaagtatatgctcgggaacaacatacgaggctctgcaatgctgacgcggatcgatctgccctgaagagtcgctccggagaggtcgagggctttcttaagaccgtcgacggtttcgaattcgacgtaaccgaaacccttgggagcctttgtcaacttgtcctccacaatacggacgttcgtaacgccgcaatcagcgaaaaggtcggagatatcgcccgaggtagcatcaaaggacagatttccaatgtgagcggtgtacggaggctctgtaggcaggggaaggggctccctcatagcaaaaccgcggtctttcaccagttaatacacatatatttctcgccaaaccaagtagcgggtcgtaccgttgaaactgggtccgccgaaaccagcagatgacgcaggagggggacttttgtcggttccaaagctggagggagcgggagctgcggagtgttaaaaagacatatctggcaatcgggcagtgtgtgcgtctcgcggaagtggtcgcttaccggctatagagcattcacatcagtcaaggccatcaaataccaaacaatagtgaataaacacttaccaggcaagggcatgtcctccatctcatcggcccaagagccaaagtctacggtagttagccatgtatgtgtgcgcgggggagtctcgaatttcgaagcgtactctcatcagccaagaagttcccgagggacatcttctgggccttttgctttccgggcgctatacaaattcatctgttagcctccgtcgtccggcctttacttaaaaatgaggcgaccacgatggcgagtcggcagtgggaggggtcgacgcacccatgattgcggttggatcgagatcgcggaacgcgctaaggatggacctgcgcgcgcctcacagataggataaatttagcgtagtaaggagaggacttcctggaggaagttctggggttgaaatgtgggtgtgcagaagctccgcggttgagcagaggggaaagtctgaggaatatatgcgtgaggataaaatttagtgatgacactagaaaagtcagcctccaaaatgaaaagtgttggtgcgccagaccgagaccggaacccggactggagcccgacccagctgcgaacctggcctgaaccccagggctgtccgcctccgcctgttcctgttggtccattgcgccctattgtcttatatctagtatgtactctgcaatcctttggcacttttattagattctgcatttcacgtctacctcccgttcaggtcttgccggtctggtgggccagagcatcacaatcctgattggctgcgcttatggcattcacggcacgtgatatattgataccctgaattctcaggaatcaacaacacacctcaacacaagtttcccacttccatcacagtcttccagtggtcgagaggcccgattacgagttttcctctgacccagtcgggcaatatagagctgcaacaagggtggacgagggtctaatattatgttcttctcttcgctgctcacattggtgatgtgatgagttcctttcctccgcaggaggttgtgcggtgctcgaagaccaagttgagtcttacgccgcaaaagaaagcaggagcacatatatttcagtgatgtggccgacggaggcatattttggacatagatgacaagaatattcgtttcaacattggcctctgagggaactgggtagtgttgattgtggaggtggtgatgaacgacagccggcggaacaatggtcagaacgaagacgtctctagcgatatctcacatccagtcctttttcgccttggtcggattttgattacaccggcttgcctgaccgatggctagatggagaggcttgatccgtagagtatcttcaggttatctctcgcatcgtttgctaacaaaagacgaacagttccttcacagcccctggcccgagcaacctgcagcggcgatcatttcagttttatgctgtatcgggatctatatcgggttctaaaagcctcccaacgataccgtcatggtagcctcaaccgagtgaaagcggaaagaccaggtccctgggaaattcgcgtttgcggccttcctccaaagtgcatctcttgcatcaaagctcctatgatgagcaccattgaataaactagcctttggcagagtatgctacctgcacgcaccctccctagtattgccttgatattcgtcacattgttagttttcccagctctgcccatcggagaatggtccggattactgctgcccccgggagaatttgaaatagattggccgtggcggtggttggacgaaattcttctgacagaccatggctgatctctttttggcgttcaagaagcctgtgagccgacaaaactactgaaattcagagcgccttattaactctgtcaacgcgacaaggaaaaaaagattaagaaaccctcggcataatattcaatagtctagttgacataatcgcttggccttcgttcaggtttgaatcaacaaatcttattggcctctggctcgatccttctagcactaggcgctaaaagagccaacataaacattgaagttataatagtcacatctatcctgaacatccagccctccatcgccgccgaggatctcctcgccgtcgcgggtgacagaaaaggcctgcgagccgacacccatggggaagctgtttgtcacaatgccagcatctacgtcaaccgaaaactccagggagccgctgccgacagtcaatgtggccggctcggtgagcagcgtcgtaacaaagacactatcctcaagcaggttgattccatttggcggaccaagcggatccttcgagcaggtaacggctttcggtgtcggtctgtaccagtagaccagctggtcagactccacagtgggctctctctctcccgccttgtatgcggcgatgtagggcttggcgatgatgcgccatgcgtcgtggggaaagtctttcgtccattgcgcagagccgtcgtcagagtgggcttctgagtaagggccgatgtagtgggactcgccgtagtctttcacggttattcatgcctgctaatgtcaaaggagagactcaccattccaggaaatgatctcgatcaattctggctgcatttccagcatctgctgccagcggagatgtggaaggtcttcacagataaatacccagttcttggtgttgaagtgggttgaaaaccacggcgagacagctatagcatcgtcatcagcgtcgtctcaggagcaaaagaatggacaacctacgagccatataaaccttgtccttgagattattcctgaacctatcatcccaaattgtcgtcatggggcccttgataatactatttcctccatccgtcggccacgcataccacgaaaacgctccatcaatcgatgtcgtcgcgtggccggcccagttcggatcctgcagattcggaaccgcaaagattggatgatctactgccctcttgactggaccccagtcgaaactgtccccgacgaacgtgctcactaacgcagcaccattatattgaaactggcctggatggtcggcataggtctgcataatggaggtaattctggcagtgtcgccgttcgaccaatatgcgaagtcgaacgagataaacaccttaaagtcgacctcttcagctgcctcgtacgcatatgccagctgcttgtctgtgtaggagtcgatgctggcgcagttaagagcgaatgcgtcgattcccgtttccttggctagctccatatcgtgcttccagtcgtcgacggtatagttttcgacgatgccaaccttgctatgtcaacaccggcagcgttcaatgttggagaggaggaataccatgaaatgcgccgtgacatatttgttcgagtctttgcgaatagtgagactgttcgctcccggtagcgatagagccgggagagcattggctagaagagttagggctgcgcagcagcggtggaagatcttcattgcggcgtcagttgcttgcttgaggctgtgttgcctggatgcgaacttgcaatttccaagccgacatttcaggcccatatatatacgctgagtaaagagcctttgatcgcagaaaccatggacatctataaattcggtgaaatggtcgctcaaagaatggatcgcctgaccttctctagggttgcacttggataggcaatccattactcatgacgacccggcttttgtccgtccgcgcaggaacaccaagcatatgggatcacgccccgtagaatttagagcgagacaacgcccctttgcggggtgcaggtgtagttcaaggcaagagcgagtactgtccccgcgtatcttgagcgccagcttacatctatccgaagaagataggacacgagtttcagtatcgttcttgactggcaccgcaatatctacaccgattaacaccattatgtggaaattctcgtgatgaatcgctcagggtatctttttttttttttatgaacgttccaacactcttcatatatatctcttctggctcaagtgctagtgggaatatatcacaagctataaaactcgttcgtcctatcagcccgctcagtatccttgcactgtgagagttatatttcaattatccaaggaccgttctccttcccgagttagggttgctgagattcaccaccagcgtcatgttcaagacggtcttataagcgcaaacgttgccggtggcctgtaccatctcataccccttacgcatctcctaaatgatgaaattagatgcacacctaccacgcctatcacccctacgtagcctgagtatggtataagtctccattagcatgtctgcggagagcgttctcatgggcatgatgggcacgagacggctgaatatgactgtggtgcgtgataagactcgcaaccaactcgaactgccggaagatctgtactttctttgataagaacaggaatattgggtttttgcaagcataggatgtagtaatgtagataaactgatgggtatcgcgcgaaattactggagggcacttcagcggatgataacggtcacacgactgcagacaactgggcaaactcaatatctgaggttacattcagatttattatttaatgagctgggggatattaagccccaagtcccctgacgatgtgtccgaaccggtcaccgttcgcaagaacctgccaccggaagacactcagaaattgcaactgagcccgcatggccgaggagccaagatcgatatggctcgttattggagcgacacgggcatctatttaacagttggttagtgctgaagcgaagcattcctcagatggcttgagcatcttattcctcatacggcgtggctaatttctatatcctaacctgagtcatgtattggtcgacagcatgggcatgcttcttgggtctcttcctgtttgatgctcgctggaaaatctcgaaaatgccagtcagtatctctcaaagccttctttaaaggctatggctatttcagtgctgcacgtattggcctactgggcgccagtcgtggttagggctaaccaaaggctgccgaggtgccaatgcagtcaatgaaaggcaatgttaagaccttgcgcttaagattcctggcc

SEQ ID NO: 5226 - DNA, 5516 bp, Emericella nidulans
cagcagttgattttatcgtgctattgcactactaggctattactagagcgcattgggcgcttgtgatgtgccgcaagttggcgtcaatcctcaatatgagcctcaagggtccattaggtggatgggttcatggatacttgcaagcagtgattcaattagtcctgtaactataccctggatatacagaggacgccattataggaccataatcgttactggagatcgagttcagtactgatagcactgatagcactgatagcacttactggtagtgctggtactactagtaatactgataacatctgttttttaaagaaaaacaatgagacgagagacgaatggatgaagtattaccataaaagcagctctaacattttctaatacagggagggaaccctgcaagctggacagccaaaggttgtaccgaggcccttggccgagggaacaatgcggggttgatggcggggtagagtcgatgccctaatagtgcagagtaaatgatccaccgggcctgcactctttactctggtccgaacaagtgtcccgagtctcaagactcatcttactagatgagataccgatgtatgccatgccagtactgcatatgctggatgcacatcatatgctattgattcgggctagcattccgcaggattattaagaattactactgccgaatatagactggagatgtattcaatatgtggtttcgaggaagacagcgtagctagacttcgacccagctcagtgcgccttggaagacccagttcttgggtccttcgcagtactccatggtatttcactgggaaccaagctcgggttgccagctcgcgtgtgggatctactccaccaccaattaccagtatggtctatcccaacaaagtggagtccagacaacccagctttctccacatattttgctcctgatcgttacgcaatagggtaatatggtcctggtacgatctttctgatacgatcttcctcggccgacgggatgaatgaggggttaggggttgaggcagaagtgttgggaaaggtatttaggagccagattgattctcaagagcgtcctttttcttttcatcttttctctttttcttcctttcgttgattatattacaatcacaacatcatcatgtctgaatacaccaacctgcccgactacgactccctcccgcccgtcaaaggcatgccccgtggctgcgcatggggtattttcgacaaagacggcaagaaagaccatatcgggtgtctgaacctgcttacaccgtctgtggtgcgctcggcctttgaagaagcggagaccgaccagtcggtctcgctgaactggcccatcaacgctttccataagcctgggttccagcgcgcgggactcgagcataagggctctttggtccaggacccgccctttaagttacatgggttcgacgacgaggtcgcgttcaatactcagtgctccagccagtgggatagcttggtacatttcgcgcaccagccgtccgggttcagctataatggagtcaagccaacgaaggaggcgctgctgcaggcagacgcgcccttccacaaagacaccgacctgcccacgcttgaccactggcattcgcgcggcggcctcgtcggtcgcggtgtcctgctcgactaccaagcgtacgcagacgcgcacggccggaagtactctccctttgagacgcacaaaatcactgtcgccgatctcgaggctgtggctcaatgggagaatgttgagttgcgccagggcgatattgtcatcatccggtccgggttcacaaaggggctgcaggaagctgccacgccagagaaacaggcagagtgcatggccagccaccgaactgtcggggtggaaggcaacgaggctacggcgaagtggttctggaacaagcattttgcggctgttgcgggcgatgccatcgcgttcgagtgtctgccgccgtcgaaagaagatgggacagaggggtcgattggagatctgggtaagtctgccttgtctgtcggtgatggatctgtgtttatgagtatgctaacggcatctagtgctgcatcagtacttcctcggcctgttcgggctgaatatcggcgagctgtgggatcttgaggcgctgtcgaagctttgtgctgagaagaagcgatactcgttcttgctcacaagctgtccgctcaacgtgccaggcagcgtcgggagcccaccgaatgcgcttgcgattttttagatctgtacatactagttagagtataaatataattagttgatatgagccgctgcaatccaaacatggcccaagagcgtagtggtgatgctgcagtcttgacgcaattagcctcatgataggactcgctgtaatgctccagtgggaaagagttggaaatgaggggactgatgaatctactatgtcaagctgagagtgagctagaagtcctttcgaagcaagaaagcagaagaattgaattcctcccaagacccgacctttttgacaaaacaagcctgaatcatgttgctgtaataaacagaagccattgttatcaactatcatagtgcggaacagcccacaggcctttggatcccgccgaacacatcaggtctatataatctaagaatgaaaagagactgtctgccatccctaagtacaaatgaggatgtaagaggtcgccgccagcagatctgtcctaatatgccctaatatgccctaatatgccctaatatgccctaatatgccctaatatgccctaatctgcctttcactttttcgttggccctagtgacgattaacctactggtgcagacgatcgagatagcccgtgcagcagccactaaagaatccataacatgacaggagtgctcttaggaccttatctctgcatcttgaattcatcgcagagttgatagaatagccgctagtgagaaacgcgtctcacgatggatatcaggtaaggttcaggaaagacataattcagatatcttattggtatacaaaatagaaattacatggtcttgattacctgtcgccccgttgtatttgtcacctggttcaatattgccctggtctatcgaccacgctcaaaccagtacccgagtacacctttctcatatgtccgagccgaggcttcttaagatcactataagatcactaatcgaggaaagcttcatagaacgctcaaatcattattgaatcacttaggaaaggcattagcccacgtcctagctacagccccctacgacttcccaaagcccgaacgtggcaggagcttcctgcgagctggactcgccggcggcttggtggttgctgaaggaagctaccacaaatttcaacggaagcactgtgtctgagctttactttccggaagatcaagcagctctatcctcttttctgggacaagtaagtgagaatggcgaagcatactgatgatgagatttacagatctcgaaccgcatcgccaagcagtagagactggcaatcgggtgtgatagatatcgatgaatgggcacaaaagactacactggagattattggtatcgcaggactaggctgggactttacactgaagcattcaaataaagaactagctttacactacaaggagatatccacccctacttcgaccatgagtttgcggaccaacttttaacgctgatcgctgctgggtgagtgaggcgccatcatttccctgatgactactaaatcgctgatgcggtgtacgggcatgaaacaacctcatcagcttccacttggatcatttactatctcactctcaaccccatctgaagtacgtctgcgagctgggatacaggcttcctgccgatttctccggctttgacatcgctgctattctcgggtatctaaccctgctcaacggcatttgtaacgggatacaccgtaatcttccatctgacgcgacaacaacgcgtcaaagtaagcacaacaccaacctcgtcggccggccgattgccgcaggcacggtcctcaccatagcaccatgtgtaatcaacaagcacctgatctctggagccctaacgcgcacgagttcaggcccgaaaggtggatagatgcggatactgggaagcccaaccaaacaggcggtgcttcgacgaactatgctttctaacatttcttcaggagccgtgcagctgcattggccagagttttgcgcgagccgagctgcgaacactgctggctgcatttgttgcaacgtactagtggacgatggcagatcaaaatgagaaagtcacccagcaatggtgataactgctaaaccgtaaaacgggccgaaggtcgagttggtcaaagttgggagatgctggaggaaccaatcttatcttgatagattaccgatcaatatcccttatgctgccaatataattaggctatgattgcgaactattcatgagcataggtcccgcagtcttgtagttcgtataccctaagccactgtattatttccagtttatgaagtttttagggctggaagttgtttctccgcagggccaagcaggccagaagcataagggagtcgagcgccattcttcgccgatatgtaggcttctcaataataccacccacgtgttctttgtcccatgagcccattaaagatgccatatcctgtgcattacaacttcgcacaacgactctgcaggcctatccaacaggcctgcgcggattgcttctcccgaaacgagaaatagaagctacgtgaagccggccaacagcagatgctaaggttgattttcaacgacaccagcgtgccatgtgccaacgctgtagaatccttcaatgggcataaggtactcgatcttctatgtaaacgcacatggactatcaaccctacgtgggagatcatattctaactctattcccggccgaattgcgagcataagcttccttgggacttagagtcagtggcttcccagttcttcacctgaagacctgctctccgggggctcaggaagttgtcggcggtttaacttgactcgacggggtaggctgaaatatgtgtagcttgtcagtagaaagcgatatgccgcgcaacgagaaatttaaccggggaaatgagtattcgaagcaggaactaggactggagcagacttggggcgccgaaggacttacgatgttagaatggtctccagcggggatggtgtactttttggtgacggagcatgttgaatatattgggctgggattccccatgaaagatgatatattgaggagtcagctggtacaattttatatagctctaggtatattgtcgccctatatagtaggtggaaacatgtgatgataagccgtaaatgatcccctgccatatttcctccgtgtccgctccagctccgtttctaattagttcagcacccggaaggtattcttagccgactattgagcttctttaatatagaaaacttcaagcggagaatattctccaatgaagctacgccgatatagtacctgcatctgcatgtggacgatttttgcaagaacacattccatatgcgtgccatgttggacggc

SEQ ID NO: 5227 - DNA, 4236 bp, Emericella nidulans
ctgcaattgctttgcatgattaccaacagaacaccacataagcgcctacatgttccccagccatcttgcatgccacaactcaaaaaaaaaggaaaaaagaagaggaaaaagaaaaagaaaaagaaaaagaatagattccgccgacgataaaatatatcaaatttaccgactcataccagcgtcgggcttcgcaagcatataccgcacagcctcgtgagcaacagccgtatcccaaacgctgtttgagccaccacgtcggaactcgggcccactggcatcctcgccaccaccccgggtagcttcgccaaggatcgtctcgaggtctctgcgttgagagttaatccagcgacggacaaacgtagccgggtccttgctgagcgcggtgaaaaaggagtgctttgcgcgcgaatgcgtaagggcctggatgatgagggcaacctggtcgtccagctgggcgatttggcgcatccccgcggcgtactggggattctgggttagggctagcatttttgagcggagggggtcttcaacggcgacttggatgtcatagacggtgggagtagggtctttgtggaattcttcgtcgacgcggattgtgtaggggagtttgatggggtcgagagggctggtgtgagggccgatgctttccggaatttgagggaagaacatctggtcgcggccgaagatctgtataaattgttagtacatctaaaaagcattaatgataagaacaggaagtcgacttaccgctcgcagacgatcgtcacaacgtactaatcttttctcctcatcttcctgtagccccatagcgcggatgtagtcccagatacccagcacaataccgcttcgggtctcctcctcgacgtcgagcacctccgctagttccttgcttagcttgtagcgctcaggcgtctcgtctcgtacaaggctgatggtgacattcagattttcctgggatgcgcgggaaaattgcacgctatcgaaatctgcgttgggcggcaggtttactgcattaggtggtacttggggtttcgtccaagttattgtttgcatctcggcagggcttgttgacggagacttatcaaagtcaacagtgattgatttgaaaaagtgcgagaaccgctgttcggaacgcttggtggtggctgccttcttcccatcagaaccgtcttccgccatcgcatctccaggcccctgggcaccaccctcgtcgtcactgtctttctccgcaaggtcgctaacatcctccaacagccggccctctatccgcaccttgtatcgccctgagccaggggttgttccaggtaccgagccattctgaccggtctgccacggctggttctccaccgtattcgagacccagatgcgcattgtccggtacttcttgactgttttactgattgagtcttggatgtccaacctcttccgcacaatcgccgcatctagacgcttctccaggtcgcgcaagctcttatactgttgcacaccctctccgatgacaacgtcttcaacaccatctgggatattcttgtcagtaggcttgcggctgcggcggagggcagcgtcgttctggtgctgtaggttacgctgaggcgccatgtattgaggaggcacggcgtgttgaggcattgggacgggcatagggcctaagaatcaagcaccagggttagatactattacatatgagaaaattacgcgccggggttcagtgcatggcagagagtactgaacgaacctggagcttggggtccgcgacgaggcgtggcaggagaccgttggacgccctggggataggctcgtccgtagcccggcggcattggtggagcgttcatgattggcaatttatccggaaagccgaagaaatctgtattcgatatttgcgacacggtaatttcaagagacagagccagcccaatgcggtggaggccgttgactgagagtcttcagtggattccaaacttcgctgagtcgcgatcgcgctttacccgttttggacaatatcaatcctccaaggtcaagatcaaacccctgggtgctacgaaattacaaatgcaatttgagtatgtagaccatgagttttcgatgtgccgatcatgtctctaacttatgtcatttctggagtacagaaacaaaagatcccacgaaacgtctagatagccttactccagttgcgatgcctggttagtgtacagcgactccacaacattacttagtctcgcaatggtttccagtgccgcatcgtaagcctgatcacgctcagtctcgtcgtaaacgatcaagcatccggcgccctggtctaacactccaatgatcaccttgtccaggatcatttgtgagagctttctctccacctgctgtgtatccaaacccaccatcttagcaatatggtctaattcaacacggctgaacggttcgatgaccttgataaggttctgttccagcatggcgtcgtaaagtcggcggaggtggttacggatgaaggcatcacttcctagttcaaaccggtaatccgagagcgctttttcgtactcttcaagcgaacggtttgcatgagcgcgcgcaactgctttcatcgcctcaagtcgcggactggcgtatttctgggcctgtttagagcccagtagggttgtgacatcgtccaccagattcagcattatcttgcagaggagcatgtattgcagcgctgctgtcgccttctctccttcgtccagcgagctgtagccttctagggcctcaataaagtaagagtatgaggtgttgaaatctttatcctcggcgtgcagcataccactctgcatatccaaaccagcctgcagattcggaggtgtgtagacagaagcggccgaagtgcgagcggccgtcagcgcagcacgcgccttagcctggttgccaagtgcatggtatacccgcgattccaatagctgcacctcaactagcataagcttgtcgtcgagccgcttcagttctcggagaagtgagttgatcaggtttaaagcgtcataatagctttgcttctgcatgaatatcgccaccaacctagtctcgaggttctgccgtagaaaggatcgtcgctcggcgacggcccattcaatgcaagatcggatgacggcaatctgaatatcgagggtgttcggaatctcactaaacaaatcgagcaactggcgaactacacaatacccattagctaaccgtcacattcgcattcacctgcaatataattataacgtaccgagctttgctgtctttgctttggcgaatgatgaaaaagaatcccgacttgttttgatcagttctgcgatctcctgcggcttcttctcgtcccggtagagctctcccagcccgaccaaagcattttcgtaatcacgcgacgagctttcggtagatcccgggccttgggcaaggacctctttgtagatagatgccgcttgcgaagcatctttctttgcgagtgctcgagcttcctctatccgctgagcggcctgagaggagggagccatgacttaagcttatgtgaaggggcgaaaagatatttggtggctcgaaggaaatgccaatagtgaattgcgcagtacgacacagaacgaactcgtaacgtgagaatcaaggatagtttggggtgtgaacgatgatgcatgggcggatatcatcacttggccgttggagcttcatcttaggtaaccttactaagttattgtaagccttgatgcctgagagcgtggttcaccgcccacagtctggcggtctcgatttcctccgcagaaaaaatgtatagaacagaaaatatctcttgagcaagatccgtttaccttggttcttcttttcttcttcgtcttatagatatatttgcgggagggaaataatggtaagcattatgcttatatcaaattgtctgtgcaagtcactcatgcctgagcagaaaatcaaagctctttcacgatccactgcctcgcagcaggcgccggggtctgctgtagctcgacaaccacgaaatcttgacccggctcaacatccattcgaacgtgcgcgcgaatatacgagagccctcaatgctgtaaaattggagcgtctctttcgtgcgcctttcctaggtcagatgggagagggccatgttgatggtgtctacacgatggcgaaggaccctggctctttagaacgatttgctagcggcagtggtgatggtgtagtgaaagtttgggaccttgtaacacaaggcgaggtatggaacaacacggcgca

SEQ ID NO: 5228 - DNA, 10757 bp, Emericella nidulans
ggggataaacaaaaccccccaaatcaaccaattgggtaaaagcgatacccttaaaataccggccaaactaggaagtagggtaatactgcagaagggaaactttaagaccttcaaaaaaaacaaaggtgccttaaatcggtgggtgagaggcataaaatagggaatgggcgttgttaccatatccaggaacccacttggtccacactcaagaacgtttcattggaaaggccctatttcatccaccacccgttgttcaaattgtggttgcgcagctaaacagctctttaacaaccggataagcggacctatcggaaaaccggtgcctcattgtcatcaaggatccctgaatgatctgcagcttttcagtttgaacaagcacgaatttctgagagaccagtgcctggaagttttacatcgagctacaaccagtctccctgacaaacaattttgcacgcataaaagtaaagaattatatattcattactgcaactatggacattgacatgttcacgttaaattcacttcgttaagtctggctttttgaacttcctgatcttctattctgacacaggagtaatcgtcgtaacctccttgaggttcctgctgctgaatccgactcgaatagtgaaatcgccctcgggaatcagccattgctgagacacagtgtcccagtagctcaagtccctccgcatcagctcaaatatcaccttagtcgactcgccaggttgcagagaaaccttgtcgaagccacggagctgcttaggcggggtgccctcaggcgtgctgtcagggaaggtgacgtacaattgaggcacggtggcaccctcgacgtctccggtattagtgacagacacagtgacgttatagatagtctcccagagctcggggttacctcccggttgaatagctctgtcctccggggctgaggtgatggagtcgacaacgcgggtagcgtagatatcggaaatgttaaaggtcgtatatgacagaccgaaaccgaactcgtacaacacggggatgttgtgtgcgtcaaagtagcggtaatcgatctcgagtttttcatcgaaccaggactgccagtcctcacggccgctagtggtcacagcagtggtaggaggagcgttgtaatcactgccgttgcgggcaatggtgtatggaagacgtccggaggggttgacgtcgccgtacaggacatcgacgatagaatttccggattcttggccggggaaatgggcggctaggatggcagtgacgttggggtggttggcgaagggaagctcattgattccggaggagtgggtgacgactatggtgttgttgcaagctgcggcgacggcttcgaccacctcggtgccattataatcgagtctcaggtgttcgcggtctgcgccctcctctgcccaggtcttgacaaaaacaaggcaggcagttggaggggtaggaacgcgcagaagatcagcctggacgtcggaagtcgctatttgtgtgttgttgagccagaactgcacgaggctggtgttgtccttctgggcacgggcattgatagccgtcaatggcgagacgagataggtgaagcgaccagttcccgagccaccgccggcagcgagggttccgtactcataggttgcatcattgtacggtccgttggttatgtcactcgcgtcgttaccgaacacagcgagagttttgggcgctttcagaggaagagcgttgttcttgttcttgagcagaacagtcgcttcagctgcctgtttgcggatgagcgcagcatggttaccacgaacatcacggctccgctcgccagtgaggttaaagtcttggtaccaggtgttgcggggagagaaagtgttgtagtcggcagttgacgggtcgaccgtagggtagtcctggtcctgaccaagccagaagtagggggtcatgatacggagaatcatatcatctatgcgagattcttctagagtgccgttgttcaccgcggctgtcacatttccgccgaagaaagagcggtttataaaggtctggccgtacgcaccgagaccaccaggcatgtccatatcctgtccgctcttgataccagcgacaccggagtgggtagcaccccaatcggacatgacatagccctggaagccgagctcacctttcagcagtccgttgagtgtcttggagttctcgcatccataggagccgttgatacgctggtaggagcacatgatactggctgcctttgcgtggaccgcgttagcaaacggccacaagtaaagctcatgcatggttcggtcgtcaatgttggaagagacggcttcttggatgacagttcccaatggtgcactgtcattgaaggtggggttacgcatcgtctcctgctcgttgccaatgaagtgttttgggcatgcctgaacacccgcatcctggtaaccctgaatagtttcctccatggcgacaccggtgagatacgggtcggcagcgaagccttcccagtttcggcctgagtatgcagagcgtcccagcggtccagcgacgggaccgagggcgacgtgagcacccttggctttgaactcctggcccatggcataaccgcgttcatatagaatcttcctatcccaggaggctgcggcggtgacaccagcactgaagacgctggccatgtctgtcacgcggatggccagcggaccgtcctgcaagcaaagaccgctgaagttgagccgagggatggcaattatgttgcccacgcatggcccgggctgcccagtaaccatgtttgccttctcctcaagggtcaactgagcaacgaagtcctgcgcttgagcaagagctgtctcccatccaccactaccagttgtgttggctgccatcgacgtcaacaatagcctttacatggtcaagttataagataggggtcttacgtgagggatagacggctggagaatgcccataagcacccaggatggttgtgttctttggctggacatagctgaacgcatcgtcactccgagaagagccaccgccatagttctgggcttgggcgccagaggcagccaacagaccccagacgagaatttgagaagcgctcgtcattatcgtcattgtcgcagctgtgaaattgacgaagctcaaggctgctgttgagaaaagaagagattttggcagtgatcggtgtctcctacttatagattccatcggcaggtacggcccagcatggcaagccgactttacgggatgtcggaatgttctttctgcctctactccgcactttcgcagtactactcaattcgcagcggaccggtacctcaactcgcatgaagtcatgtcttggatgctataccacggatcgttgacaatcacaatagtaccaagcaaactctccccagttgtccacctggagacctaacctaaccctatgtggggtatggggacgggcggagcggaggagcaggcgaatgaggataaaagacatgcttacagatggggaggttggcggtaaaatttgctataccgagtcattcttgactctgaggtttagccgacgtttacccacgttgcgctttggggctcctcagtgacaatgatcgacggagatatggcctgactcggtcaagtccctctgaagctggcacgaggcaactccagtgaccgtggtcgctgtggtttatacggagatgtggggtgtggagtgcatgactagttggacttacgctaggcagggtttccccaatcccaatccccaataacaccctcggcaataccccgatattcgcacatggtgtcattgctgaggcggcagtggggtaaatgacggaacggggtccaaatacaggaatattctgcctgcaagaatctacttcgtgttcgctcattaataaccacggttctcctggtccaagcaactgtttcttccgaaatcgagtctgtcatggaatgaacgtgcattagtgtccaaagagccagagggctcaagctcacgacgatccaaattccaatatctccccggccggatgaagaaatggccgttttggagtaccgtggacaaagcctatatgccttttagtcgtccactggtactacggtcttactccgtcgctatgggacaggtcaatatctgttaacaatcattcactgtcatgatcgtcggcatatacccgtgtccaaggaacacacgccgactactccatggaccaaggtaatctgccgttgaccgaggtcccgaaggagtcttgccgtacgtacttggctcggccgtgaaggattcaacctttacaagctcgtaagcaggttgcgcctacacccgtgcgccaaatccttcccagtgctaagcacacttgtggcttgacctagcccgaccaagacctactctagctccgaagtgacgtacgtcgagtatacttctctcaacttggcagcctggagccagcgggaaatctgaccatgagtttttctctacggctggaagtgttccgggcaccttacgacatggcgggacggtatcatggcgcctgcgcgtactacagactaagtggctgccggatcgcccgtccgatgccaactttctccttgctcatgagtgccaagaatacgggccatccgactcgtgcaaatgacacaacggcatacttatgccgatgtcaccgtactgtgtagagtctgtagactgcaggctacacgatgatatcagatatcccgacctttccccgatgtgacgaccggattcccaactggagtccagcaagcaagcctctgggcccggccgtctccggagattttttgcggactcagatggtcctgctccaaatcattgcccataggatggcagcagacgggacgcacggaggcgcgagacgagtcgcgtggtatgaaaacatcggagtggtgccgatagtacgggtttgggtggggtgactagagccggaggactgaaaactggagtggcgatgaaatgccggtcaaggtaggcttgattataacgggatgtgaccattactgagaagccgcatgctgtgctcaagcttgccatcttcatcgaggcggccgtatacagggccgaatggactttgccgagttacatttggtgtgtctcctggcgcttgcaagcacgagttctatttctcgatggcatatacacatatatcctacaggagtaccctatcggtttgccgaagtgcgaggcctctgagtagtacgtatcgacagggacttgatcggcgtagtcctacgcagggccaaaaaaaaaaagaggagaaaatatatatggctacgcagtacatgcattattcccgtgcgccatttactctgcatcactgaaaaagaccaaatcagttacctccagcaatcaactcctcacaagcaatcttgtagactagaactttctaagaaaagaatgctgtagatgaagctgagcgcatgaggtggacgattaatctatcaaccgcatgttgacgcaagccagggattccgcaccgggtaacctaggctcaataatagcagtaactgcctagtttgctcgtagatattcccagtcctggacaaagtgccagagtcagaatggctgactccatttccagatggcgggggtgctttcttggttctgtagaccccgctccaccacaatttcaccaacctcgtagtacattgatgattaaaatgctgcacaatattcatcagtccaggcgacgttaatagcagatgctgacgtcttcctattagtatcctgttacagcccgatcattcacacaacagcagcggcggggtctgctatattattctgcaagcatttcccacctgaccccgcgtctttttttttcagaccgaagaggacgtcttctcttatataaccattctggcccggtccaggcactcagagctcgagcatgggcttattgttgcgcctaatagaagttctctctaaaatccgtcgtctccagaacttgttagcatagccttgggcatcaatgattaatgtgtgttcggcttgatcataaagtacacacaacccatgaaagcgctgtattaatgcaggactcttcttgtaagtaattcgatgccgatgtcgtgccgatacccggcagcttctattgggcgttgatctacagacttgcggttcttaagcagagcccatagtggcctttgcatcgagctaccaatctactaaagtcgggcatatgtcaaaggactgggtcagagtgttcagctcttcacacctctgctccttgaggaaggtatcctattatctggtatgtggatgatgcatgaaacaagcaagtatcgagcattgacagcgctgctgaggcttgggatgggctgccgctttccaaaagatgcacctaggtcaggctgatggcctgcttgtgcatatattaatgctgtttcaggcataatacggaagcacctcgagcatggttggttgtcccgggtattgtgctgacgcggtctgatgagagtaattttgatggtagagctagtattctggattcaatatataatagtcacactgaagctctcaaggtcattttctgtaaatatgctattagcctcttgtctacctgtgacatatgccccatcacggtgttgaaatcttgaattggtaagtatgcgctttcacgtgctttatactgtccgcaatatatatctactgttctaccacacgatcgcttcatagtgttgacttcgtaccacaagtatacgagtttgatcatgtttctatagagattcgtgagcatttactattaggacatcctatttatgccttagactctagaaactatagtacgtagttagctacatatgcgtgtaaagattttgccacaaacaccacgatcacgatcgctaagacaaccccaagatgaatttgaaagaaaactgcccagcgacaccacatattcgagctactagctcatgcagggcgacgttgatctgtggagcgaagtggatgtgatcttcggcctaatcgcatccctggtcgaggagtgggtactaaactaaacaccgtgctaccaggatcataaacatctagtatacgggtagaccatgagatttttctacagctattgacactttcagatacaagaatacttccttttatggtttagaatcgtcttgggccaaatcttagggccagcaaaataagcgacaattataacaactcaccttgtcaattattgcagtcatagaggtgagtagcatcccacccactttttccattgcactcagagtcctatctccccagtctagcctgttatgaccatgatactggaatatatgaattattcaagcttcaggtgcaatctcgagcgtgcaacccccagatcggaccctgaaactgtcagcgctgcaagtatcaatactgcgcgaggcattgtcgctgccgtctaaaggatgcaacaaccacacatattacgttctggccgcagatgtgctaccttatcccaagtattatgatggacttcctagaaccctatgaatgtccctgcgccgcgaatattgccggcaaacatgattaattagggtggtgtttggtatatcttatgcaggaaatattatagaccatggaacttgcaagggccgctggggatgcggtctaatctgatcgggtgtgctgcatacagttttaataggctgcgtatattcctccaagtctgttgccctcaggggccattgtcacaaacttgccagtgagcaatatcatgtcttgagtccagcctggctgtccgcggcggctaatatatattattctccgtatgcagagcagtacatggccttattgttgatgagcagctttttacagctctccccaagatgaaatctgattttcgcgtttttggaatcgcaatatatagccttgcagtgggtcacagtcagaccatgttccggaagctcaggagcgattctttatcgtgcgtgtgggaaaaggagagcatttaaggatgtcatattcctgcgattatatattgggaggtggctcatgttattcctgccgttaaggatgttttgacttccatggtggcttcagaaatgggcgattgtttgcgattgttacgttgttgatgattcatgatcacacggttggtccgttctgtggaaggcaaatggtcaaacgacttggctgatttattgagtgtacatgagcaactgcgaatgctcttcttacttgatgaaacatgcctgcgaagacacattattcctaggctttggtatccgggccgcacctgtagctgaggagcatagctggggagtatgaaaggcgggcatgctaaactacatgctcacgatgaacgcttaaattagtttctttgctggtcacaaggagccacataacgagctatctctatgcctttgccttttccaggtattgtggcttccagagtcggagcccagaaccctaggcttgcgccatagaaccaggtagaatatgattatatcgcgatgatgtaaggccgcaagccatcagttagacaggacactgaaatataaaaggggtctcctttccatgagaactcctgttgccaccgtcgtatagtgacgatctgccatagagaaacgcggtcacttacgttgagcggaggacttgatatcctcttgctcaggcttgatccatcaagccctaataatgaagtcgatgcgatagccatcaatcattggccttcagccatggcagcatactgagtgtgttctttctcagacggcacaaacaacatgttgatgggagccatatctgtggagatctgtccttgaccaggcagggagggattctccgccaacttcaggagcgcaaaatataggacgactactgaccttatgacatctcgcaagctcgtgaaaatacagcgcttcctacggcccattgacagctttggtcgccgtgtcagatagcgcgaagcccaatatggctccagaaatcgtcactgagccgtgatgcttttggttgcgacggatccaggacgaccatgctgtccttgtcctccctcccgtttctcccgaagccctagcataccgagataacaaccaatccaccaaaatggcgcatttctcgcactttgatccttggattcggccgtgactgctccggttcgaatcgagggtattcgcagaatcccgggaagggtaacactgcccttcgggcagccaacgacaggcaaagaggggttttgtcctccatagaaactaacccaaaaaatgggcgtctagctcgttctttgtggctagtagttcctggcggaccaatatcggaagcaaggacggcattcaattcgctggattggacgaatttgaactaacggagcggagtaagccgtggtaaaggcactaatggggacaattccgggacatcaaagcgcgacatgccacgatgagtgaggctatcaacggcagcgggtggtttcgggagcaattgccgtctcacgataggattgggcggcggtaacttggcgaagcggcatcgacgatctgcaaatagagaatcgtatggtatcctggaaagaagagcccgaatactgctaggagagatgggaccgtatgagaacgaaacccggcgaacaaaaaggaagatgaaagaattgatccccaactcgcgaatcgaatactcgatggagacccattattgtgaacggcctcggatgggcccgttagagtggcctgaagaggttcagaactgtttcgggattggctgtagttgcgagagaaacagacccacagaagacccccgaatgcatgtcaaagaaagcgtgcgtacttggatagtttgggaaatgcaaggttatgagttttcacgcagcattcaaggggtcatagcgaagagggagcgcctcttgtctttctggctgacatgcgctatgggtagaaagaatgctgcatgaagtcaaaatggctgttgtggatattgtgtagattttagcctgaggcatcaactatgtcacatgtggagtcagtctaacggcagatgacgacaccgaattgagtcccaacttctctgtaccagtaaacatgttatcacttcaagttacgacgtctttggataaagataacaaggcagcaaacggtgggtcataatcttcaaggcacatccaggtacaaacgtcatgatccggcagcgtaaatggattcgatgcttgaaggtatctactccaagtagatagtaatagatactctgcatacttaaagagtagtaaaacggggtgcgctatatctgacgctacgccagcctcgggtccgcagttgcctcgttgttccggctcgacggttgcaatttccgacataaccaggggctcgtcgggcagcacagaacgtcgtacaagcggcgggtgtgactgggcagacatgatggcattagcccagttgcatattcaacgcgttcgtaggcaatagtgtcggcaacaatggtagtatttcgagcaaggagtaatcctgttttccaggaccccagatctgcgtagttcgaaaaaccaatcagaggccggttgaatggtctggtgctccgtcctgatgcaatgggctgtggataacgaccggttccccaccccgagccacagtatggctatgaccttcacttcaggctgcatctcggtcattattggcctcaatctcgaagtctcacttctctttcgactcaccggtccactgtgaacgcttcttctctacccttccatcgtgccttccttgtttggctgccttctgcttcagaagtctatataatcccatccccgcccagtcaagtcacactctcccttccttcacaaccatcctcataacacaacacaacccaagacacatac

SEQ ID NO: 5229 - DNA, 6526 bp, Emericella nidulans
gcattcgactttagatttatccgcacttccgtcatgccctgcttcaaagggctcgccgttagtatacacactccggacggaccgctacctgagtactcgatccagcgccagtcccgagcctcgcgtatcacatcttacatccccgtaccgccgcctaagatcccggatacagctggtggaaaaccggagcagtctacttttgccatctccatcaccctattgaatccggggcaagatgtgccgtactcggctggaaagccgacgcctgataacccccaccccaagcccaaagtcgtcggtggcctcccgggacagacggagcagcgcggtctctataccagcacggttgcgccgtatcaagctttgaccaattctccgaacgaaaccgtcgccgcttacatctacttcgacggccgacagaaggaggaggtcgctaccctgcttcggcggggggaggagacctgggtgaactcgcgatgggtcagcgttccagagtcggagggcggtggacttgcagagcgagagtttcttttccgcgaggtcggactggaaagatggcttaatggtttggatttggagggcaataaggacgcggcagcgaagatcgaacggagacgccagaaaatggagaaacgcagggccaaacgcgcattagatggcaacaacgatctggatatggacgataagaagcgcgataagggtgttatgcgatatggcaatgataccaggtcgccgttggaggatgtttccgacgatgatgtttcgctcgcaagttccgacgatgacccagttccggaatctacgggccagatcaaggtcgctctcttccgtgttctagcttcgggagaaatcaaacgaggagaatactcgccccaattcgatgctcatgacgatgacgaggatggccagggaggtcagggcggtggtgacgaggatatcgaccacactactagttttgcgaagcccaaaacactcgacccgaagtcgatcagcacgcagacagtcactgggattgacccgtctgacaagccatatgcgatcttcacctttatgtaccggggagaacgtaagtacaatctaaaccgtgacgaacatgaactgacgctgcacaggacaactacagaaaatgggcatcttgaaagactccaaatcgcaagagacccctggttcagccaaacgccgatcgcagcagcttgatttcgctaaccttggcccgctaaaacctggaggaacagtgggttttctgaatttccgggacaacactgaagggcgacggaagagcaagaaggacaaaggggtggtggacgacgatgatatggacagtgatgacgatgaagacgaccggatactcaaccaggcagacgaggaagaagacaaggaagatgaccaacacctctccccggatgatattagacgacagggcgagctggcagagggcttgcgacagatcaaggtatgatttctcaacttttaacgcctcatgactaactcgtattagcttaaacgccaacactcggcccgcgtcgcttgccggcagctctcgtcgggatacggcaagtcccaagacaaccggagccactccgacatcaacgaacacttccacaactcctccggcggcgacagcaacctcggcgcccacgaccaccgggacattggaagggcagtcgacgaatacgttgaacggcgaggaattccttggcagcccgcttaagaagcagcgtcccagtgtctcgcaagcagacgaatctttacttcgacaaaggatgggatcaggactctcgcaacaaataagcgatgtgttaggcagcggtgctcagagcggcagtgtcacaaataactcaaagcctccactcggccctagtcatgatgaatctctacaatctcccaaaacgatgaatccacctgacagtgtggacgaggagctttagttaggagaccgggggaatctatccacatgcacatctcatatcattctatttttgacatatcaactcttcacgacgtgacggattggcgctaggggcataacatttggcccgtattggaatcttaactttatctattttcttttgtggcggtatttttatgtgaatgacggagcaagcaggaggcaggaatggcatttgctagagatgtctctttattgaaaatcttactatgagaggatagagtggatagcattgtatggattattacgtattgttcggagctcaaatggcttccgcagacggaactttcctcctgcaccttttcaagcaacatgtctacactccctttatatctttagtacgacccagactacgcccaatatgcctcttacacggtccaccgatcccctagtctggatcgactgcgaggttcgaacgccgcccgattcttgacagctgattctcactactgacgaagatgacgggcctcgacccgacgaccgaccacatcctccaaatctgctgctttatcaccgatgccgacctaaacctcctcgacgcaaccggcttcgaggccgtgatacatgtcccgcagagcgcgctcgactcgatgtcgcagtggtgcatcgacacccacggccgtactggactaacgcagcgcgtccagaactcgaccgtgacgcccgaggccgcggccgccgacctgctcgcctacatcaagcggtacataccaaaaccacggactgcattgctggcgggcaacagcgtgcacgcggataaagcgtttctggcctgtggaccgtatgcggcaattctggagtggctgcactatcggatagtggatgtgagtacaattaaggaggttgtcaggcggtggggaggggaggggctgttgagcgcggtacccccaaagaaggaggtgcatgaggccagggaggacattctggagagcattgaggagatgaaattctataaagagcagctgtttggtgctagcaagctagcaaataaataatagtagtcagaatgcagccgagcagcgagtggtggtgaggggtgcacattgatactatgatactataattacattacctcacacccagccaggtatttgttgtgtctctgccccccactacgagatcatcaatccagcttcaatcgatccctcttctgcatcattcggccaattgtcggtgaacaactgattccctgttttagattgacgtgcctataattaccctctccctcccttgctccccctactttctctttcttctttcccaagtcaacccagtcaaaacagctaccccgccatgtcggtccagaccgtttccatccagcccttcggcgaccagaagcccggaacgtacgtcaatgcactctgttttcctgttgacgtgtctctaacagcggtttttcagctctggcctgcgaaagaaggtcaagatcttccagcaagagaactacaccgagtccttccttaccagtatcttcctctcgatccctgagggcgctcaggacgctttcctcgtcattggtggcgatggtcgctactacaactccgacgtcattcagaagatcgccaagatcggtgccgcctatggtgtgaagaagctcatcgtaggccagaacggcatcctcagtaccccggctgccagcaatctcattcgcaagaggaaggccaccggtggcattctcttgacggctagtcataatcctggcggtacgacactcctagacaccgagtgaacttctcagctgactggataggccccgataacgactttggtatcaagtacaatctcaccaatggcgcgcccgccccggaacaggtcaccaataagatctacgaggtctcgaagtccctcacctcctacaagtacatcgacctccccgaggttgacaccaccacagtcggcacccgcagctatggccccctcgaggtggaagttgtccactcgaccgaggactacgtctccatgatgaaggagatctttgacttcgacctcatccgcagcttcctcaagaagcaccccgatttcaaggtcctcttcgacggcatgcacggtgtaacaggcccctacggcatcgatatcttcgtcaacgagctcggccttccctccagcagcaccatgaactgcatccccaagcccgatttcggcggcggtcacccagaccctaacctcgtgtacgcgcacgagctcgtcgaggccgtcgacaagaacggcatccacttcggcgccgcttctgacggtgacggtgaccgcaacatgatctacggcgccaacaccttcgtctcccctggcgactctctcgccatcatcgctcaccacgcaaagcttatcccctggttccaaaagcacggcgttgacggcctcgcccgctctatgcccacctccggcgccgtggaccgcgtcgccaaggcccagggcctgcagagctacgaagtcccgacaggttggaagttcttctgcaacctcttcgacaacaagaagatgtccatctgcggcgaagagagcttcggtaccggctccaaccatatccgtgagaaggacggtgtctgggctattgtcgcatggttgaatgtcatcgccggcgtcgccgagcagaagcccaacgaaacacctagcattgcttcgatccaggctgagttctgggaaactgacggccgcactttcttcactcgctacgactacgagaacgtcgattccgacggcgcgaacaaacttattgccgcgctgagcgagaaggctgtcgacaacaagagctcatttgttggcagcaccatctctggccgaaaggtcgttgactctggcaacttcgcctacactgatcttgacggcagcgttaccaagaaccagggtttgtatgttaagttcgatgacggcagccgtctggttgtgcgtctgtccgggacgggaagcagtggtgctaccatccggctgtacgtcgagaaatatgagggcgataagagcaagtaccagatggctacgcaagattacctcaaggataatgttgggttggcgctggaattgctcaagtttaaggagtttgttggccgcgaggagccggatgtgaagacttaggtttagccactcgagcctgatatcttttgtcttcgatcataatgagtattagttataaaatatatcgcctcattaattacacttggtccatcattccagttatcttataacccaacaccagccaatttccctgcccaccactcaccccatttcacgacgccttcgtgtcttcgactctcttctgccgcgaaaacaaccccatgactcttgatcacgtcgtcaaggctacatcccacaaacattctctgtgccttctcagcctcccacccctcattaatgaccttctcgacggcacctacgaacccacgagcgagtccgtagtcgccgcccccgtgtgcctcttcctcctcgggcggttgcttgggtatttcaagaatccgggtctcgttgtcagcaaatgtgtaaattgttatgctggacgaggtgtacgttatctcgccgtgtgtgccgtagatacggccccgtcggacgcattgatcctgtgtgggtgcaatcatgtgaagatttgctgttatgccggggccattccttttagttgtggatctaaaggtcgtctgggaggatggggacgagggcaggacgtcccaggcaagtgagacgaattggtcatcaacaacgtcgttatcggactcccagacgcagcgaccgtaccagggtctccgcttgatgacttcgtcgggcgtgttatcgtcgtagtcttgttgaagggtggagaggagatgatgctctgctgcattcagatcaccttcagctccattctcgagattgccatcttcggtgccattcccgtccttgccgtggggcgaaggtaggtagtcttctatatccgggcagacgatcttaaccggccaccctgacttgcccttccttagctggttgtcgcgatagatccggatggcggagtacatgcagtcccgctcgatggggcaagacgtgcagtttgttgcggagcggcagcgggaggcttctgggagggtgtgaattgcgtgaggtacccagttgaggagacggttcgtagcttcaatttcctctcaccgtcgccgtcaccatcgctagtgccaaaagaagatgaaggcgaagtaacagccccttcaacaagccaaagcaaaaagtcaacgtcgtgacaacttttcgtcagcaaacttccatctccattttcagtttcccgtctccagttcccacggacataactgtgtgcaaaatgccagtacccgactggctcggtgtgctctactgagacaatatcgccaatgaccttttcttctcgaaccagtcgtctcagaagaagattgtgggggctgtagcggagtacatggccaattgagaagatacttcttggctgtctggtgtaagcggcgtagacgctgagacaatcatccaacgacaacgcaagaggtttctcgcagaggacatggagatcgagcaggttcgcctttgcgagggccttcaggacgagaatgtgtgtttcgtcaagggtgcagatgagcacgccgtcaacccctccttttactt

SEQ ID NO: 5230 - DNA, 2842 bp, Emericella nidulans
cgggattcgcggaatttgcgcgtccagcagcggatattccatcgcggaatcctttccgccaccccgcatctatcatttttcgaacgtgctcggcgcaaaaagaatcacgtagcgaaactaggaatgaataggaaatcgccgtggatacccttggccagagccttgaatacgagcgattccgagtttatcctctagatagagaactgcatcgatgaacacttccaacgcaccaccttttccctctagcagactcaaaccgtttccaagcaacaaaccctagtcaagactgcaatatctacttaaagggacaccgcaccggtcaagatgtctacaaattcagacctcagagtgacactctacacctactttcgctcctcgtgctccgcgcgccttcgtatcgccctcgcccttaggtcaatctcctatacctcagtccctatcaacctgctgaagggcgagcagtcgagcacaaaaaacacggccgtaaacccatcggccaccgttcccacgctcatcatcgagcatgtagaccggagccagtctccaataacaataacccagtccctcgcagcgctcgaatacctggatgaagcattccccgacaatcccaacccactccttccacctatttctaacccgcaacaacgcgcgctcgtgaggtctctagcatcaattatagcctgcgacattcagccagtcacgaacctacggattcttcagcgcgttgcaccattcggcgtcgaccgggccgcctggtcaaaggatctcattgaagctgggtttgcggcgtatgaggctattgctagagactctgctggagtattcagtgttggcgatacaatcacgatggcggatgtttgtttgatccccgctgtttggggcgcagagagagcgggggtaaatctgggacagtatcctacaattaaaagggttgcggaggccctggagaaggagaatgcagttaaggaggggcattggagaacccagcaggatacaccaacggaattcaggtgttgaatctgctgcttggcgaccgatgttccattgtcggaacgaaaatgttatacagaccggtcttgaatgatggacggggtttactgcgagagtaaaaggttatcgacaagttcggacaggagtctctgcgtacccttgcgctaaataagagtaatgtaaatgacctgcaaagcatctccaaagaagacccgagtagcaaataaaaaagtcaaaaaaaagtatggtcccggaggggatcgaaccctcagccttggcgttattagcaccacgcgctaaccaattgcgccacggaacccgcttgctgaaatatttcaaattactactaatctatattcttagtgaaaaaggagcgcagtaatgtccccagaagccgccaatttttgcctgaaagtgttgccaaatataactactcagctctggggtaaaaaaaaacctagcattgccatcaagcttgaaatatctcattttattttaactattgcatgcgaatcacagatccagctgcacaggcggcaaaattgttccggcacaatcgccaaaccctacatagttgccttcagttcccgccataccacgcagaataacagtgtcaccgtcctctaagaacaagcgctcggagccatctgcgagcttgataggattctttccattggtttgctcgaggaaactgccttcggtctgattctccttgccagagatcgtaccactgccgaggagatcaccggtgttcaggttgcagcccgttatggtgtggtgggccagcatctgagggaaagagtacaggaggttctttgcattgctgtgggagataacagtaggctcgccgcctgcattggtgacttcgacctccagcgggatatcatagtcagtgtcagcccgcttctcccgcagatacggtaggagagactccctgtttccgggttctagaccgccggtgcgatagggctcgagagcatcattcaggacaacccatggggtgatcgttgtgccaaagttctttgcgttaaagggtccaacaggatcgtactcccaggcctggatgtcgcgggcagaccagtcgttcataagcaccgcgccgaagatatggtcgccggctttgtcgatatgaaccggatgccctagatcattgggagttgagacgaaaaacgctaactccagttcgatatcgagcttcttgcaaggagagaaggtgggtaatttagggtttgccgcgggattcgtcaagatctggccctgtggacggtggagaggcgtgccggaggtgaccacagacgaggcacggccatggtaagccacggggagatgtttataatttggctgtagggcattgtcgggtcccctgaagaggactccaacgttgtaagcatggttaaggccggcgtagaaatctgtgtaatcgccgatctgcatggggagatggtttgtaacctcagacagcggcaggagggcctctttctggagcgctgcattgtctctgaggatttgaggaaaaggcgtctctgtgctgaagaccttctgaatgtattcacggacttgtcggtgcactggtcgaccaagagctgcgaacgcgttcagggtggattggttgaagacattcagatgaggctggatgacgggaagctgggagaaaccgccagacgaggcaaatttgctcaagtctaaggcataatctccgatcgcaatagcgggaactcgcgacgagagcttcgatgatgaaatgataccgaatgggatgtttgcagcgagaaaggcgagttcttggggatttgtaccacgaagccattgtgacgggagctagcaaaaattaggagagaatggtagatgaatg

SEQ ID NO: 5231 - DNA, 6628 bp, Emericella nidulans
  unsure (1)..(6628): unsure at all n locations
tatgttgaatcgtactctaaccgggttgtaggacgtgaacgttttaaaactggcctccgaccatggggagcctgtgaaattggagcagctagggagtgttgagggtgaggctgtcaacccctgattttatcgcagctaacctcgtaggacgcccaattggatcggtgttcattgatcgtacaatttacaggcttatcgttgaacggctgtctaaagtaagggatgaattagagcacacacctgaacatgttgcatggaagatgctatcgggtcgcttccagcggttaaaatgcgcctttggaactgacgtcgcacgcacacccatgctcagccttgaagtgcccttcttaaaaaactcgagaactgatttaccagttgccggtatctacgatggtcagatgagtattgaatggtatttgctcctcccaggggaaattgaaatggcgaatttgctaattctctaccagggaacacattcagcgttcctttgacaagaaaatcaacgaaatgtgcgagctacttgaccgccagatccagaacatggagacaaaatatcctcaagatcgtattgtaagcccaccattctactcagaggcgtcgagctcactcaatgcagtcatatcttattctctcgggtgggtttggaagctctccctacgttagggatcgtctacatcaacgatatgcagttccaggagtagcgaagcatcccaatgtcctcggcctgcaggtgctcatggcggaagagccacagcttgcggttgtccatggactgcttcttgaccgaatccagcagttgaaacgcggagtggtgatgtttgggtccagacggtcaccggtcagctacggcattatctgtgacctgatatatgatccggaaaagcatataggagagccagtccggcgagatccaagagacaacaatctttatgccattgaccagattgagtggctgatcatccaggtatcttccaatgccaatcccgctcacagaagtactaacggtcgtagggccacactgttcctcacacgggtatatcaaaggattttcagctcaagataaagcccggcgaggagcatcttccttggaaagtccatgtcgtcatgtccacgaatccccccgatttgctaccacagagcatgaagggcaaaggcgcgcagcatgtctgtagtttagacatcagtacggatgacgtggaccggaaaatgaagaatagaaggtggtataacatgcgtccgcggtattggcgcgctttatttgaggttcgagtggtcgttggcgcggcggatctgacgtttcagctatggtcaaaggaccaaaggattcgaagtagccagcatgagccgataagggtgcaatggatgccagcggcggcaaatgaatgaatgctaggaatcagtggctgcagactttgtcttgttccctttcatgcagtgtacaaatttctactttgattgaccccggtggttctgttaataagtattttattttcatgttatgcagggatcaatgaagctcgtatattatatcttgaccaatgacttgcttcaaatgctcttgatggttgaggtatcatacccctgagagcagacgatgtttgacaacgacactatgttgactgttttgggatacccctgatacctaccatactaacagaatcactggggtcaatcacagtatgcgtctgcgcctcttgagtacttgcgctgacaataaatcatatattcagagggggtcaatttcgctgaaaatggagatattcaaaattagtctgccagcgttgctgttggatcgcgagttagtgatacagaggtcttaagataaccgtagtttttgtcctgttgtagtctcatcgaactacaaagggtgctagtattttcagtggctggcctaaagtgtttatcatgatgaacctctatcatatagccggtccccaggctcgcgcaaggatgacgggggagacgagcccagctgaaagccagatcgcgcaataagggtgagccgctcaccctgttgtctcaccagtttgcccaccccacttgcgtgatggtacacaaggacagcaaacaagactttgcttattcgattacaggggcaatgcgtggagatcacatgtatatcctgccaaggcgtacaaggctaatctggcttcctggatggcagcagattcccgagcgttggagaccttgcagtaagtatgagtggcagactgattcttgctgctctatacaagagattcagaaggcggcagatgatgtctgcactgataatccctgcagaacaaatgatggggtggttacttgtctaatgggggtccacgagaggcaggtgcagataataatcgaaatcaactcgcataatcataagaacgggacctaataaacctatttagctatgactatactggtcccttcagcaagtaaagcatcatgctagcagcagcatgctagttacacaggtttcatgcatagctccctgatcaggtttgcattttctctggttctcaggacgagtaattactagtggtaatggtgaaacaaagcaagcgattctgtacagcaaattactatgaatttagattctgccggcccaataccagcgtttacatgaaatcgttgacattacaatcgcgtcgtaatagtctgccgtacgtgtatttatgatcggtgggtgatagaagacggaatggaacgaatacctctcttatgccggcatttccactcaacttaactaaccaaccaacttaagcatgtggggacactggggccctgaaagttcctttgatcattgtcagctcagcccctatatggaaaggtgcaccgaggcaacctggaatctggggcgggaaatgcgcctaacgaccgccgcgtgactctcaaaagcagtgacaggatccataccccagccgtgagtgggacagacgggccagctgcatcgcccaggcgtaggattggttggggatcaccggagctgctagcggcccgtcctagcagcgtgcgacaagctattctagtctcaggaggaaagccagcccaaacgaataagagtgctgtcacgaggacatagccaatttcacattgatgaggggaagtcatgctcattggcaaaggcgtagattccgcgcatgtctccctgtagctctatgttcagcctctcagagacaaatagcttgggcctggggaagtatgtcgatcagccaaacccgaattttctgttattaattttaagaatcatattaaggccaagagacgagctaaaatgctaagaacctttaattacaaatgctagtcgccgactccactaataccgaacaagcccgctaatgggttaacaagtgctctatccgccaatccgccaattctagcgccctttctgtttcctccttacgtgctagccaggacgggatccaggctactcagacagacagcattccttcactcactgtgcccagggccgcccctccaagctcacatgagattagtattcagtaatctggcacggctgaaacattctcgggttaacggatggttaacggatgtctaatgaaatagagctacaagcttacgaatgtccgactctaataacagagcatggtgctattataatttcttttggttccattaacattgcacctgtatgagcctagtctatgcctatcgaggggttcaattgataacagcaatgcgttctatgtatcttatacctatatgggatctgcaaacgtacaccaacagaagtacgatgtgattagtgtattatttataacaaaggtgatcgcgatcctttagatgcgcaggcaggaaccagaacacgaacctagtctacagacgcgagggatcattcctgcgggccagcccgtagtcccacagcttacactgtaagtacagattacactgagcatcttcccggctattgcgcacgcatccgtgggtgggaacactagctcaacacaaaacctacgctagggtaatggagctattgagctgagccggctcttatctttggctccaccgatcttcaaacaacccaagccgtagttttgagacgaacgcatcagaaacacagtagcgtgctgtgccgcacaaggagactaagcacattagtcctcttttggcccttggccccatttgcggcgcagcagttgcagcacggcaaagatgacagataaaacaatggattaaatcgttgcacccccgggcttgaggaaaggaagatgaaaggggacaattcgagttctgcagcatgatcctccaacacgtttacgtgcttgctttccttcaattcctcttcctcattcaagcctccagtgcaggatacacccctctgcaaacgtaccataatgctgacaaagacacaactattgccatcaagcgggccctggactccgctaagggcacaacgtacacgcttaatgaaacgaaattgacgaaaagttaggctgaccctaccctattctccgctggaataaggtacccnngaatcgtctcgccgatagtttgacacgcttgctgacagccagtctttagttccagtacaaatgcctctgttgcatcagaggatgcaacactagacctcgagggaggtcttgcagttgtttgcgcagcatgttatatcaatgggtctgtcagcggtttcttgaccgtggagaacgacttcaatattacccaggcaatagataatgtcgtggatgaggttgcaaacgtgacagagtcggcaattgaccagctcgaaacttttgttgatgatttaatcggcaacgtcactgatattgacagtatctcggatttcgactttcctgcctggccgaccctcgacttggacttggacctcgatgatgcagacgggttcccagatgtacatgcgcaatttgaattcaacgacttagagctttatgtggagctggatatccagttgtccgctggggcaacatatacgttgaacttatttacgtcgcagagtgttgctggcttctccattcctggccttgaggcaggcgcgctgttcaaagtctcgctggtgctgatcgcccaggcggaaattgacatcagcagtgggtttcatattaaacttgacgatgcgtttgcgttagagttggaactgttcaacaagaatgtctcgcaaatttcaatgtgagcccccgtgaactcgacactcatcccatacgcttctcttcttcgtcaatcgaagtctaatagtcttctcgcaggcccggtggaagaatggaatttcttccagtagtcattgaaggccacggtagcctacaagccctactcctactggaagccagcgttgggtttgagattgcaagtccgaactcaatcttggccgacattgccagttttagtgctggaataggcgctgaagtcttcgcttatgtggccgactttctcgtgcaggctgatgcttctactagcgacgatgcagactgtgcagtcgaagttgttgccgaatatactcttgccgtgggcgcagctgcgggtgcaactgtcgctgttgctgagtatgaatggggccctgcgcctagtaccaccgttcctattttctataccaccctggcgagcatttgtgctggaagcaagacgtcttcaccgactactacacccgtttccacactagaagagcgggacaatgatctcgagaagacgacaactacagtgtccaccacatcaacgtacaccatggtgtcctgctcctcaaagggtctcgtcaactgtcctgtccgcctgcagagtacaacatctgttgagcgagcattgacgacagttctaactgtaggaccaaatatggaagccaccttccccgtggatacttttactaccctggaaggtgctatttcctttgggaacaatgttcgcactttcggtgccttgtccgggacgccggtttcctatgttcccccacaaccgacttcttcagaaactggtagtgctgaaagtgttggctcagccgacgatggcggcaattctaacaagactcaacttattattggcttgagcgtgggactgggagttccggccgtcatagctatagcgattgggttatggtatgcttgcaccaaggttcctaaatatgcaggacgtcttatttactaactaatttaggtggctttcttataaacataagggatctcgtatcaaacaagatggggtgacagcggcctctccaggtcaggagcagggtgcgaaacagccaatgacaacagtgagcgctacctgaagagaaactacacctataagtacctgtatataatcaaggtgaagcttgctctctaagttttccattcgtaaactggtagatacgacaacagggtgtgaacaataaaatatcccctccgctcagccatattatgccactaatctaggctgttactcattttctgagcttaagatgattatgtagggctttcgtacttttatctaacaaatccagtgccagggaacgaaacaggaggtgaggtggtaagttgattggaacttatacataaccattctggcgctcatttaaaaacctggcgcatggttaagagacatatgagggatccaggcgtcggtgagagatagtagaacctagttcccatgccagtataaaaagatgcaggaaaccacatcttctcctctagttagtgaa

SEQ ID NO: 5232 - DNA, 3033 bp, Emericella nidulans
caccatcagcaaaattgcatacggggggttcatcatgcaggcggaatcttttctgcgatcatcactcacaaggcgtgaacgttatcacctccggtcaggttccttgcgcagctgctctccgtgccagtcatggacaacacagcaacagtctcaaataatgaatcctaccgacggtatgagtttgtgccagctttgccggccgcgaagatgctatggtaccgcaaccactacctacccaatgagaaagactggtcacaccctgaggcaagtccgctattctacacaggtgattggtcggcgctgccccgggcgctgatcatggtaggtgagctggacgtattacggagcgagggagagcagtatgcggagaagttgaagcaggctgaggttgaagtcgatttgcaggtgatgaagggcatgccacatccgtttctggccatggatggtgtcctgaaggagggaaagcggtcaataacgctgatgtgtgacctgctgaaagaagtcttctccagttagatggttagtctgggaatggctttgctgacagacttcaagaagtcatgcaaagcaacatcaggaaatacgttatatctgggaagataatacagtatatgagagtcgcagcaaagcaattccactagaacttaggccggaggacctcatcaacaaaacaggtagctttctcctcagctcgaggaaacccggaaagcgttctgctcagagccagtccaggcaaccatgacatcttggtcattttgatcggggttgctctctccactgcacatccatgtatcattcttgatttgctgattagctctctctgcgcaccctgcaaacgtcaataggcctcccaagggcattatgattctctattgtgagaatacgataggcggaagtgttgggaccttggactgcttatcgcagtaagaccacgctttcaactctcgctgtgcatattatgtatgcatgacttccagcattatcaagttcgagaatgttggcagcacaccgtatgtgctcttgcacatgttaactaccttccactttcgaaattctgtcatcctagttcgaccgctgtacgtgcgaggtgaccaggactaggaatccggccaagtgattggaagttcaggccacttggttattatcatgaccgcttcgtctcaccactgccaactgacccatagccgggtgctggaacctgcatcagcgctatcactgctggttgagtccgtcgactctatggagtacagtggataaaagatcagggaaatgaaatcagggaaagaacgagggccttcctcccttagcctggagcataacttggtatccgcaagcacttgttgcctggtgctgtccgaagtcgcctggatttacagggctaaaacgacataaacggcaccctcttccggtcccttattgccccaccggggtacgctaaacccgagcaaatcagatgtcagggcatgatgggctgaggctcagcctccgagtcagggcgagaaaccaacaggacttttgaagggtcgaaaacttcggtcgaacccgtcgaattaggcactcgcacaggttgcctacgttagcgggcatatgagcccaatgaggctcagggccaatttaacttgaatggggtctctgggctcaaggtccaatgataacagcggcccgttgtgggagggcgattgtatcaagaagccaagccaggcgctaacggaggaccctcgagttagcgagctggacaacggagactgatggagtcacagactcatatggggtcaaaccacccgagtagtgttatacccaagctagatgcaacctcgcctccgcactgtcctcgagagttgaattgaaaagtcgaaagttggaaatcacttcggctgctccaaatcgttgacggcctttatgtgatacttcaatatatactataagagattagaccataatagattgacacacagagatatggtctatagaccgccgatctgctgatccgggttcttacttatgttcgtcgctggatctgacgtttggtgagcgcgtcaacctctcgagagtgagtaggaacctgaccgaggccaagcttgggggggcccggccacctcattggtgttcctggagcgccctctggcgcttgtccctttacggatccccgtgcagtccctgattccctggcctctctccttcctgattccgccttcacacttctttattattttcttccactcccccactctctacttgagctaaatttagcgagccatattttctgaccatccttgttcaatcaatcctgcgcgtggatactggtcggacctgtccgtggcaaatctgggcttcacaattacaccgatgatagaataggcgtcatcaaggcctgcaaccaactcacaatgtcaaatcctccaaggttaaatcatctgaatgctttgctgcgactcgctaacgtttatggatcccgacagaacagaagatggatgattcgactcgacgtacagaggatctttttgcggctctacgctcgctcgggcagtgtccgactgtcgagactccaattatgctgctccacttctactgatggagaaaccaaggctcctcgcattgtatttacgcctttacggccactaaagactcaggaacccacggagtcggccactgtgctggattttacccggatagttgctgatagttgctggttcaatgctcgtggccccatcttggcctcctcgagcctcctggtgactcgaaccctgaccggacgggtcgtccacggactttcatcttccaggtaggcgctaagcatattatcacacttccctaatatcatggctcctcaacattggtccataggtgccactcgccaggccaatgactatgaggctttaacgggcctgattgtgcaatttcccgtgagattagtagcaaccatatatcacccattgcctccccgagtaatgtgaatcctcttgccagcctttctttcattcgtgtaaggccctagaagcagacgttcgtctgcgtcctttcgttgtcaagttt

SEQ ID NO: 5233 - DNA, 2751 bp, Emericella nidulans
attcctttatcgagaagctgtgtatgttgccgaatactgacatttctgatcgagataggtcagattatgggcaatcacaataaatttgctatctacttccgattcctcagccggtcaactagaaacaatgatgaaattagtaaagtcgcattcagtacattcagtaacaggtttccgtatagcttctgcgaatatacgacaaggtattcctaatgcccaattcagtcatattgatctgcagatttgacctatatccagagattatttcgcattatcaggtagttgagggcaagcgcaaagggtcaacctgcaggatagaagatcagctttgacaggctggatgatacaaataccgatatacctgcataccactgaataaaatgatatgaatgaccgtcgtcacggttcctcttccagtcgtggtcggatatctagggtttggttaccgtccgtctccaaacaagtagagaccgagaattattttttctgcacagtggtactattcggtagtactcgacacgaatttggcagaattagtgcatttacagaaatctcaccaataatacctagtgggtctagatctatttcgatcaggtgctagtctcgcatcaagagatcattggttacgtccctgaatcacggccactccaccaaggccgcaatttgctgcggctcagctcctattaagatccctgcgcgctcatctgcatcacctcacttttttctcgatttcttctcttatttttaaatgaatataacagcttattacgccatgaagctcacttcggctcttctggcggtgttaccgtgtgccttcttcgcctcggctagtcaagagtcctacgtcggctgcttcagcactcctggctccttcgaaaatctcggcacatacgttttccaatcgatcggccactgcctcaaccaatgcaccaaggctgggtataatatcggggactatgcggctgtcaaggagaccgattgctattgtggagacgtcgatcccgcaaaggacgatctggtcgatgatgatcagtgtaccacgcagtgtccggggtatgcgccggatgtctgcgagtgagccggcaaaaataacgcttgagaaacgctgacagcctaggtggtggaagcgaggcgtggtctgtgtacgtcgttggcgaggcgagaccggatttttggtcgtccgaaactacacctagcgggaggtctgatctttggtcccatgggactacatccagcacgacgagcgtctcagagggtcagccaactgctgcatcatctgccacatcgactccgactgggacctctacgtctgaagctgcctccgcttcctcctcgtctccagccagcgtctcaagcacgtcggcctcggcttcgaccagtattgaaccgaccccgactggaaatagtgccagtcgccgctacagcttctttttctaagaaagtcgttagctcagacgtctagctgtgcgaaatgagagcaagcgggttctgaacgagttctacaagaacgacaccaccgcgcttcgtgggggtaaaataagcagatcaaatctccccttgggtaaggccagtgtcaatggaacagcgattttgtatcacttctgcagtattggcgtgctaccgcgaatagagtcgattcgacttcctgcagctagctctctaattacttagatgacaccagttagatttatctcgctgaggtctatgtacaacaaacatcgctctagcgctatatcaaactacacgtgaaagattccagtgtcctggaacaataacagatgaaatcaaggtgacttcgatgcttgatgtgctgcaagtcagtctatcgaaccctatctggaaacagcccagcaaatccaaattgatactgccaattactctaaattcgtttaacagtctctactgccagccatatcactactaaagctaatactccctctaaacatatcttatgccgttccatcccctttctcctgcccagccgcattgatctgcacgtcagtcacgtacttatcaaacttgcgcagtttaactttcttctcaaacctgcaaacccaatattagccagttttcaaacacagaatcattgaagaggatgaagtggccatacagctcgtcaatctccgccggcgtccgcctagtgacctcaggcaaaataaaccacgcgatcacgacggagatcgacccggtagcggcgaagctgtattaatcattagcatctttcgcctctactgcgataccgtaacaatagacggaatatatacaagaaaccagtcctaaccccccactgcgtggcttcaccgttgatcatctgcggggtacagaaactaaacatgatagcaaccatatttgacagcgccagcgagaaagctgctgtttgggcgcgcagccgctgagaaggaatttctgctgcgtaggcatacccgattgcggacgcaccggttgtcgaaaaggtagcgagacaagcgaagaagatctgcacggagattcagtattgatgtacgtcaaaggcgcagggaaaagggatcaaggggaaatctacaagcaaagagctcaacgagctcttggtataatcaaagcaccccactatccccagcgctaggacagaaataaccgtgacgccgtagggatacaccgtcaacggtctccggccgaatcgatctgtcagcgtgctggtcacgatcattgagataatttgcacgcatgacaggatgagggtgacgaggaaggggtctgagttgccagcagata

SEQ ID NO: 5234 - DNA, 3761 bp, Emericella nidulans
tgcagcgactcgaggagtattcgataaaggtatttattgattttatcccaaagcaaccactattgcatggctaatggacgcacgttcggcggaaagcaacggtatcacaaacgcaaagaggcttctagcggacccgatcttgtcgaacgactgtgacccctttgatgatttcctggtatgctgggcgttggccagttgactttgggactgtgcaccaacgctattgagtgttgtacaagccataaccaagtatgatttccactgttcaatcatgatttccgcagtcgtgttattcctagccagcaagcgagcttgcgcagggtcgatgggaggatactgagggtgctgcggagattctgccaaggcggtgatagctttgtgcatctgaacgagccttgcgcagacaatttcccgccctagtgtgacagcgaaagggcaagtctcaaaacttatgcggataatgttgggaaacaccttagaccataaagtcgaatcgtatgaaacctcgctgctgcaaagctctattagagtattttgggaggcactccgtcgttttcctttttgaatacggctcctttcggcgaccgttagatgctcgtcgttgacatccagaatttgctgagagtcagcctcaagtatcctgattattctggtgttctctttgccgagagcactgtcaaactctgttataagtcgaagcacagtaatagcgaaggatcgcaccacccgtgactgagagcataagaagaataagccgtgagatacgacttcctcgacttgcgctaaaacgctggacagatcaaggtgtagcgcgcggcttactgtgccgttcatttcacctgaatccgcaatagtacccttagttttctgcttgatttcctcaatccagatttgtaatagctcaacatagagtctcagagtcgactcgatgtggcccggtccaagcatcccttcgtcggacattgtagaatatctggcatcaaagttgaagatgaatctagcgaatcccatcgtgacttgctgtgcatgagactggcgcgcaatcgctttcagggactcagcagaagaaaaggcaaggtgaggctgaacatgagcagtgcctgtacacaacaaattgatcagtgaattaaatggtgtgtggtcagataagcaacggggaagtgcttgaacggccacatgaagcaggtcataaaatccttgcctctggtccaaggcgttgagatgatcatctcgtcgcccaaaactgaaagcttctgtaataggcgtcttgggcgtacttccaccgaacttttcatccaaggcagcttggccaccaaaagtattatcgcacagtagtgtgatcttacccaatatctcgcagaagcggaaataatgagccttgatgttatcgctgagtcgtgcggtattaacaggacagggcgaattttgacccgcgtcagtggtaccgggaagcttcgggtctatagggttctgcggtcgaaacagggacgttgtatcagtagggtcggtaaacgggttggggatcgagccggtaggaacaggggggcatagctggtcacagttctccaggtccgcaatgattgcaaggaatgactggataccaatcaccatcttctctggttccatttgctcgatttttatgtcccttccaggggacaagaagtagtccgaattgatcaaaggaaaaatgatggttcggaaacaaacatcaggatgcttaaacccaatcattcgtatcaactgaaccaaaggctcagccactaatgggtcggtactgaggtatgtcctcttccctgccggcagtgctaccttgactacctcatcgatcttgcggagggtcacggtgggagaatctgaataacggaagaagtaggtccacaccaagcgacacatcgcctgaagagctggtcctcttgtaggtcgatctttgagtttagcgggaagggattggatgattgacagccattgagaagagaagttctccttggacgataaacagagaagtaaaacatggagtggaaaagctgcaggccaatgcctgggtttggtcaacatatgcggaagacgtgagtgtaccaagtcgagaaactccttccacttgggaagtgtcagatcgcagttcgggttggctgctaccggaagaagcagtttctcgaatatactgcaatacgcttgcttgatgcgctggccatgagcgttgacaaataagcgggccaacgacctcatgaaatcgcacgatttcggccatttctcagggctcgtcctgatgcggacgtgcttcaagcccgaaatcaaaagctctgttctggcatctccctccttagatggtcctcgtaaactttcttccttctgatatttctcaagctccgttaaaaacctagtcgtaacgcttgtgaatttctcttcgctcatgataccaagcagctgtgagtagattctccagttagccatccggagtggcgaggcagtaatctggtcggggtcaactgtcttcagttggccgaacactatgtcttctagccggtccgccatgtcgactgttatagattcgagactgctctgattgaatatttctatcaaaaccctgcacactagataaaccgaaacggtcgctcgtcgctcggtcaaaacaatatcatcgtgccgggaaaggagcgaattcggtgaatggcctgaatcgccagccgcctggctcggctccgtatttcgccgcatcattaagccattctcagcgggcgattttgactgcaaaggcagacttggtcagcggagaaacagttctaatgaatgcagtaacctacttgactggccgcttgtttagctccaaggacagcatcacctttggctttcctccaaagcatgatcgtatcaatcagtggcttgggtttttggcgagcaatatgacccagtgctgaaatcaattgatcgaacttcgagtccgttcctgggccgcaaacatcctccactggagtatccgattcgcccagtttcatgatagcctggtttatcttattgtccgcttgaccgacaaacttaagcatgcatcagtaatcgttggcagacactccatttccatatagactcacagaattgaacagatgatgcagtgcgtattcaccaacagtcttcgactctgcctgcgcgtgtctggagtgcgaacgactgtgggaacgctctcgccacggctttccggtagagttcatccttctgtgagctacactcaacggactagccccttctgacacatcgtcggtatcccggtcttcaatcgtgctcagcattccctgtgtattgtggttcgccgtcccgttcgttgaagagctttgatggtttgagtgcatgtcagagtattccagcctcccaagtccagccatttcctgctcagcgccgccgctgcggctaagactcgcaatgagttcggggctcaaaggactcgttgacgtggtcgacgcggcgaagctgggatttcgggagtgctggattccatggacgatcgaggtctgccggtggtgcccgtacgagttcgatggcctgcgctccagcggggcatcgtttccaggactcgggcgcacagatgctgtttcagggctcttggaatgggactgaccgcggcgtcgactctgaggctggagggtggcaggggtagcgcggagggatcaagcgcccttcctctaacggcggaggtttcccgactatgaacagtggaagatggagtactccttgtaactaggcgctctggtggagatgagagattatggtgc
